United States Patent Application Publication US 2020/0377945 A1 - sequence listing, part 48

SEQ ID NO: 10718 - DNA, 28563 bp, Unknown
  gut microbiota DNA sequence
tttggaacggttgctgcatttacgtgcgataagcaaggagcgggatgaattgaaggggcgacaccgcaagggtgaagaaatcgtggtggcaacgagacgggagatcgaggtgttgcaggaacagttacgagagcaaaaagagaggttagaacagttgaaccagtcgatacccgatatgaaaatgttatcggacattcgggaatggtataatatacaacagcacattcgggaagagttgacccgttggcaggaagagttagccggggtgaataaggaaatcgcccgtgaggaaagggaggtgcggatggtacaggagcaatatcccgcgttcggggcgttacaggccatgacatgcgaggcgttgcaggaggcttgccgggagaggcaggaacaacttgccgctactgtgaaggagatacgggaggagtggttacatttaagtactcgccagcgattggtggatttcgcaagggagttgtcggagggagaaccttgtcccctttgcggggccttgtcgcatcccgcagccttgcacgccacggaagtcgagggtgagttgaaggagaaggccgaccgtgtcgcgggcttggaggaagaagggaaggtgttggaacggatggtgtcccgtctgaccgtgatcggggaacggttgcggtcggcaggggaaaggaaagagcaaatcacccgacagcaggatgttgcgcgggaacggttacgggagcatctgacccgtttcacgtgggaagggtttacacccgataatatgcaacgcttgacagacgagatgaaccgggtggcactcttgaacaaggagaaactggatggggagacggtacgcggaaacacggagaagagcatcgagcaaaaacgagtgaattttgaaaagtacgtcgcccgtcttgacgagatcagccgggagatcgtgcagcgggattcacaggtcgggttgttgcgggagcagcaagccgggtttgatgaaaaggagtacgagggggtacccaacatggagatcggcaaggagctggatgaatgcaggcagcgtttcgagcaggttgggcgggattatcaacgggatgccgcacggttgcaggtgatcgaggcggatttccggaggtgggaagggagcgtggaggaaaaaagcaaggaggtgattcgtttgcagcaggaattggaagaggaagtacaggagctgagtcgtttgttgaaagattcgacttatcccgatctggcggcagttcgggaggtgttggcaggtaagctggatttgcccggggtacggggagagattaaccgttaccgggagcaggttcacgccgtgcaggttcggaaagcggagttggaggtgttgcttgccggggtgtcttataacgaggaagaacacgttgcgctatgtcaacgggtggaggccgcgttggtacgggaacgggagatgctggcagaacagggagctttagggaaccagatcaaggatatggaaacccgtgtcgcggtgcgggagaagatagggcaggaattggaaggtttggagtctcggttgatgaatttgcagatgttgaagggattgttccgggggaatgatttcgtgaagttcgtttcgtcgatttacttgcagaatctttgtaacgcggcgaacgagcgtttttaccggatgacccgccagcgtttgaaactggagttaagcgaggaaaatgatttcgtggtacgtgatttcatgaacgagggacgggtgaggagcgcccgcacgctttccgggggacaggttttccaagcctcgttgtcgctggctctggcattaacggataatattcgtcatttgaccgggagtagccagaactttttctttctggatgagggattcggttcgctggaccgggagtcgttgagtgttgtcttcgaaaccttgaaatccttgcgggccgagaaccgggtggtcgggctgatctctcatgtcgaggaaatgcagcaggaggttccggcatgtttgttcgtggagaacacagtggagaggggaagcgtggtaataaaagataaaaactaaaagataaaaactaaaagttgaaagataaaagttgaaagtaggaaattaagaagcgttggccttgtgcggttggaatctaaaatttaaaatttaaaatctaaaatggtaaaggttggtttgttatcagatactcacgggtggttggacccgaagatcgtggagtttttcaaggattgtaacgaggtgtggcattgcggggacatcggggacgtggcgatcacggacgcgctggcgcaacgattcacgttacacgccgtgtacgggaatattgacgggggaatattgcgccggatattcccggagaaagaagtgtttcattgcgagaacgtgaaagtggtcatcactcatatcggtggttacccggggcattatgaccggaagattgcggaaacgttacggcgggaacgcccgcagcttttcgtgtgcggtcactcgcatatcgcgaaagtgaagtacgatcaggcattgggatgcctgcatatcaatccgggggcagccgggaaattcggattccacatggtgcggaccgcggcccgtttcgagattaacggggaacggatcgagaaccttgaattgatcgagttggaaaaataaataatttaagagtctgttaggacatttaatactttctgtttgttacatttgtgcaacttacacgtagaataggaagaacataaagtatataataaagtatgaaaagagtattactatcggcggtagcattgctaatcgcctgtttgagctgggaaaatgctgacgcgcaacggaaaccccgtgaggtgcaggaacaagcgattaagtaccagcgattaatgcaaatgattgatgccgcttacgtggataccgtgaacttgaagaaattgacggaagatgccatcgtgaaggtactggctgatctggaccctcattccgtgtatatttccaaagaggaggttgaggaggcgaatgaaccgctggacgggggctttttcgggatcgggatccagtttaacgtgcttaacgatacgttgctggtcgtggatgtggttgccgggggaccatcggaaaaggtgggcttgttggccggagaccggattattgccgttgacggggagaatattgccgggatcgggattagtaacacggacgtgcggaaacggttgaaaggcgagaaagggtctatcgtgaaagtgaaagtgaagagaggtggtgagatcattgatttcaatatcacgcgtgatatgattccgatttatagtgttgatgcctcttacatgatcgataaaaatatcgggtatatcaagattgcccgttttgccgcgacgacggtggaagagttcgagaaggccgtgaaggagttgaaggcgcaggggatgaaagacctgattatcgatctgcaaggaaacgggggcggttacatgggggccgctatcggtttggccgatcatttgcttgacggggagaagttgatcgtgtacacggatagtcccgctttcgggcgtatgggcgagtcctccacgccggcagggttgttccaagacggacgggtggtcgtgttgattgacgggaactcggcctctgccagcgagatcgtgtcgggagcggtgcaggattgggaccgcgggttgatcgtgggacgtcgttctttcggtaagggactcgtgcaacggcaattcccgttgacggacggttctatggttcgtctgacggtgtcgcattacttcacgccgtcgggtcggtgtatccagaagccttacaaggggaaggattatcaggccgaggtgttcgaacggtataatagtggcgagatgttcagtgccgatagtatcgaattgacggattccacgaaatattacacgaagaaggatcatcgtctggtttacggtgggggtggtattattcccgacgtgtttgtgccgattgatacggggatcaattatagctactttaatcgtttgctggcaaagggcgtgatcaatgaatacgtgttgaattacgtggacaagaatcgggaatcgcttaaaaagaaatacccgaagttcgagatgttccagaagaatttccaggtgacaagtgatatgatcgacgagatcgtaaaaagtggcgagaagcaaggcgtgaagaaggacgagaaccttttcaccccgatcgtgccggaaatcaagttgttcgtaaagtcgctgatcgcccgtgatctttggaatatgaacgagttgtaccgaatctctaacgaggagaacaagatactgaaagctgccgtgaaggcattgaatgacgggacgtacgggaggattatcaagtaacgggacgttacttgataagctaaaagttaaaaactaaaagctaaaagttggaaaaaactgcaacttgtaacttgttaacttgtaaccgaactgaaaaacttgttttttcggttctaccttttggtccgttttttgttgcgagtgtttattgatgttaacggttctggtgtgtgcagggtatttttaacctgtaacttgtgacctgttaacttgtaaccgaactaaaaaactcgttttttagttctaccataattaaccttaaatttaatggaatgaagaagtttttattagtggtgcttgccatggtcatgttaggtagcgtgcaggcccaaacgtcgtttaaaaacaaggtggaaggtttaaccgggacggaattctattttggtccgaagttcggttttaacgtggcaagtatcagtgatggtttgaacaagagtaagtttagtttccatctgggagcttttgccgagtttaaatttaatgatcttttcggtttgcagacggagttgatctattctcgtcaaggagataaaggaaagtctgggggtgtgaagacgtgggcccgcgtgaattatttgaatattcctgttttggctaaattctatgtttgggaaggggttagcgttgatctcgggccgcaactgggttttgccttgaatggtaagagtaaaacaaaatccgggggaacggaagtgaaaacggatattgatcatttgaacacggtggatttgagttttgccatgggcttgtcttacgatttcaacatgggattagttgtttctgcccgttacaatttggggttgacgaacgtgatcgagaaagacaaattcggtggtaataaccagaaccgggtgttccagttatcagccggttggaaattttaggcgtttacccgtgaaatatagaaactcgtaagtttcgtgacgtgagatagatgagttttattgaaaagaccgcattttgaatattcaggtgcggtctttttattttatatcgtattgcttcttgtaagtcgacgggaataattaatataactgattttgaggcttggaaggtgtaatttgggtaaaaactagggcttatttcgagtattatttaatgaaccttttttgatatgacaaatgtagttattttcttttaattaccaaaaaagttgtcataaggtttaatatgtttgtaatcaatggttaaacgatagtaattgttctttgcgcataaccttctaaaagtcgttttggacgatctctataaaccttcgtttaacgaatcaaaaaatgatagtgtaaagtggttgtcagacccgtaaagtggggactggttgcagggactgtctaaatatcgtttaggcagtccttttgctatttaccaactaccccctccaactcccccttacacagggggagagctgattactaattggttgctattgtcttaataatttctgagttaatatttccggggcttggagatgttccgggaggtattctgcttggttggctcgggagggacagatgtcgatgcctccacgacgggtgtagatacaggataccgcgagaatctccgggtggaagaggtcccacaagcgtttgtaggtcatttcacatatctcttcgtggaagtggttctcgtttcgcagggagacgatgtatttcaagagggaggcatgatccggcaggcggtcggcttgcatatggatgtagatgctgccccaatcgggttgtttcgtgattttgcagttactccgtaacaggtggctgcctaccttgatttcccctcttccggttgtccggctttccagtaatgccgggttttcattgtactcggtgaaggtttcccgttcgataccgggcgtggtttccagcagcgtgtagtcttgaaaatcaaaatacgttttttcgggaacctgacggaaaaacgtggcctctacacgggtttgcagtatttgttcgaggtccgatttcacggtttggagatatgtttctatgcccgatggaatgtcttccccgaggcgggtcatgtttaaggagttcaagtatagtttcagcgatttactttccacgatacacgggctgttggccgggtagatcagttttagaaccccacatacgggtaatccatttcgagttaagaatcctgcttcataggcgtgccaagtgtcgaatcctcggaacaattcttccggggtatgaatatcgtaaatctcccggtttaggttccgtgggaccggaacgagaattgacgggcaataatcagtcgggtaggcaacttgttgaccgaggactttggattcaatactcatgatcagaagttttgcatattgtataatttcgtatagatgccgtccagtgccaacagttcttcatggcgtccccgttccacgattttaccctcatggaagacgcagatcatgtcagcgttgcggatcgttgagagacgatgggccacgacgatggaggtgcggtttttcatcaggttatcgagggcctcctgcacgagcttttcagactcggtgtccagcgcagaggtcgcctcgtcaaggatcatgatgggtgggtttttcaacacggcccgggcgatgctcaagcgttggcgttgtccaccgcttaacttgcctccgcggtccccgatacaggtgtcataccctttctcggtttgcatgatgaactcgtgggcattggcaatacgggctgcccgttcaacttcttcccgggtggccgattcaacgccaaaggcgatgttattaaagatagtatcgttgaagaggatcgggtcttggttcacgttccccatgagttcgcgtaaaccatgtaatgacacatccttgatgttgatgccatcgatcaggatttcacccttgatcacgtcgtagaaacggggcaggagatcgacaaaggtactcttcccggagccggattgtccgacgagggcaacggtctgtccttttcctattttgacattcacgtcctttaggacagtgcggtccggacggtaagcaaaactcacgttgcggtattcgatttctttgttgaatccgtttaacggtttcggttgttcgggttccagtatggttgattcggcatttagtatctggtcgatacggtccatggcggcggctcctttctggatgctgtatagtgccgtggagaattgttttgccgggttgatgatcgagtagaagagggcgatgtaggcgatgaagcttgaagcgtccatgagaggtgtctgcccgagaataagaaggccaccgaaccacacgacgattaccacgacgatggttccgaggaattcactcatcgggtgagcgagtgaacgacgccacatcaaacggttcatgatctgacgatactgttcattatgcgaggtgaagagtttatccattttatcctcggcgttgaatgctttgatcacgcggaggccggaaagggtttcctcgatgttggacagaatttcgcccatcttgtcctgcccttccttggagcgctttttcaaggtctttcccactttaccgatcaaggtacccatgatgggtagtagtaccagcacgaatagggtcagttgccagctcatgaagatcattccggagaggtagatcaggatgatgatggggttctggaagaacatttccagcgagttcatgatggagttctccacttcctgcacgtcacccgtggtacgggcgatgatgtctcccttgcgttcttcggagaagaagggaagaggcaatgataatatcttttggtatattttccgacgaatatcccgcacgacaccattccggataaacacgatctcgtaggaggcgaggtaggagaatccggttttgaataaagcggccagcacgaagaaaccaccagcaaatagtaaggtggttgatgcggaaaaatgttgttttgatagcgtgacgtaatagttgaagttcgtcatcaagctctccttgttgagttcgaatggtacgagttctgttacttcttccgtcacgttgaaaaggatgtttagcacgggtacgagtaacacgaacgaaacagagccgaaagcggcggaaagaatattgtagaatatgttttttccgagtctggatttgtaaggagggatgaacctcttcaaaatttgtatgaaatcacgcattgaagggaatttagaatttgaaatttagaatttaaaatggaggattgaaaacaaggatatgcattttcaattctccattttcgagtgtattatagtttgcccgtgtagtttgacgggctgatttgtttgagttgttctttcaactcggcagatacgtcaagcgtgtcgataaactcggcgatggaggcttgtgttaccttgctgttggtacgggtaagggcttttaatgcctcgtacgggttggggtaagcttcgcggcgaagtatggtctggatggcttcggctaccacggcccagttatcctctaggtctgcctcgatggccgccttgttgatgatcagtttgttcaatcctttcagcgtggatttgaaggcgatgatcgtgtgggccaagggtaccccgatgttacgtaagacggtggaatccgtgaggtcgcgttgcagacgggagatcggcagtttgttactgaggtgatcaagcactgcatttgctattcctaggttaccttccgagttctcgaagtcgatcgggtttaccttgtggggcatggctgacgagccaacctctccggccttgattttttgtttgaagtaggtcatggagatatacgtccagaagtcacgatccaagtccaccacgatgttgttgatgcggcgcaggttgtcgaacacggcggcaaagttgtcgtagttggatatttgggtggtgtattgttcccgctctattttcagtttttcggtgaggaacttgttggcaaatgcagtccagtcgatctcagggtaagccacgttgtgggcgttgaagttcccggtggcacctccgaatttaccggaacaagctacttttttcagtaattccagttgtttggtcagacgatagacgaatacacggatctctttacccaatcgagtcggagatgccggttgcccatgggtctttgccagcataggtacgtctttccactcttcggccagctcttcgagtttggcaatcagttcgtcaatcacggggtagtacacgtcgtgaatggcatcgcggaaagaacagggtactgccgtgttgttgatgtcttgtgaagttaacccgaagtgtatgaattctttgtactcgtggaggttcagtgcgtcgaaccgttccttaatgaagtattccacagctttcacgtcgtggttggttactttctcgatgtctttgatcttttgggcatcctcgacggtaaagtccaggtatatttctttcaagttgtcaaacagcgcgtggtcgaatccccgtaattgtggtaacggtaactcgcagagagcgatgaagtattcaacctctaccattaccctgtaacgaatcagggcactctcggaaaagtagtttgccaggctatctactttgtccctgtatctgccgtcaaccggcgaaattgctgttaatgcttgcatatttatttgtttttcacgttattgttaaatcaaggaatttactttctcacgcgaaagtacaaaatagttcgtaaagttcataaggtctggaaagtttatagactttatgaactctaaggcagtgtcgttgccttgatgtttgcgaaaaaatgtttaagtttacgggaaatttaatgcactgtttatgggttttgcacgagatttttcgagaggaataagagcatacgggaaggcgataagtttattgttttctagtaagttgtggtattttatgcttttcccggtggtgattgtcatcgtgttgttcgtggccggtaattatgccgtggggtatttgggggacggactttccggtgtgatcgaggcgaaaatgacggagtggatcgagggtatatcgtggttggaatgggtgtcgggagtggctggatttttagtaaagttgttaacccgtttcctgtattatatactatttatttcgtttgggggatatgtggtaatggtggtgatgtcacctgtttactcgtggctttcggaacggacggaagaaattgtgtcgggacgggaatactcgtttaatttgaaacagttgttttgggaaatcggacggggtattgcaatttcgttacgttgtatgatcctgcaattacttgtgatgattgtgttgtttttcggttcttttattcctttggccggattggttatgcctgtgctgacttttggagtaggggcttatttttacgggtttgcttttatggattatgctgtggagaggaagcgtttccgggtgaaggagagtgttcgttatatgcgacataatgcgggaagcgtgacggctatcgggacggtgtttgctttgtcgttgatgattccgtggggaagtatcgtggtttgtagtttcgtgtcgttgctttcggttgtggcgggaacggtggttgtggagaaacagttaaacgaggaaaatattaaaaaataaaagaattacatgatgagaaagtggctggtagttttgattttgttggtgggaagtctgtcggcgtttgctgtggaggggaaggatgaatctagggagaatcgggaactggtttacaaggtggatattaaggacgagatcggtcctagtatatggcggttggtgaaaaggtcttttgaccgggctacggacgaaaatgcagatgttatcttggtacatatgaacacgtacggaggaatggtggtgtatgccgattctctgcgtagcttgatattgaattacccgaaaccggtgtgggtgtttattgataacaatgcagcctccgcgggggcgctgatttctattgcctgtgatcgtatttatatgcgggagggggcgaatataggtgcggcaacagttgtgaaccaaacgggggatgccatgcccgataagtaccagtcatatatgcgatcgatgattcgggccacggctcaggcgcatgggaaagatactgtgatggagaacgggcaaagtgtgattcgttggaaacgggatccgaggattgccgaagctatggtggacgagcgggttgtggtcgagggggtaacggatagtgggaaagtggtaacgtttactccgcatgaggcgatgcaatacgggttctgtgacgggattgcggagaatgtggcagaagtgttgcaaaaagagggtgttacgaattacgagttacacgagtataaaccgacgacgatggatcggtttatcggatttttaattagcccgatcgtgcaagggattctgatcatgattattatcgggggaatttatttcgagttacagactccgggaattgggtttcccttggtggctgcgataacagcgtgtttgttgtattttgccccgttgtatctggagggaatggcaaattacgtggagatgatcttgtttgtggtggggattatcctactgctgctggagatcttcgtgataccgggtttcggtgtctccggggtactgggaattgtttgcgtggtggcgtcgttggtattggcggggattgatgatttcacgtttgatttcttgccggatttcacaagtgctattattcgctcgttgtttttcgtggtgagttgttcgttactctcgctgttcgggagtatttggttgagccgaaaattgtttggttcccggcgattgaattttgcccttcatgcagagcagaaagtggaggatggtttcgtgggcgtggatatggcggcaaaggaagagatcggtaaagagggaattgcattcacggatttacgtccggcggggaaggtaatgatcggaaacgaggtgtatgatgccgtgtcagacacgggtgcttttatcgagagaggaaaagtggtacgggtggttaaataccaggctgggcaggtttacgtggttatgagttagatgccggttatttgatctttttcaacaggcgattgtattcgtgtaaaaagttcggggtgaagatgttagcatctgcattttgttcgatctctttgcgtgaccagaaacgcccctcgtccacttcatcgttattgatgtgaatggcgtcatgagaggtacaaagaaaggggaatacgagttctcgttcgcgggaactctcccacacgtaggaaccgaggaaacgggccttaaatttcgtgatacccaattcttcgaaagtttcccgttttaaagcatcttctattttctctcccaatgcaacgtgaccacccacggcagtatcccacattccgggaagaaagttctttttcatgctgcgtttttgcaggtaaatatccccttgtccgttgatcaggtggagatgcacgacgggatgcaggagcatggaaccggaatgacaacttctacgggttgctttaccgacgacttcgcctttctcgttcacgataggtaaccattcgtcttgactggctgctttggcaagtagtctgttcttaacaaacagcgtgaggaagaatagggcaatcagaatatacaatagaggtccttctatgaattgatgtatttcttcgtcaaagataaaggcagaagtgaaagctaagacggtatgcaatacgagcaggtaaaatagcaggcgtagcatccggtgcatggcttgttgctgttccggggtgatctgtaatgtcttgcggtatgattcgggcaatgtctgagtcatgtccgctttcgaaaatgcaaatatcccgattagcacgcacatggcagcttccacgatggtttgttgtatcctctcaaatgaagttccttcgagtaacacgctgactgccgcaagggcaatgaagaacagggtgttgaagagtgtcatcttgttgatacgcttctccctcatccatgaatagaaaaactctccggctcctaacacgatcacggctattaaaccgattttcggaccaagaaactcttcagcaataaagtatagaagaataaggataaaggaggggagaagggacttcatgcaattgaaaattgagaattgaaaatggaaaattaaaagacaggttacaagttaatatttaacttgtaacctgtagacttaactatctaatctcggcgttgaataggtgtttgtaggtacccatcaacttgttcatgattttgtcgatctgtttgtccgtgagggtcttctcttcgtcgagaagggtgaaactgacggcgtaggacttcttgtctgtaccgagtttttctccctcgtacacgtcgaataacgtgacggatttcagtaatgatttttctgtacggaacgctgtttctttgatttccttgaaagtgacttttttatcaagcaacaaggctaaatcccgttttacagaaggaaacttcggtagcggggtgtaggttaccttgaggtttttgatggctttcagaatgttttcccacgagaattcagcgtagtagacttcttgattgacatctgcttttttcagcggggctttactcaagatacccatggatacgatatgtttatccccggctttgtacgtcagtccttcccggaagatgtccttgtctgtggcatcaattttcaagttatcggggtgaagtcctagacgggttaatatcatttcgcaatacgctttcaaatagaagaagtcagttttcgtctctttgacattccaggtggtcatgtttttattccccgtgatgaagagagaaagcaagttggcttctttgtattgtttttgcgggttgtcaatgccttcttttttgttgaaggtgtagcctttaccgaactcgaataatttcaagttgttgtttttccggttgatgttgtaagcaatgttttccagtccgccgaagagcagggattgacgcatggcacccaagtctgcgctaagtgggttgaataacattaccgtctgcgtgggatcgaaacacttgaagtcttcgtaatagctagctttcgtcaacgaattgttcattacttcacagaatccgtttgctgctaataggtctgagatgatgtttttcaactggaagtcatccggcttttcggaatagcttaacgtggatctcacgctggcaggtacttccacgttgttgaaaccgtagatgcgaagaatatcctcgatcacgtcagcctctctttgcacgtcaacacggtaggggggaacatgcaataaaagaccctcttcgcactcttccacgattttcatttcaagagaacggaggatgtttttgattacctcatggtcaatttttttaccaatcaatcgatccacgtgagcatattttatggatacttcgaaatccttcacgggttccgggtagatgtcgatgggagcgcaagtaatcttacctccggccacttctttaatcatcatggcggctaatttcagcgcatagatcacgatgttcgggtctgttccccgttcataacggaaagaggcatccgtgttcaaaccatgacggcgagctgttttgcgaacaaataccgggtcgaaacaagcgctttccaagaacacgtttgttgtcgtgtctgagataccgctttcctgtccaccaaatactccggcgatacacatgggggtttcggtgttacagatcatcaggtcatcctcgtgtaactctctttccactccgtctagagttgtgaatttagttccttgggcaacacttttcacgataacctcgttgccttttactttgtctttatcgaaagagtgcaaaggttgtcccaggccgaaaagaatgtagttggtcacgtccacgatattgttgatcgggtgtaatccgatggctttcatccggttttgtaaccattccggggaaggttttacggttactccttcaatacatattccggcataccgacggcaggcttctggacgttctactcgtacggtgattttagcatccgtactgtccggttggaaagtttccacggagggaagagtatagtgaatatcttgtgtctgttgtaaataagcggctagatcacgggctacaccgagatgtgaggctccgtcaatccggttcggggtaatatcgacttcgataaccgtgtcccggtaaacgttgaaatagtctgcggctggtattccaaccggggtattttcgggtaataccatgattccggcatgatcggttccgacaccgatttcgtcttcggcgcagatcataccgttagaggctacacctcgtatttttgatttcttgatcacgaactcttcatcacctttgtaaagggttgttcctacggtggcaacgactactttctgtccggcagccacgttaggggccccgcagacgatttgttccggttcacccgttcccaaatcaacagtcgtcacgtgtagatggtccgaatcgggatgtgcctcgcaagttaacacatgaccgatgaccaatccttttaatcccccttttattgcctcaaattcttcgtacccgccaacttccagtccgatacttgtcagaattttgcaaatctcttcagtgctttggtcgatctttagatagtctttcaaccagttcagtgatacgttcatattttaattttaggttttagattttaaattttagattccggccgcacggggccgtacatttaaacaaacgataatttccgaatcctttagctaaggtctaacatacgttgaatgggtaaccaagctttctctctcaagtcttccgggagtcgtacttcgtattgctctttttcaagggcttcaagtactttttccagtgttactttcttcatctggccgcatatggttttcggatgaattgggataaactctttggtcgggttatctgcctggagtttgtgaatggtttccaattccgtggcaatgataaatcgttgtttcggggattccttggcatgtttgataattcctgccgtggaatacatgaaagcacggggatggtttaatatccggtcgtcgtgcgaacaactggattcaggatgaatcagcacgtcggcatcgggatattcttccaatttatccagtaccatctgagtatcaattttgttatgtacgcaacagtctccgttccaaatttccatttcacgtccggtgaccttttgtatataggctcccagatttttatcgggaacgaaaagtatctttttgtcttttggcaggctttgtacgattttcaaggcattggaagacgtgcagcaatagtccgtgtaagcctttacttcagcagtggtgtttacgtagctgacaatgagaccatccgggtttgcttttttccattctctcaagtcatatccgcttacgccttcggctaaggagcaaccggctccttccgcaggaattaatactttcttgttgggagagatgatggatgctgtttccgccatgaaatgtacaccgcaaaagacgataatatcggcttcggtggttccggccatctgggaaagtcccagggagtcacccaaatagtcagcaatgtcttgcacttcaggacgagtatagtaatgcgccaaaatgatggcgtttttctctttcttgagttgttttatcctgtcgataatctctgtctgcgtcataactttgttttttgagacttcaaagatataataattttagattttaaattttagattttagattgaaacttacgaaagtaagttttataatcctcaacttttatcttttagtttttatcttttagttcattttaatgttcatgctaatatccatcgccgtaaccgagtgggtgagggcaccaacactgatgtaatcaactccggtagcggcaacgcctttcaaacgaggaatgctcatgtttccggaggcttctgttttggctctgcctgctatgagtttcacggcttcagccattgcttcattactcatgttgtcaaacatgataatgtctgcgccagcctccactgcctgttgaacttcttctaagtttgtggtttctacttccactttgatacttaacggaaggttctgtttcacggctttcacggcattgggaattcctccggcaattttgatatggttgtctttcagcatgatcatatcgtaaagtcccatccggtgattggaaccacctccatggtgtacggccattttgtccagtactcgcaggccgggagctgttttccgggtgtccagtagttgagtatgtgttcctgctaattctttcatgtagtgagaggtagctgttgcgataccggacatccgttgcaggatattcagtgataaacgctccccgcaaagtaacgtgcggtagctggcctcgatgcgcaggataatatcccctttcttcacagcggttccgtcagtaacaagaggttcccatactatatctttttcaaatctttcaaatacttgttttgcgatctccagcccggaaataacaccgtcagcttttgctttcatttcggcaactgctttagcatgtaccgggataatggcgttggtcgtaatatctcccgttgcgatgtcttcttctatcgcaaggtcgatgagtctgtctatgagcgaatcgtacatatattaattttagattttaaattttggattttagattccaaccgcacaaggctgacacttcttaatttcctactttcaacttttattttttaacttttatcttttagcttgctaattaccggtgtcgtcttgatttctttacccttctgctgaatgatgtgacacacgtatttgtcattcggggtggggtagtcggaacggaaatgaccgccacggctctctttacggaagagggcggaacggataattaattcggcaacggtaagtagatttttacttaccagcgaatagtattcattctcttcaaatatttcggtttgttccaagtggagcaagttttccaatccttcttgtaatccgtttgccgtgcgaataataccagcttcttgagtcatgatgtcggcgactttgttttttaaagacaggtaggcatccagtttttgatgatttagggagaatagaggtgtggtttccggaatcggggcttctcgtcggttacatacggagtcttccaccgcacgtttcccgaaaaccaagcattcgataagcgagttggatgccaatctgttggctcccatgattccagaagaagcaagttctccgcacacgtacaggtgtgggatatttgtacgtcccgtgagatccgttttcaccccgcccacggtgtaatgtgcggcaggagcaaccggaatacggtttgtcatgtcaatgcccaattccgcacatttctcgaagatgttggggaaacgtttcttgatcttttccgggtcaaggtgttttaacgacaaataaacgtagtcctcatggtgttctttcatttgttggaatatggactgtgccacgatgtcccgtggggcaagttctgccagttcatgttttcccaccataaagcgttcaccttgttgatttaataggtgtgcgccttcaccgcgtacagcctcgctcaccagatatgcttctccggtaggcgtgtagatcgcggagggatgaaattgaatgaattccatgtccacgatttcacatccggcgttataggttaaagccaaaccgtcaccaatagtggtatgagggttggtcgtgcgtttataaatggctgaagtccctccggaagtcaagaacacgttatgtccggagaatacctcttcccggttctcgttaaaatcccagcatctgacaccataacatccatgttcgtcttgtaataaggcaatgacggcatgattatcgaatatttccacggtaggacaatgctccactttatcaatcacgaaattcgtgatcattcttccggtggcatctccaccggcatggaggattcgtttttggtggtgaccaccctctagacctagggccagttctccgttttccgtgtcgaagtgcataccgtcattgattaattcctgtatgcgggcaggcccttcatttaccagtacgttcaccgcgggatagtcgcataaacctcttcctgccgtgatcgtgtcttgaaagtgaaataacggggcgtcatcttctccggtgactgccgcgattcctccttgggcaaaataagaattactttccctaatatttgatttagttaaaagtgcaactttcccgtaggcagatgcacgataggccgtgtaaagacccgctaaaccactcccgacaatgatataatcgtaattacgcatttttgtgtcatgtaaattggcacgaaattaggatttttttatctatatcccgcctctttccttcgttttttcattttcaagagggtattttccgttttccattataaaagtagtaattttgagtttctaaagttgaatagagatgagagcatttggatggttcattatcacccttttattaggagcttgttctgcggacaagccttctaaaaagtgtatttacccggcaggagatttgtttttcagtaaggaaaaagcggggtgggatgaggtatatattggtagggaatatgctgatacggtgctggtgtataatcccacgaaaacgggtattcgcctggaggggtttagccatattccggaggttgcttgcaagaaaatcggacactctgaacaggattggaatttaggaggatataccgtggagcccgggacttgcgacacgttaatcgtaacgttacgtttaaagaatgaatccatgttgggtaattattataacgtgatgcgtttcatgataaacggggaggtggattataattacggttttatgattgatgtacctgtacgggaggattttgatcattggagcgaggaggaaaaagcacgagcccctcatttcatggtggactcgacggaacgtgatttcggaacacttcgggaaggagaggagtccaagatgatttttaaaatccaaaatgttggggaacgtaacttgatcatacgtaaaatagaaaccacttgtggttgtaccgcggtactccccggtcagcgtgttcttcttcccagcaaggaaatggacttgaatgtcattttccactcggcggggcggagcggtaaacagcgtaaagtgatcacactcttttgtaatgatccccgtcaacccaagatccagctggtagtgaaaggtgaagtgaactgaaggattgtccgatgattggctatggttaggctatctttccctatgaccatgaacatagcatgaacactgcaagtacatagtatgaatactgatgtgtgtatatgatgtgtaggtgttatatttgaatttcgtaggtgtctcaaggcagtgataaaggagagatagctcgttgtaaggggagggtttaagaatagcgagacaaggaggaaaactcccccccccggcttcgctgtactccctctataaacgaggcagcgaagctgacggaggagtttttcatataaaaacgagttttgatattttcttttaccgcccgtttatttcacgattatcgtgaaacaatcgtttacatctttggagtatccttcgtttttaaaattcagagaaatcagataacgtccgatcggaatatcatgttctaaaggcacttcgaaggtcccatcaccatatactttcaaatattcccacatcttctcggcatttcccgttgtcgttttgatgtcttttatggaaacgtatatctgagtagtcccgtccactccttcaatcgggttacttacccatggcgtaccccattgagcccgttgataatcttctccggcaccgacttctataatttgagtgggtaaaatgccccagctgatcaagagttccggggtataatattccgggttttctgctaataattcatagtaaagcggattatccacttcttctaattgaggtggagtggtgtccagttctttcttaacgaccattgtgtcgggattataaccggcatcttctgtttgtaaaaagccaatcgttacgtcttggcaactcgatcccagacaggctgtaaaaacgagtattcccaatatgagtagattcttcatgattttaaattttaagttccgtgttagattttacctagtacataattgtagtttaacgcgtgtactaccccgtttaacggttgaatatccggagaggctaatggaaccatttccatggcatcaaacgaataaaggtacatgaaaattgctccggcgtccgagactccaccataatttgttttttcccggtaagctcgtaatttgttcccgctttcgcaagtaaaatctgttccccctgtttgttcttccgcttcaatttcgtaatcccggttccggaaagcgatttcatctttcagatgtttgccttttataacgtggcgtaataccatttcccgacaccaatctttgtcaagtgcttgaacgagatgttccggatgatttttttcgtcttccgagagtgctctccaacgatccggatctccgggaaattgttcttttccagatgctttgtcccacacgtagcgaagaatggatagggaaggaggtgcgaaaaacgtgatttctttgtaattcggatccttcccctcgaaaatgtgggtgagttctgccctttcaattaattctacggttaatttccagttagctgtgtccttctgtaaatattccatgatactgcaatcgtgataaggtgagctgattccggaatcaaaccagtcttgctttgtatcacaggcggaaagtcctgcgagaattagaaagtatatccatatatttaatcctgttttcatgatatgttcatttttatatgtgttctttttattgtctttttagccaataggtattctgtctcatcaatgaattatcccaaaacaaagggtcttctaatgcattgaaaaatacaccgtcaaccacgtcttgatcagaaacgtttcggaaatttccgtaaagctccgttttatagtacccgttccgtaatacatcaaaatagcgggtcccttccatcaataattctttttcccgttctttgaatatggcatagcgtagattgccgtcatactcggattcactgtagcgtttggcttttgcccggtctcggattttattcaaatcggcgatagctccaatccggtcgtttagtctggcccgacattccgcacgtaatagatagatgtctgccagtctccaccatattttgttttgatcaaagttgatgaattctccggccatgtatccgtcagtggcaacccgagcgtaacgccatttgtaaggataggcatatcctccggtaatttcttcgtcttcttgttccattttttcaaattcgtaaaaccaagcatcccgacgtaaatcagtggttggggtacttccatcggtgtagtcctgaaacatttcccggacggttgaatttagtatgcgatacattgtttttttgttatctccgatttttttgccggggatagccgggtacgcttcgtagtatcttcctaggtttgtcatgttgctctctgtcatcgcgtcaaattcattccaatatcctcgaaatacactttcaaaaatgcattccttaccaccatctacgaatgttttggtgcaaacctcatcgggtgttgattctaaatcataaatatcctgtctgttgataattgcactacaagcagaatctaccattcgccataattgttgttcgtcatagtcacggtcttgtggttgggccatgtatttacatccggctttccaagcacatagatgggctagtacggcgttggcagctcccttgcacgggcgggcccgatggcttacggaagttccactggattctttcagttcattccattccggcagaagacgtgcggcttcttttgctaaagttatggcataatctgtcaccttgggccaagtcgttttaccgataggttttagttccacttcatcctgtatcatcacgcaatctccccagcgacggactaaatctaggtaaacgaatgctttgaaaaaagcaatttcacccctgtaaaagtcccgtctttcttgtggcatatcgactttgttaatatagggtaaagcaacattggctgctgcaattacattataattccagctccattgtgctacatatgcttcgggatcttcttctcttaacaagtcataagaattaatctgacgataatctgaaaattcacctcgcatctctggtgaatacggggctgaggtcatgtttactcgtaagctttgttctgccccgaataaggctgcttcgatgtctttttccgtgtcgaaggcattctcgaaggtaacggagttttccggttttaattccacccactcttcgcaagcatatatcataaatgccccgattaccgttaaaaataaatatcgttttttcatcgcctaaaatttcaatgttaaacctaatgttaatttgcgagctaaagggtaagaacttcccacgtcttcaccgttgcggatgtccacgatttcaggttcaataccggaataattggtgaacgtgtatagattttccccgctggcaaagattcttaactcgtccagcccgcatttttgcatccatgctttgggtaaagtgtaaccaatagatactgtttttatttttagccagtttaccttttcaactcttcgatcaacatatcgtccgccccacaaataagtgttccagtcgtattgccatttagggaagtccgatttatctccgggtttctcccaaaaagatactttatttaaattcatgacaatagccggatattctgccgctccaaaatcggataaacacctcgtttgagtgatgtttaacatgtgtcgtcctaattggaaacttaataggatatttacatcaaagtttttccactggaattcattcacgatccctccggagacttttggcaaggcacttccacaatatacttcatcgtcaaaagcggtgattttgcgatttccatccacgtcgatgaatttataatctcccggtttatagaatgtgctacttcccatttcagaagctaaaggagcttttatacctatttgattatagaaaacggggacttcatcttgataatctacatatccgtctgttttcaaggcgtatatcccgtttagtgattttccgattactcggactaaatctaaatcttttccggtgtaggatttctcaaaccggttccagttacgggcggcgttcacagatattttccaatataaatcggactttctgaaaatctcgtatttgaccataacttctaatccttcattagaaacggctgcggcgttgcgccattgttgttggtatccggtgtttattccggcactaggtaagcggacccgatctagtaatttatctgtatagcgataataataatcaatcgtgattcctaaacgatgatcaaacatatccaaatctaacccgaaatcgtactgatccgtttcttcccaagataatttgtcattataaagcccgtcaccccattgtggttcgatataactatttccaaggtaagatgtacttcccacgttcataattcccaatgccaagtaattttgggaaaagtgcattccggaacgtccccagctagcccgaatttttccaaaagatacccatccgagattatctctcacgaaaggttcttccgaaaaactccatgctgcagcaatggatggaaaagttccccagcggttgtttttcccgaaggtggaacttccgtctctcctgatactggctgaaaaaaggtatttttcccggaagccgtattccaaacgagcaaagtaggataccagtgtcttttcctgcatgtcggattggtaatctttaagagctcggatttccgtgtaatctccccaaccaacggtttccagatcaggcataccgtaaggtgcatagtaaattttgtcacttggggattttcgggctgatcctccgttgtattcttcttgatcatattgataggaaaaacctgccataaattcaatgttgtgatcttcatgaattgtttttttataacttaacaggttttcattcagtaccattaggttgatgcctgtttccccgatggagatggagttattatcactagcgatgtacgaaggggaaaaataatttcttcgacttatagcatagtctgcggctagtgagctggagatattcaacccgtcgataatatcatatcctaaccggaaattactgcgtaaacggatggcccggttggtttctttagttcctttgtatgctttcagaacttcctgccatacaacagattcttctccgggtagcaaagatgatagtttataaggttctccgggaatggtttcaatagggaccaaagccccactaaagcgcaagtggtcatcagcactggatgtggctcttttcttttgtgccagtgaggcattgaaacgaatgtcaacgtttagtcgggggacaggaataacgttcatgttagaatttaaatcgattcgtttgaacccggtacctttaaaaacacctgtttcattgtagtatcccagcccgataccgtaagtgattcgttcgctaccgccgtatgtctgtatgttggcattcgtgaccttgcccgtttcaaaatagatgggaaaataattcgtggagtgattatagaatgcgttcagactatcttgatatatactcccgtttccttccggcatactgtttttatccgggaaccaaaaaccatgatacattcctcgagtgttttcgtattgttctgccagactttgaggatatttgtaactgttggttttcttgtccaggtaggctctaaactgattttccgtacttttcaagcgtaacaacctttctgctcttcctgttgtcagggctggatattccgggagaatactccatgtttctgaaaaattcacggaaaaggtggcatcttggttttgtcttccttttttagtagtaacgatgataaccccgttagctgctcttgaaccgtatatggcagctgaagaggcatctttcaatatttgtatggactcgatcatatccgggttcaagtcggaaagtaaattggttcccgtgattggggaagtaaacgtgtttaaaggtactccatcgattacccatagcggatttgagaatctccgtccggcttctacatccaatgagttatatcctcttacagtaatggccacgtcaccaccaccgggagccccggaaagattagtaatgtcgagtccggctacacgaccttgtaaaagattggcgatattggcagaaggaatacccttgaattcttcagcctttaccacggaaacagctccggtagctttccgacgagttgttgttccataagcgacaaccactgtttcatccagcgtttgtacatcttcttccaaaatgattcgcaatgtatctgttctttccgtgaaatttattttctgggttttaaagcccacgaaggaaaattccagtgtccctttggttaatgggagtgaaagagagaaccatcccttgttgttggtagccgtccctagattaatattggttagtttgaccgttactcccggaatgggttctttcttcttgtcgtaaacccagccttttagcgtgacagactttttttcgtccaacgtgttcattttgagttttatgacaatggcattgtttaacacgacatattccaagttcgtgtttttcaagcatttttgaagaattttctccacgtccacttctttttcattcaaatcaatcccttttatttgggcgatgtcttcgttgttgtacatgaaggtgaaccgggtctgctgttttaactcccaaatcacttcttccagtgatgcgttttgttttttgatcgtgacagtttgtgcattcaggctggcaaaagcctgaacgacaaaacacgtgagtagtagaaaggttaatttcatacatctaaaaattttttgcaattttctccctaacggaaaattactcttccatctttttttcatacctttgaaatgttttaattataactaattaatacagaggatcgggaaatgttggagcaggccccgatcctttttttattatcgggcgtggatagttatggtattgtccttgcgggcagccaccactttaccactttcattaataatttccagtagatcgtcaatattcttgtatctgttcagattcgtggagattcggatttccttggtttctgccgtggaatagaatatggtcatgttataccaacgtgcgaggtcgctcatcacgtcttccaagcgttgattccggaacacgaacataccttcaatccatcccgtgtagagttccgtatctactttttgtacggatgtctttccggtctccttgtcatattggaattgttcggatgggtttagttgtacttgtgtttggtcggtgtaagtccaaacggaaccttcgacaagggtggtatgtgcgatgggttcggtggagtaagatttcacgttaaactttgtaccggtgacttttactcgcatttgttctgcgttaacgataaagggccactccgtggctttgtttacttcaaaatatccttcgccatctaggtatacttcccgtttttcatttccgaactccacgggataccgtaaagttgattcacaatttaaccacacttttgtgccgtcagccaatgttacttggtagtcagccccagcggggacacgtaatgtatgatacacggtttctttgtttaccttttccggggcattggtttcggtcgtgtttgttttccttgtctcgctttgataagaaagcagttttaacgtgtcgtttgtgatcaacgtcccgtccacggctttctggtaaatctctttttgcgacaaatcaagaacttctcccgtggaaacgatcagttgagcgcttctttttcccacgtgttcaatttgtgccataggaggaactgattttttctctttcccttgttgtagtaatattcctccggctagggtcatcagcacgcatactcctgctgccatggaataccatactcttcggttgatttttcttttatccggggtaggagtatgaaaatccttttgcatttgctgccataatttttgccattcctgttcgggttccacttgttgaccgtattctttctctaagaatgccattcggtttgtgatcacttcctcgaacatgtgtttattctcttcttcctgcaaccaatttacaaattcctcttccagtaaccgttccggttctcggaggtgttccagtatgaattctattttatccagtttttctttcatttgcatctggcttgatgtttttacactatatacacaggtgaggttgaaaaatgggtgagtggaaaatgaatttttttcaacaaaag

SEQ ID NO: 10719 - DNA, 48354 bp, Unknown
  gut microbiota DNA sequence
atcgttacttctgctattttttgttttaacttcttataagcgatttttttctgcgttttcaccgtgttctccgaaactcccaacaaccgggcgatctcctcgttatctttccccagcatggcaagccggaaaatctctctacatttcgggggaagctcaaactccgtctccgcaagaattcgttccacctcttcctcgatcacgtaatttataaagcacacctgcgattcgatctcttgcaaccccttggcgagatattcgttcttcacccgttcatgcttcaaataattcaatgcattattccgacttacctgataaagaaaagatttcacgtgtgcttccgattccatctcatcccggctattccataaagagataaacgcttcttgaacacaatcttcacaaaccgacaaatcatcaacaaaacgatgtgtgaacagacacaaactatgataaaacgtatcaaagatatgctgatatacctttctatcgccaacagttaatccctgaattttcatcgaagtttgttcttgcatatattaacgctttacctgttttccccgctcattaagttaaacaaagatagaatttgaaaacgtaaaaacaaaatagtttattttattatatttcatacaaacttaaaattaaagatattccgcttcatataacacgagcggaataccttaaccaagcaacataacgttactattcgattacccctccatatttttagataaatattctttcaacgattcattttctatattagccagcaaaaggttcacaagttcctgaaacttatttttctctttcatttccgagttcaagtactttaaaacaggaaacgcaatattcatcgcttcatcatcatgaaataatttaaatccttttttgcaacttgcatacaatcccttcacgtctttttccatatatgcctcggttattttcatacaagccaacaactctttcttcttttccaatttgtaaggttcgatctcttttttcatataaaccacatcctccaccttgctctttttatcatatcctttcaatatataactcaatcgattataatagatcgaatacaatttattgtcaattttctctttacccaaggattgtataaatgccacccgatgatctatcagatatttaaagttatccgacttttggcttgtcaaggttggattctcaaaaataaaccagtaattactatccaccttttctgattcctccagcaaacctaacaggacaccactaacttctttcgctttatcttcttcatatatagccaacaacgacttcacatatctcgttagaaaatccttgtcccgattgccctcatcatacaatttatccagataccccgtggaatgctcttcttccatgccttcccgtactcgtttcaaaaaagcatctgcctctccagaaccgagcattttgtgatacacgctaccatccggacgcaaaatcaagaatgtcgggaaagcccgtattccataacgttttactaattctggaccttcgcccttctccatatcaatcttcaaacatacaaaattcggattaaagtagtctcccacggcctcttgcggaaacacgttcgatgtcatgtatttacatggaccacaccaagttgtataacaatccacgaacaccattctttttcccctctcggctttctttaaggcttgttcaagggtcaaatcctcccaatatactccaaccgaggctaattttttaaacgaactaaaataagatttcaaatatcccttcaagtcttcagcctttgccgcttccacgaactgatctcccagttctgccacttgctgccattgagtcttatttccttgtttcttcacaaaatctaaagatgtcgccaaggtccataattctccttgtggcaaattataaatctcctttttcaatagagtaatcatctgatcaatatcctcgttacaacgggcgtaagccaacgccaatttcgtttggagatacgttttatcgggtaaatcatattcatccaactgttgtttcatcacatccaaccggggcatatcttcttttttagcaaaaccggcaacatagctatataacattcccgaatacgccgatgcgatcttttgatttacttttgtttctcccacgtttttttcaaaagcggctttattctttaacaagaatgagaaattatccgacgttaaaggagaaagagaattgtcctcgtatatcacccaataaggagtagaaactttctcgttaaatgtcaaacgttttaccaactcatcggctacaaccttcaaccgatctgcatcataagcatcctgcaatgtcatcacgagatcaagcattcttcttttcgacattttaccagtcgtgtactctttatccaacactggtaaagaatttttctcctgtaacccacggcttactcgtcctataaattcttcgagatcccctccgccaacaatccggtatctcacctttccgtccggctctaaaagtaaaaatgtcgggtaagccctgattttaaatcgtgtagacaattccttcccttcccctttctccatgtcaaatttcacgttcacgaaatgagtattaaaaaaatccccggcttctttttggggaaacacttgttccgtcatcattttacatggaccacaccaagtcgtgtagcaatccacaaataccattttcccttgagttttcgcctgctctaaagcctcttttaacgagactgatttgaaatcaacaccctgcgaaaacaattgaaaacaggcaaataccccggctaataaacatacaatttttttcatacgatactttttaatctgaaaatacaggggctgtcctacattaattagtccgaacaccccccgttcataaaaatcctaattctttatcctaatcccgtcaagacaaaaatacgggggagttctcattctaccggtcctttcttcaatatccgatgaagcaacatgaaacacgacttttgaaacaacgcctaatgaactcaaatctactttataccagtcgttgattaccaaactccaatccggatggttcgggtcgcccttccgggtacacaaatagaattccacctctccggttttcgtgtctccgttatatcccgttacgatcaacttatagtaatccttatcctcgttcaccatcttcttgactcctcccggtacattcgtgtaccacacgccttttttattggcactacccggaatattcggattagccacgggttcttcttccgtcccgtattgatccccgtacactaaagccagatacacgtatgttgtattcgccactagaatatgttccactaccgccggagactccaacgtgaaataagtatcatccccttccactctccccacggcataaatttcattcgcattcgggaaacgggtataaacactataaatattagaatccaacgcttcttgcgtggcagtccacgtgaaagaacgattattccggttagaataagcaaaccctgcatacgttccgtcattatttttctttgtattaaaagtcacggaattcttatgggcggcttttgaggtaaaaccgccatcggggattatgtgtgtaaaccgctccagtgacagttcatttaatgtcacgtcattgggtacaggcgcaagcacgtctttatcatcagcacatgcagccaatcctacaataaggataaatataaaataccattttctcataaatctcttttttattgtttatcggacatctggattaattgccaagttcaggattctgaacggctaacggatttttaatccgttcattttccgggatcggccaacaatattggttctccgtgaaattcacatccggcttcaacgtgtatatccaaggtttattctgggcggcactggcatccgtgtcatttataaatcgcaatgcggcaaaatactcgcttccgttctccaagaactgttctacccaaatttcccggaatatggctctcaaaagagcctgtttgttactgggagatagagccggtaataccggattcgtgcgacatgcccgcatatcattcaatggcttcaaggcatcctctaaagaatagtcatccaaacgggctttcaactcggcttccatcaaatataattcagcgtaacggaaataataagtagcgtaaggagcatcttttgtatcataccttcctccatgatacaatttcacgggagtaaaaactttctttgtatcccaagtctccggagctctagctgaatccatcactacctcatagcggggatcttctttcaaccatccggtagcaatatccgaataagtattattgtagcctatattatatgaataatcgaactcgtaagtggtcgtactggcaaaatctcccaagtatcttgcccataaaacttctttcgaatcccacccggcttcatacatggcagcaatatccgtctccatctgccaagctgcaggagcatcccatttcacggtttcaactaatgtcaaagcatccttcaaatcttgagtagaccctctcatcactccacggtaaagcaatattttcgctttcattacctgcgccatttgacgggataaataacgggacgtcgtgaaatccggcatattggcaatagcatcatccaaatcctcgaatatcttcgtgtaggactcacccacacttatacgaggaacctgcaaattactcaaattagccatcttatcccggtacagaattccataagccgaatcatccgcatcccaccatcttccaaacaaccagaataaatttgtatatgcccacccccgcatacaacgtgcttccgctatcatttccaatttacgttccggagtcggaaatttattttctgccagattcgaaatagcctctattgctgcattggccgagttgactaacgtgtaataagacttccatgtcccactcatatcattggacccctctttataggacatattgaaatgagccgtgtaagacgaataaaatccgccttgtgaagataaccgacaccaggtagcccctccgaactctgaaccggaagccacgatagcgtacatcccgttaagaatattcttcgccccactataatccgtcacggcattatccaatgtcaaattatgcttgggaacctgatccaaaaaatcttcgcatgaagtaaagaaaacaattcccaacaacatgatataataacttaatttcttcatcatatcctattttaaagttatttttattcccacattataggttctggcagacgggtaactgctataatcaatacccatattataaaaagcactgtaagatgtactgaagtttccttgcgggtccatacccggatatttcgtccaagtaaacagattcgtggcctggaatgtcaaatctatcgcatccacgatactggaaccgaacaatcgcttcggcaaacgataactgatattcaaagcggataacctcaggaacgaagcatcatgtacataccgattcgtgatgatagaattggatccccaaccataatacatggctctcgggtagcccctatccacgcccggattcatagtccatgatttcagtgtattttttgacgtgttatacacgttcatatctccggcactactcttttcttcatcgtaaaaacgatccgccccaacggaataagtaaatgtcgcatttaccatcaatcccttccaataaagcgttgtcccgaatcccccgaaaaagtccggattagcattaccgatttccgtacggtcaccatctgccgtaatctgtccgtctccgtccagatccatgatatacaagtcacccggacgctcgtaattattttcatcccgataatactgttgttgtccggtttccggattaatcgttttcagagcaaccaactcctcattcgtacggatcaaacgtcccccgtatttgtacccgtacagaattccagtctttcctcccacatcaatcttgaaatactgataagcaccccctccgaagtattcatcctcactattcaatttctccaatgtcgtaatatttcttgccacattaaaatcaaaatcccaagtcaaatctttttgggtattcttaattatatccaccttgacatcaaactcgaatcctttattttttaaagaaccgatattctgagtcactgatgagaaagaagaagagtaaggaaccggatcactatataacaaattatctacttttttctggtaatacccgatagatccccggatacgatcatcccagaaaccgtaatccaaaccgatttccttttgaacctgcgattcccattgtaaaatatcattcccaagcgaagaaggcttgattcccggagcgtcattataagttgccgatcccatcaacgtacgccagtcataattacccaaattttgcgaaccggtctttccgatagacgctcttaattttaaataagaaacaatatgggaataatttttcaaaaagttttcctcggaaataatccaggctaaagctcccgacgggaaatatccccaacgtttatccggcccaaacttggaggaaccgtctgcacggaaagtaaacgtcgccaaataacggttcttgaatttatactccaaacgggcaaaagtcgaaaccaacgtgttggaattataacttgaagcaattgaatttttagtcgcggcacttcccaaattcgtcaacacctcgtcatccgggaaattcgatccggaggcagacaaaccgtcatactcgtatttttctatcgagaaacccaacaaacctaccagattatgatctcccaatgttttaagataagtcaacgtattatcccaaacgtatgtataattctcattcttggcaaccgaggaagaactagttccgtcatcataatatttccgcttatacgtcaatgttttattaataccgtatttcaatgtcccgtttgtccgcaaagtcagtccgggaattatatcccattccaaacctaacgatcccgtaaaatcttttccctttccttcatccgtatttttcaaggtgaaaagaggattctccacgtaataactgatcatgtttatcgaaccatcttccaagtaagccggataatccggacgcatatccagaatagtactgatcatatcatccttgtcattcgtcacccgggaagtcgcacgtaatccgagtttaaaacgaatcacttcccgaatcgacgcatcaaaattaaaactaccacccagcaattttgaactaccacctttcacgatccccttctgatctttataaaagaaagaggcactataagaagattctttcgatcctccgcggatacccaaactatactcttgtgtttcagcgttatgcgtcatcaaatcccaccaatccgtatcgccgtcataataagcatctttcaagaaaaaatcatccgttagcgtttccaaatcaaactgactatgattggtactggcattaaattttgtctcgtcaatatatttacgggtaaaataatccaaactacctctagtgaagaaactggcacgaacggcagctttagacaaagcaatatactcttcggcattcaatacaccgaaatcattcgcgttcatcgtttgaatcccgtaacgggcagagaactccaaggtgggtttcattccttttttaccccgctttgttgtcacgaggaccaccccattagcagctcttgaaccgtatatagccgtggcagaagcatctttaagaatatctatcgtctccacatccgtcaagttcagattatacaacgtgttggaaatattcccggatgtcccggcagaatactcaggaaccccgtcaatcacccacaacggttgcgaatcacccgacaaagacgacgatccccggataatcacggacaccggagaagtcggggaggccgaactaatcatcacgttcacacccggggcccgtccctgtaacatcgactggatagaagcgcccatcggagccgtctcgatctcctttttccccaaacgggaaacagcccctgtcatgtcttttgccttcgtggtaccgtaaccgacggccacgacctcatccagacgattgatttcttcctccaagatcacgttaataacggttttatttccaactaccacgtatttcgtttgcatcccgataaaagaaaaacgcagacgcacatttttcatctccgggtaagtcaacacgtaattcccgtcaatatctgtcaccactccgatcgtggtactatcaatcaacacggaaaccccaggcacaggaagtcctcctttatccgtcacccgtccttttacctgtttctctttcttcacgtcctgttgcacgggttgtttttctcctaacggaacaatcaccacattcattcccacaacgttaaaagtcaaccccgatcctttcagacattccttcatcacatcccggatatccgtgtccttgaaattcaatgtcagatcacgcacggattccacctgactattctggtaaacaaaccgataatccgtggatctctccaaaatatccatcactttctcaagtgatacattctctacccgtagggataccttggcatattgcccgaacaccgaagccgaaaccggcacaacacttagaagtagaaaaaatgctagcaatctcattgttaacaacatttttaacagccatcttatccgaagatggacacaactacctgtttttttcatacatttgtaaagttttaaagtataacaattccggttcaaccggattccgaggacgaggtagtgctaataccttgtccttttctatttacatttcacgaaaatatttttcccttttacctcaaaatccgtatctcccgtcattcgtaaaagataaagaatctcctcaaagcgctcaaatcgtttgatatttcccgtaaactcgacttctttccgtgatacatcttcataaaaaacattcacgtcataccaacgggctaacgtgttcaacacctcctccaaccgctgtttacgaaatacaaaattcccatctttccaagccgtgtataaattaacatccacacttttcctgattaacttccccttactcgtaagaattgcctgttcaccgggagagagttccaaactctcatctttccctgaaataaacttgacctttcccgaaacaagcgtggtcatttgtttatcctcatccggataaaatcgagcattaaactctgttccgagtacctctatccggttccctcccatctccacgctaaaaggcctctcatctcgctttaccttaaaataagcctctccttcaagaaaaaccctacgctctgactcttcaaacttcacgggataacgaaatttcgtctctgaattaaaatacacttccgttccatcctccaacacgagaggaaattctcctcctcttggaactctcaactcgtgatatgcgatttccccatccgaattcttactctcgtaacgaattccttcattctccttcctgatcgtcactccatcctgatccgataatatcgaattcccctctttcccgtcaagaggcagatgttgtccgtctgccagaattaactcggcctttatgctacccggattaattccggcctctgaatgcaaaggtatttcccgggaagatttttccggaagtaaatatatcacgaagaaaatactggaaataacaaacacaacagcagcagcatatcggataccacacgtgatccacaacctctttcccccggttgccctatccactcgttgccaggcagatttcttatgcaatttcttgattatccgatctcgctgcctagtatctttctgatggtgaatcttttcgaacaattgtctattatcttccctctcgtccaaccattgctccaaagttaaccgttcttcctcggaaagctctccacgcaaatcctttacgatcaaataaggtatatgcaaataatacgttaaatctctcattattccttcgattaataagagaataaaatggaagctaataaaagaaatgggaaatcgttatttaactgacaacaagagatatgcttaattcaagaaaagattatttatctttaaataaaaatatcattaaaggaacgtttatttacactctcaactcgttaccctcgctcttaatttacggctttcttcacaaatatcaagagcaaatctacacttattacaattcaccctcttgcctgggtgaaagacaaaattaaaaaattattctcttattcgaacccacttcactgcatctgcaaaaactcgctggccttcaacgcctttatccgacaactctaactttgcttctcccgcattaaaacggaaacttcctaaagaaagccatctcacatttctccgggggtccatcttctgttgaatctcttccactccttctgcatgatacaatgtataatattgatacacccggggcaaagaatgcactcccgttattaacgcaaatatagaagatgcagcatagtcactctgattagccacgaacacctcgtataatccgttttcgggaagatttgcccgccagaccgccttggattccccggtcccacaaatcttgtaataggcggtacattccggttccccataaaaaactttattataaacaagacgccacgttccgggagccgagattggtttttcatattttttcttcttttggtctctatggagaaatgcataaatcttgtttcgagaagaagcgtccactaacgagaatcccggatcttgatcatctaccacgatttcatcgtttcccgattttctaaaatacatcgaatcaatttcccgttcgccacccacacattccgtaacaatctcattttcgacactacaattcaccaaaatatccattggtctgttcccggatatattcgtacaatagcctacatacaatggcctcttatcacacggcaaccatatttccagcgcttttcccgcaggaagataataatccttcagcacctcttctctaggcatatatcctaataatcctccaaaagaaaatatcccgtccgtctctccagaattcaacactttacaggaaatctggaatccggaatactcgttagtctctatttttctcatctttgcatcccttacttcaaaaacaggtaatccctttgccgtgtatatttctctgagaaaaggctcaaaatctacccctaaagaatcccgaaacatcgtctcaaattcatcaagaggaagttctcgaaaacaactaaaggaagccacctgctccaaaaatcgtttgaatttttcctccggtacttgcatcgtgatccttttacgcagataagtacactttaacttcaccatttgttccaacaactcaaacgataaatcacaatctcttgcagcattttccaagttccctgatgagaaataatccaatgcagacatttctacatattgattaaaaatttgatatgatattcgatcttctaaactttcccaaggggaattaaaaaaaatactaaaaaaaatatccatcaaaggatatttttccgaacgaacattctgcacataataagttgataacggaaaaatgtaaagaggattttccgtttctttcatttcactgaaatcttctgataattgcatcttccccggcttaaaactggtacgtcgaaaagagagtaaaggattgtaaaaattacctcccgcccacctccacaatacatttttcagatccattcctgcctttattgcttttttaaaattcgatgaaaccatcgtaactgcatattccggcagtaaaagcaattccggctgaactcggtcacttccacctttctgcttacgaaaatacgatgcgaaaggtagaggcgtttctaccaatgtcaatcgtttaaaaaaatatcccgttccatttttatgtaaagacgtcccacttgtcttcaatatttcaacaatatcaaaatccggctcatcaaaatcttccgagaaaaaatcatgtccacgaaaataatacaacgaatacaacacggaatctaccataacagacttcttttcataatctccagcacaaagcgtgatacccgtcaaacgctcttcattcgtgaatcgcaacgtatccccatgtcgtgtctggactccttgtgaaatgaccgttcgatctgtttctcccaccacggacaacgtgtaacgggtaaagttcttccgagtatcccaaggcattacaggatttaccggcgaacacgttaccggataccacaaacactccggaatcaacaaggtttgtttctttcccaaaaaagcattttgttttcccagccggaaaaatccgatattcccggaagtctggtaatactcctcatccggaatatccaagtaacagatacgaccgtctatctttccggtatactccacacgtaattttacactatccttcacatcaagcggcatatccacgttcaacacttgatgatctcgaacgaaaggaatttcctgtcccctaactattactcgtttcacagccaaatccggatttaaaaacaacaacaaacggttcatcttttctcccgtcgcatttttcaatatcaactcacaatctcctgtaaaataatcccccgattgccgaaaaaccaaagacaacgattccaaatctcccgtcggttctccaatgtaccgctcgaatgttcgaacatattctttccgcacatctatctcacaaatatgcagtaaaaaatataaaactcccgtacaagcccaaaaaacgatacaaataatccccaccatcctcgtgtttttcaccgacttgaaacaattcggtaaacgatttgaaaaaccaatcgcccaaaacagcaaaccagttcctcccaacaaccacgccaagcgttgcaaaagataacaccacagattcacgtgccctgtcacatccgaaaacatattgggaagggcacgtgtcgtaatatcaaaaaaaccgttgcctatatcatacaaatacaacccgacaacaccgaggacaaatattaaaactagagataccatcacccgatttttcccccataccaaaagcgacattgccattcccaccgacaatacgaaaccgggcaacactaacgttacaaaataaaaaatatatatccagagagaaaaaggagaatcactcgcaaaaagattcaccaacatcgagaataccatagagaccaaacaggtcaagagtaccacctttgcgattcccaacacctgtccaaaatttcgctccatattacttatcggatgaaccaacaaggctgcttccgtatcccgtttttcccgactcaagacctcatgcaccgcaaaaatcacgaacaacacctgtaccatgttaaaacacaaggcctgaaaatagggaaaagatgaaggtaaagccatccaataccactcgtttcttacaaaattaccctgaataaacagttgtgatacattaatccccacaacaatcaacacgaataacttgaatatccaccctcggcgaaattgtatcgcctcgtacttcgccattaatttaatataactgacatccataattacaatttttaataacaacgttacaaactatcgaaacttgtaactgataataacaaaagcatctctatcattctcttgatatatcttgatgatatccggatgtttccgacaaaattcatcccatgccgaaggtaacaaatgttctttcaaacgatcaacctttcggataaaagcccgcggacgataataaaaatagatatagtgatcatcaaaattgttccaactatcaaaataaactgacgggaaatatttaatcgggaaagacaaagaaaacaaaatatcatcatctatcgaaacataattgcaagtctttccatttgacttatcatgaacaaaataataataccgttctttaaaaaaataactgcccattacatattttcgattttcgtttaccgttatatgatgcactcctgcttctcgattcgctttttcttcgtctttaaaccacaattcaaaatcaagaagaactgaatgttggcccttatcaacataataacttggtcttatttgatccccttccacggaataaatataactgtcataaacattatataatctgatagcactcccataacgataaaaagagtctttacctctgtttttcaaccctttcaaagggaaaaattgccgaacaagacgaccgtcagtcgtcataacttttaaccaataactttcggaataatttttaccttgtcgataacgtcgacaccataaatacaaatcattccccacacgccctttcaaagcaaaatcctcgtcccaaataccggttgtattttttattgcccggcgataattcaatttcccttccagcgagtagtttaagtactccggattcgaagaagcataagctccaagcgtcccgtttgactcaaaaaatatatcatgaacgtaatgatacttgtcacaatcatcattacttcctatctttcgtttaaaatttccagatttatcaaactctgcaatataattattaccaaggcttatctcaaacaaagcaataaatcggtcatccagttctaaaatatttttcacccacgtgtaagaacacccctttaacgacattacccggtaaccggtgaacaattccgacatctttaacgtctgagcctcttccggacaaagacgaatcacaggtacatcggaagatttcacttgtccataccccctttccaagagaaagaaacagacaaaacaaaaaaacaaaagtctaatattcatcatatatctatatttaaagccgaatggcactccaaaggaaactgccattcggcttgctattcacactacctacaaatcatcttcattaaattcacatctatcaccaaaccaccccggatcacatttacaatatccataataagaatactgagtttcgctcaacttaacaaaatcaccatggccacaatacgtttcttcgcccacagccttatcaaaccacctcggctcattaaatgacatcaaaacaaatgctcccgcaactccaagaagcacgactaatttttccacttgctttttcatagttttaaagtataaagtaaatcatctgtaccaacctcgcctggtacatggcgatatctattttaaataatcatcccggatcaacttcatataattattcaacacgctcaacgtgtaatcattcaatatcaaataagcctgtacctgccgttgagttccaacgtaaaaaattgcggtttctcgtcctaatctattccctaaaggcccggcttcaaacactcgatacgggtaagctttcaatatctcaaataaaaccgaatcacatttctcatcaacaacgacaaccaaccgggacgagtccatatccttacacgtattcaaaatataacttaatcgtcgatcccgtaatttatctgtcatatcaccagcgatgtaaagcaccatgcaatcctgcaaaccgtcatgaatacactccgacctttcatccatttgaatcctaatgattgaatcaccactccaccatttctttttatacgtctcgaaaagtaatcttaatagaaaatccgtactcccgtgcattctctcgatctccatttcccggtaatgacatgtctcccgccagcggtttctcgaagcagtcaagtaatttacatatattcctccggcaataataatcaccagaaacacgataaaacttatatccggtttctttttcataaccttaattattagtacaacgtaattgtatctcgtggggtgaatccggcaaattagaaaacacatacgcctttttataaacccgtccttcccctgtcgacttatattttacccttatcactccggtttttccaggcaacaaaggcgttcggtcccacgaaaaagacaaacaaccgcaacttgtttctatggcagaaataattatcggagaatcaaacgaattccggtaaacaatatcaaaccaagtctctttatcatccggctcccgagtaaaatcatactgatcagcaaaaagccgtttcttttcccaatcgacctctcgtaccaccccgaattccatctcggcgatatactcacgataaagcaacttatccaaatcatctaaatttcttaatgccttttccttgtactcaatggcttgtttatcatccccaagtaagccgcaatatcgccatccgagataaagattcatgaaataaggttccgtatccaacgacatcttcacccgatacatccctttccgcaagactaccgtatccatatccatgttcggacaagtcaattgaaatgatgcctgcaaaacattctcgaaaaaagaatagacattcgaagaatacgacgtgtaaagagatacattcaaccggggtggcacattctgaccctgttccaacaattgcagcacggacaataatccctcggctccgataaatcctgtatgcaagtattctattcgcatactggtatctgcaatgatcattgtcggggtggatagcgtacgtaaaacttgaggaatcaacgcattcttctcgtcagtaatttccaattgccacatgcgataatctcgattcaatttttctactaactctttatccccagcccaatcatcttttgtcgctttacacacgttacaatcccccgaggctaacaagatcaacactctctttccgtctactcgcatggaatcccgaacctcatgaaaatttccctgacgaacctgtacgggaaataaatctcgacatgagccgcaaaacaaaatcatcaaaacgatactcaaataaccacctctctttttcattgcgcatattatttagcatgaaaactcctgttcatcctaaaaatgaacaataatcgcctaacatcaagctcctctccagcctgattatcccaaaaactaattctaaattatctccccccgagaactacatttatactaatacaatccacacctacattcgggtgaaaaaaagacaaaaaaagctgtctcaaaactattttgagacagcctcactgactacattctattttaaatactatttcgagaatatctcttccaagcactgttccaactcctctccgtataaattaacagctacaataacacctttcggatcaattaaaaatacccggggaacagaagaaacaccaaaagttttagccacttcactcctctggtctaaaacgtgtttccacggagtctgatcttcttggatggcttgtttccatgcatcaggattttgatcaatacttacacctaaaacttcaaatccactctgttggtactttttatacaattcaagaacgtgctttccttctcttcgacaaggagcacaccaggatgcccaaaaatccaacaatacccacttcccttttaaagaagataaagcaaaagattttccctcgacatcgggtaaattgatctccgggacattaacaccgacggcaacctttctcattaaatctcgacgttgagttataaggcgaacgtcattattattttccatcccagtataacttctcactaaagaatctaactctgcatattgcatcttttgcatgagtgaagcacaataaaaacaagctgccgcatacttatggtcagaattacctaaaaagtctgctcggaaaatttttcgagctttcgttgcatcggtaaaagcttttgttgccgtacgtactttctcccgatctttagtttgaaatgaattctgataagcttgggcacactccatctccactttttccaaacgacgctcttcttcattaaaatatccccacaattcatttgtcggtgtacctgttactttcccgtaatataccgaatcttttttcacggctatttgaatcttacccggttcaaggaataatgtcaaactccctcgttgatcatcaaaaaataattgtacagactggatttccgatatttctcctttaaactcgaaacgccccttttggatgcccgaagagcctaactccttatacccctccatcgttttctgcttcatcacaacccgtccggaatccatcccttcaatttttccaccaatcttgtattggcctgtatgttgcgcatgaaccacgcaacatacaagcacaaacaccacacaaaccaatattctcctcatcctatttctctctataagttacatcaacgggagttccgaatccactgtgcatagtagactcaacaaaatcatcaccgatcaccgttggcaaatcatacgtacgtaccacaccgttcaactctccgccggatttcaccgatcccacgatcaattttctttgtaatgcattacataccggatcgtatgcagaatttatacccctaaacaaattaaacttcaacattgtaatcgtttcactatccaaatgaataggttctgctttatgcccttccaagtcgaaataatacaccgtgttcccgacagcataaaatacccacggattattcggatgtacggcaaaacacgtagcattctcaatttccgggtaaccatccaattcaatgaattttttctgagcaccccctgccccaaaagaaggcatccccatcacatataaataacgtgtataaggagcttcagtatcctgcaatatcgcataagtagttcctccgtcatacaatgaattttccatccaaacaaaatccttccctgtctcccaagaaaataaggattctttcactgacatcaactcacaatttcgcattccccccgttgcaagtttcacaaaacgtttattagatgtatcatacagtatgatatcattgtacatagcagtcgatgatgtattcacgccaaccgccgaagcaacattaaaataatttccattatcacctgttaaataattaatagggactccaaaaagtacctcttgtccaaaggttgttcccccaaaaacatatttatccgaaaccaatagttcccaccccattcctgccgttctattcgtggcagaaaaatcagccggatactccaacatttcataacggatctcatttgcttcatcccattggtaagtcgcaacatcaagagcagcggttgcagtctcggtaacaatataaaatcttaaatccgttccccattgattataatacatttgatataccgaatttattttcttaggccctttcaactctggagcgtcctgcaatatatcacgtacaaccatatcctctttagcggacatcgaaatcaaatccaaacgggcatttccattaacatccgaaagtaccagccaaccttcatttaattgggtagttactctcaatttaaatgtccctttccaagttacccgagtaatcgtatccttcaccaagcaattcacgttgtactcgccatccggaagttccacaaaatagctcaaattttcctcttctccaatcaaatacgaggtcgtttgagtctctccggctttcaattcggacacagcttcccatttaaaactataccgatccggcatactgccgtcgtcagccgttgcttcaataaccggagtggcccgtaaggtgtccacattccgatatttcacctgcaactcctctggcaatcctgttatctgcaattcattgatttcatgataatcataattccctttatcatcaaaacaggcacttaaaaccaccgtgatgaatagtgttattagaaataatatatttttcatcattcttctcttttatgattctatttataatacttatcacccattttcatcaacgtcacgttgtcatcttcataaatcgggttaccgttcgcactatattcatctaaaatctgtaccattttagctccaacatattgttgacgggaagcaagcatatattccggatcattaaacatatcccgtgtcatattcatctccgtacacatgaaatccaacttcttcaccgaaaattcaccaaattcaggaatactccatttcaacggaggagtcataatctcggagaaatagattctataacgaatggcgctatacccttcatcatttgaagaggttactttggtcggataacttaacgcaaaatcgttattctcttccaattccaaaataatgtaacgttcctcttttttcaaaatttccggtcgcaacagttccacaagaatcgcaccgaacgtgttccctgccgggatagtgtatgaatccgccaaagctttataatcaacatccactgtagcattcgtttcggccactttcactttcacctgtcggtcgtaatctttcacctcaccaccggttctcaccatgatgtagagagaatccacctccttatttacatccacataagcaaatgagaaataggtagaatccaaacccgcagacggattgaaatagatgaaatcacgcccggaataaagatccaaatctttctggcaactccaaagactcacaatcagagctgcaaatatgaatatattttttttcatcgtacggttcatatttaatttctataatcggtttcgctatccggcaatgggaatttatatttggcttcgtccatagtaatcattccactgtcgtctccggccgggatagaagacacgttcagacgtttatagtagaagaacaattggccttctccgaaaaattctttcatatattcctctttcaacacttgctgaatatccaccatttcggtatcctcaaaagcaacaagccctctgtttctccgcaccagattcaaacaagtccgagcctccgtttcatcgtccgtggtctctgccacgatataaaacatctcgctgatccgaatcatcggtaccaaataggagaaaaacggatcactctcctcgggagcttcatatttatggaagcaacggaatgagtatttaccgttgtccggtctaatccagaatggagtgaaacgacaatcactcgtactttccgtcaagaagatgttcaacaaacttgtattcgtcggagccaatatgccgttgtccaattccggtgtaaaataattcgtaaatatttcaccacgtttcttattctccaatccgaataatacttctgtcgagaacacccgatccttactcttgtttccactctccattaatgaattgtaatccgcaaaaggataccatttagactgtatttctaccaatttacgagccatgatcaaagcgtcttcattacgcccggcatacaaatacactcgagccatcaaagcctgtacggcataataattcaatcgataagtacgcaaacgcagatcattaaccccatcgctagccgcagtatttctcgggccttccgtaatcaccgggtctttaaccaataattgctccgcctgtttcaaatcctccaacacgttatcgattacttccgaagccgggagaatattggaaccttggtaagcaaatttcttgttgtaacagatggaaagtcccttcggattcgtcttgtaaacaggcccgaacagacgtaataagtcaaaatgtaacatggctctcaaagccaaagcctcaccgtaaataatattgtaattgtcgcccgtgaaaacctctttacgcaaatcggcattctccaacaatttattacaattcatgatcagtgagtacatcttctgccacaacccatcaatactcttcttcacatcatcatcaccgtaattgtaggctacccactccttgtaagaaccgattgagccaagattatatcgttgagccagaatttccaccattctaaacatcaaatctcccccgtataacgtcccttgattcaactccacgtatacccccgttaaagcttgtttaaacccttcttcggtttcatacaactgatcttccaataccttgtctattggcttcagatccaaccaactatcgcaactgctcataacaaccacaagcaatgcgacacataccattcttattgattttaacactttcatatcacatcatttaaaaagttacagaaagggacattgacatcgtacgagcaaacggatagtcaataccacgttcctctttcacgctggaaatccggaaaatttcattcatattcgcctgcaaacgaacagccgacacaccaagtttggccaatttcttgggattaaaatcatatccggcagaaatagactctccacttaacacgttttcacgctgaacgaaacgagaagaaattttcgtagtctccgttaatgaaattcccttgaattgagctcgatccccggccttttgccaacggtcatacaacgcccgtttatcctgattatattttaatgaactttctgaaatattctctactttcgtatacatcgcattattaaacacatccgcacctaacttgtaacggaaaaagaatgagaaagaaaaacctttataatacaaggtacttcccaacaccccttccaacttaggttgactattacccacgatcacttcatctttcacatcatactcgaaagtataggttccatctttctttataaacacttcccgtcccgtggatggatcaattcccaaagaacgaacagcccacaaagaattcggatcaccaccatcataataacgtgtcaaactggtattcttatcccggtaagatccgtctccattcacctcaccttcttcacgatttgactcgttcaatttttccaaactattacctatattttcataacgggctttttgccatctgaaattaacacttaatgtccagttaatccgatctgacggacgatatatcggtgaatatttcaaggttccgttcacccctttggttagttggcttcccatgtttgttcccaccgaagtaatacctacggaagaagggacggtgatataaaccaacaaaggatccgtatccttaataaaataatccatgttcaaattcaaacgattacctaacaaagaaatatccacaccgatatttttatccagtgttttttgccatttcaaattaggattaccaatcgcatctaccaatacactcgttccgaaagaactttgcatccatgtattaaacgcataacttgtctcggattgataagaactaaaattctgattaccgggatttccgacagaagctctgatctttaacaaatttatccaacttatctcacgcaaaaatgcttcattatgcaagttccaagccaaacccactgcccacgtttccgtgtagcgtttgttgctaccaaaagcagaagaaccatccagacggaaattcacatctaacaaataacgattgttatacgcgtatcccccgttaaaataaatactatgggaacgactttcattttccgagtaggtaggtttacttccctctctaaagccatttgagaaagaaggtttcgtgaaacttccgttcgggaatcctgaaaccgaatatccttcattcgtggaagaactggaacgaagatttgttccgaccaccgcatttacctgatgaacttctttcaataaggctccgtaagttaaagtcaaatcgccatcgtaataaaattcactaaccgttgtagaagtgtaactacccttttgatcctgcacgtaattgtcaaatctcgaatgttgcggagagataaattgttccgttttctttacgcccttacctatccctaaacgtcctctcaaatacaaggacggcatgattctccattccagattcaaattgtttctaaaactaaactgatcttcttcatccaggttgttcaaactgtaattccaaagcggattacccacggaataggtcgtattcgtacccgggatgtcaaagtgatcaagataacgttcgatcttcccattcgcacctgttttccggtaataaggattggctctcgaaaattcggaaaacggtacaaccggattctccgccttgttatagtctaacgagaatttattggcaaaagaaattttccctttccggtaactcaaatcaaagtttccgccaataatattacgacttgacattttcatcacaccggagatattgttatagtttatacctaaaccatagcgtacggcctcatctcccccttccgcatagaggttatgtttatgactgaatcccactcttaacggttcatgcaaccaatacgtatttaccccacgagcgacatccgcacgacgactattatacaggctgtctaataccgattgtgtcattctcgatccggaacttcccgaggaagcatcgtaatacccggccaatctttcaaattccaatttttcagccgcattcatcaggttataatcggaaagatcgggcatggaaagactaaaatcaccgacataagaaatcttaaacttaccctgttccggtctcttggtttcaattacgaccactccgttagcagcctttgatccataaatagcagtagaagctgcatctttcaaaattgtaacagactccacccgctccatattcaagtcagttatgacttgtaaggtcgtctcgaaaccatccaaaataaacaatggctgattcggatcggttccaaattgctctttcaacccgatcacactcgttttaccacgaatttcaatatccggcaacctattcgggtccgatccgaattgattattttccatgatggaaaaagaaggatccaacgttttcaaactctgaatcaagttctgtgaaccaaccatttttaactcttctttcttaaatgttgtcgcagaaccggtaaaactctctttttttctctggtaaataccagtgactacaacctcatccatttctgttacatcttctttcaagacgatcgccaatggttttgcatcctctccgtttacctttacttcctgttgtttatatccaataaacgagaaaacaagtacaagattatcctgctttggcaattcaaaactgaacttaccatcaacatcagtaaccgcaccaatctgagtgcctttcaataatattgttacacccggtaagaattcccctttctcatctttcaccgtcccggttacctttatcttcgtcacctccttcttttccggctcttccggacgaacaataattaatgtcccgtcaaattcaaacatcattcccgtattcatcaacactttacgcaaaacattctccaccgtctcatcaaccgcccgcacggaaaccgatcctaattttgcagcctgctccgtattaaacacaaacgacaaattcgtctgcttctgaatttcatcaaacaacaccttaatcgaaacgtcctttaaatcaagatttacccgttcttgttgagctaacgttgatgctgataatcccaacgtaaaacacaacaacaatgaaatacatagcttcatcatcaataaaatttttcgttttctatgtccacccaaagacagacataaccgtttttttttcatatatttgcaatattaagattattatttgcgacagtcgttttcctaggactcctgtcgcttatcgctaacaacgggggatgcgctaacatccgccgtttttttattctgtaattacaattgttctatcctttatcgtaaaatgtacaccgaccatcttactaatcgcatttaaaataatttctacatcttcatatttctccatatgtccggtaaaatgatatcctttcactttttcacttccataaaacacatccacgtcataccaacgagccaaacgattcaaaatatcttccaatccctcattctcaaacacgaaaaaaccttctttccaagctgtataagtccctacatttacatttcggattcccttaaattccccattcacatcaaactcggccaattgtgaaggctccatcatatattcacgtcccgaactctttccccgaatccccactttaccagatactaacgtggtctgcgttccaccgacgccataagtattcacgttaaattccgtcccgtaaacttttacccgaacggcgtctgtcaccacgtaaaatggtctattcgtatctctcgtcacctcaaaataagcctcccccgacaaatgcacttgccgctttttgctatcaaattgtaccggatatttcaactctgaagcagcattcaaatatactttcgttccatctgataacactaccgtatactcacctcctcgtggggtcttcaaggtattatactgtaacgtagaaacagcctttttcgaatcctggtaaacaattccagcttgtccgtttttcaccacgagatcctcctgtacacaaatatctctttccagagaaggtaataaagcgattgtctgcccttgggctgttatcaacatagctttatgttctcccggcataattcccgaattaccgacagccatttgagacggaatctcatctttttccagttgtaaccaataaatcacggacaataaaggaatcatgacaatcgctgcatatttcacaagttgcccgatagaatatttccgatgcttagagcgaatatatttcatataatttcccaactcatactccactctttccttggcaggaatcggcccacttgtcaaattccaagcttttttcaattgattaaaataaacttcgttctccggacttgctttaagccattgagccaaagtctgaatttcgtctggagttgccaccccatccaaaactcttaaaatcaattcgtctatattaaatgcatttgtcatactttgtccgttatgttcttataacgaccgaagacaaatttacccctagagaaatttcagaaattttgaaaaagaattatacataacaaccatcccagctcttttcttagacgtacaaaagccgtagtcatttgagcttcaacagtttttatagatatatttaactgttctgaaatttgtttgttcgaaagtccttccattttacttaacacgaatatttcccgacatcgttccggcaatttatcgatcgcatcttggattgcccctctcaaatcttcctccaacaacgcctgttccgcctccggagtctctattactttcgaaaagtaaaaatctaacaattcctgattgatataattatccctcactttttgatgcttaatcgcatccatacagctattatacacggatttataaagatagggacgcacctcaagttcttctttcaattccttacgccgctcgtacaacttgcaaaaacattcctgcaccacatcattcgctaattcggtatccttcaagattcgcccggcataatttaataatggaccgtaatacaaccgaaacacgtaagcaaaagcctcttccttacctctcctaagtcccgcaatcaagtgtttcccgttatcatccatagttatacattcttatcagatatctatccaatttccatctgcacaaatatacaacaatatccgcaaaaaaagagctcgctgaaaatagacataatctattttcaacgagcctttttcaattttacttttaatacatttagattccttccaactcccgcaatatttttagtgtcttcggatcagacggacgtaacatattagcatctatgaaattcccttcccggtctattaacaaaaaacgaggaaccccgttgttcccaagttcctccatatatttgttattacctcgcatatgtaattgaattcctcccatttgcctttctctcacaaatttctcccactcatcctgacttttatcacaagatatactcacaaaatatatgtttcgtccttgaaattcttcctctaatttttttaatgacggaatttccgcattacacggtccacaccaagtggcccacaaatcaacatacacgtattttcctttaaaatccgacaaacttacctcttttccattgatatccggaaatgtaaacgaaacagctggctgccctttttccaactttctattggcacgacacaaattgtcgtaagcctccaccaaaatcggttgatgtacccatttcctaaaaatcgaatccatctcacctgtagtacctacactcaaagctttcatataagccatcacattcttattcacaatatattctatcaaccgttcatctttaaacgttgatatcgtcccatgcaacacctctagtgatatatcataaaatgaaccttccaactttttcattttggctaacgcaagcatcacacgatccatagactcccgatattccggtatcttccatgaggcagaatcttcaattacggctttttgtaattcagcataagtatcctccgacaaatctaattttccatctttcacttctccataaacaaccgccgaagctaaatgattatttttaacataacgcaaccgctttctctcctgctctacaaatctaggattcaagacatcttcccgtaaagcctcttcccgtttacccatcactcgatctaatttttcccgaaattcccgattcggtattcgataataatctatgaaataaattcgctcaacgtaccgtttattcaaataattattcacatctgctcctttccccgcaaaataccattgatttccctcgaacttggcaatccaaggtttccccgcttccaaccaaataacatatggcatatcgccgacccacaaacgggcatactgttcccccgacacaggaattgtaattacacttttccgtaaagaatcccccaagacaaactctaaagttgcccgctcatttctaaattccaaatcaacattccttgtctcttcgacaggaaacaatacctcaaaagtagtcttctcattgagatcgcaagccgctagcatcaagaaacacacaaatattaccaacatatttttaacaatagccatacatcaaattttacacgaacaaactctttcataaacaatatatttccctttcaatacattttctcgtaaaatcagaataacaccaaaattctcccgtaccacaataaaaacctttcttcccataagcaagggaagaaaggcatcaaacacgcaccaacttctattttgctcctaaatgaggtatccctgtatcggcaaaattttttaaagaatgcttcaattgtgacatctcaacttgatcaattaattgctttgtcaaagcaactaattcctttttctgtttgttattccacttgtactgtaacatcgtaagtggactaaaatataaataagctattttttgatctgacaacttaggaaatatccctttacataacctaagcgtctcgtctgtattttctgttttcaccgctttaattaaagctatatactcatataaataatcttgccctattaacttataggaatccaacattttctcggcagcctccacatcagctaacgttgcacttttattccggccacgcaagatgtcttctaattggacggcaaacaaatctgcaacaactgaatcaacctcttttctcccaacaccttttcgaaactgctctatgtgctttaacaaatataccatattacctgacccgacaggcgataaatctcgattggcataaataaaccaatagggttcagaacatttttccacatcgtccaaggcaaccactacatcttgagctatcttttgagctttctctaaatcacaagattttacaagagcctttatatatttcagtaaaaagtccatattcctatttccccgattgtattccgcagccaactttccgactgaattgtcatcaaatgcgatttttaccttttctaaaaattcttctccagtagccgtacctccaactaccgcatgtaataaactcccgtctgtatctaaaattaaaaaagttggataagcagatactctatatttttgctggatcgcccgtccttcccctttctccatatcgaactttacacaaacaaatttcccattcatgtattctccaacttctttcaatggtaaaattttctctgccatcatcttacacggcccacaccaagaagtataacaatctataaacacatacttattctccactttggcctgctctaatgctttttcaagcgtaagctcttgaaaacttgtctgcgcagacatggatgtcatcacaaatatgcaacttaacaataatattattttcttcatcgcatttcttattaaccttttaataattagaatatgaataacgtccttttctcaaagtcaactctcctaattcaaaatcatcagttggcactaattgaaaattcaacgcaacacttcctttagtttccgcatcatacagaatcaccacaggtatattcatataaacagaatccgcaggaataatcatatgtctttgaatttccggatcatcaaaagcgacataattcacccctggaactgcagtaatataattgctatccgccttattaatgtatggttcaaagcgtactaaccgatctttttgggccggtctcccaaccgcttgtaatctaaaccaagccgtatcccgcaagcgatttgaattcacataaggataattcaacggagcagtttttcgatcgatagtatctttatttatcaaattactataataaaattggatataatcaccttcctcataaaactcaggtttctcataatgacaagaagctactcctaaacaaaatagaaatacaataataaataaccttttcataacttctaattttttattcacctaaatattctttttctggaataggcaatatatattgctcctcgctacactcacttattccaaaaatcatatttcttacatttaaccgtttatatgtaaagaaattctgaccctctcctattaactctcgaatccattctttacacactcgttcctgacgatctgtttccgttaaaggcacatattcaataccacgagctgtacaaaattctttataaacttcattcgcttccgtcaaaggagctttttccataatcatcaaatacatttcagacaaacgaataattggaaaattttgcgctgctttcgtcccagtataaaaacatctgtattttcttaaaacatatccataaatcattaatccagttctttcataagtccacaactttttataacggaaatcagacgtatttccatcaaataaagtctgtacaaaagtcggattaacatttacaatcatcgcccgtcctgactgccaaccacctttaccataatcataagtatcacatttggtgccacaaatatgttcactataacaagttccatccacccacgaattatccggaaaatcatcaacctcatttgttaaacgaaactttttagaaccatccgggtttgtcgcatctttcacgagtcgagcatatctcaacgcttcttcaatattcccgtaccacaaatgaacccttgccagtaatcctaacacaccataataattcatccggcttttccgataaggccacacactactggtcgtttctgtatcttcaaaagacattttcaacaccacatccgactttcctaataattcctcagcccgtttcaagtcctcgaataataatgtcatatatttttcatatgtaacatactcatacctattagcagaatttacggtaacataaggcaaataagttctgttaacatcaacctttgaaggaacgggtccccacaaacgaatcaaatcaaaatgagccaatgcacggagagcatgagcttcccccaccccaatattataaacgtcatcagaaatttttttcttattcaattcaaccccttgaatcaaatcattcatggtaactacaatcttataaaaaccttggaaagaactacttaaagaactttccaccaaatcagaatcgtaatcatgattacttaaatcatactctcgattaccttcacttacagtccatgaacacgctaatgattccgtcatacctcctcctcccatataaccggccggattatataataccccccgcatattcagatatgtcccatttaacgcttgttttatcccgtcatttgtagcatacaagtcttctgccaatattgacgtcgccggttgtaccgtcaaccaatcattgcaagcactacatcctaacaataatgctatactcaaactatatattttttttctcatctttttaattttatgcattagaatgaacaagaaattgaaaaattcgggttaattgaaaatggataatctattcccctctcccgcttgattgttgataaataaaatatatcacttaaataggcactcaccgacaaggattccatccccaacttttgacaccatttccgaggtattagataagaaacatttatatttgtacaactaaacacgttatccttatgtacaaacatactattgggatacgtatactgtctcgaagcatctgatgtaacttgataaagtttatatcgagatacatctcccggtttctcccaaccttgagacaatgctcgtttatccacattatacaacaaactcaagttctctcccttagtcaattctgtaaaattaacctgataccctccccacttcacgccaaatccgacattaagcgagagacccttataagaaaatgaagtactgatattcccattaagtttaggttgacggtctcccaaccaaacaagatcttctgaactttgtctgaaagttatattattgttcttatccaaaaacattcgataacctgttgacggatcgactccaacagaacgtaatccgtaaatggcatccatagaatgtccttcaatgtaacgataatattcacttgccccactcatggttttcgaactatatttaaccttctctttaaaaccttccgataattggacgatcgtgtttacctggcgattaaatcgtcccgtaatactccagtttatatttttcacggtattacgaataggataaagcgtaacattaaactcgtatccttcattccgtatcttcccgatattccctttaaaattctcaaatccatgagaaatcggtaagaatatatcttgcacggcgttatccgtcaacttattataataattaaactggaatgcaatgcgattactaaagaaacccatatcaaaaccgacattgtgctgatacgtattctgccattgtaaatatgggttagcaaaccgttccatctcaacccctacaccggataaataagtttcgttcacattttgcctatacaccgtcatagcatctgccggactaaatcccatatttccagatacgccataagagtaacgtactctcaagtcactaatccaccccacgttttccttgataaaacgctcattatatatgttccatcctcccccgaatgaccaaaaagatccccaacgactttccgacccaaaagatgaagaaccatccgtactatacgaaatatctaaaaagtaacgcatatcataataataattcacggaaccacgtaaagatattctacgcatggtagtctcttcaccacttgtaccccaagcatccggatatcctaaagacattcctatattatctattttatccgtaagaaatcctgtggcagcccagcttacttcatcttctaaatcttcctgcatctctccattcagatttacggtcaacatatgtttttcgttgaaggtgtttgtataattcactgttaaagctgtttgccatacatccgcagtcttatctcttcgatcataacgtcctttctgctttaattctttatctgcataccatttatgcgaaggaggtataaaactatctttacgagaaattttcctacttaatcccacggaaccaaccacttgaaaacccggacaaatcgtgtaacgaatcgaggtattactccgtaaagaagtatacttggaatcattccaacatccaaccctccaatcatacaaagggttatctataggatcttgatttaacggatgataataataagttacaggatcaccattttcatcgtaagggttccaataccgattcatttgcacataatccgaaaaattaccataaacactatttttagatgtattcactccaagagaaaacgattgcatcaccatccatttttctgtcatatagtccacctctaacgttccattgacattattacggtcagatcctttcataacccccacggttgaatcgtatgacaaatcaaaacgaaaacgccaatcatccgccccccccataaaattcaaacgatgagtttgccctattcccgtacgaactggtaccgacatccaatcataattttcccccttgtcaacagcattttttaattcttgataggtatcttcatataaatcccataccccattcttatgctcaaattccagtttttctgcagccgttgctaaattataagaactcaaatccggactctctatttttatttgcccattataagaaattcgcaatttaccagctgctggacgagttgtcgtaatcaccaccacaccattagcacccctagatccatataaagatgttgcacttgcatccttcaaaatcgtgatattttctacttcattctcgttcaaatccatcacgcgttccaaatcgacctcaaacccatccattataaacaacgggtaattcaatgtagcccgattagcattctgcaaatcttccacacttgataaggttgaagccccacgcaactgaatttcaggtaaatgattcggatcagagccagcatcattattttgaataattcgaaaactaggatcaatgtttgacaatgtctgcaaaagattacgagaatattttgcttttatttcttcttttgaaacagcagttaccgctcccgtgaaactctctttcggtttattaaaaatacctgtcaccaccacctcgtctaccgtctgtaagtcttcctccaacacgatcgcaagagacttgttatcatttttcaccggaacctcttgccgtttataccctacgaaagaaaaaatcaacatcaaattatcccgtttaggcaaatcaatatcaaattccccttttacattagttacaaatcctaaagttgttccttttacccgaatagtcaccccaggaagtaattctcccttcttatccttcacaattcctttcaccgtaaatttagaaagcgtatcgacactcgctaccacaacatgctgaataacaattgtattatcaactaatctataagtgagcctagtaccttttaaacacgcatctaacacaactttaatatcaacatctgtatatgctagattcaaatttcgaataccagcaacctgattatcacgaaataagaacgtgtaatcagtcgtcctttccaaaacttttacaacctcttcaaatgaagcattctccaaatgaagggagacccttgcctcttgactatacacacctgccgatagctgcaacgttgatacgaataaaagcaatactaaaaatttcataattaagcacgttttccacaacctttctcgccaagaaagatcatgcatccatttttttttcatacatttgtcaatatttaatgaaacaattccggttttccggagttcgaaagacgggatacggccaatatcctgtctttttcatttctctctcgtaagccttttttatcgccttacatcatgatgacacttcaaaaagaaaaaggaggtatataaaactctatttttctcgaataaaaatattattttctctaaccacaaattccgtgttacccgtcatctcaagcatttccaccactttggaaaaatcatcataccgtttcatttttcctgtaaatgtcacctccttttgagaaatgttctcccaaaatacattcacatcataccaacgggcaactactttcatgatctcttccaatcgttgttttttaaaagcaaaaacaccctctttccaagccgtgtacaaataggtatccacttctctcgtttcaatctgccctaatttgtccagtatagcttgtttgcccggttctaacacaacggattctttcccggcagaaaaccgaacaactccttgtaccaaagtcgtcaaaacctcatcctcatccgcataagccctcacatcaaaactcgtccccaacacccttaccaccgaattcttcatctctacgataaaaggatgttccttattttgtgtcacatcgaaataagcctccccagacaaataaacccgacggtctctacccacgaagtttacaggataccgaagttctgactccgaattcaaatacacaatggttccatcgctcaacgtaattgaatactctcccccacgaggaacccgtaatatattgtaacgttcttccacaacggacgaatccccttgataacttactccttgattctggacaacaatacttaccccttgctgaacaaacaacgaatcggttacccttgaactcaaaatccgggttgttccatccgccaataccaattcggctttcacttctccatgtcggatgacacttgtcacctgttccggtacatcacccagcttctgccttgctccataccacaaaactaccgccaataacggaagaacgactcctgccgcaatacttacaattcgatgaattcgccgtactctggcattacgtttccgtttctgaactacgttcatataaccattcacgatatcaacatttgctacttcccggcttttttgaaccatgtactcggcattcatcacgctttcatacaaccgctcattctctgaactttcctctcgccattgccgtaaaacatgcgcctcctcttcagaaagcgtgcccaaaagaacctttgacaaaagcgacggaatctctttatatgttttcatatttcttgtttatattaattatgacacttcaaaatcaaaaaggaggtattaccatttgaaataaattatctttccctccaacctcccctccatatcctcccccttcctctatccctactccccaccacaataacaattctgacacaataccaacataacaagtacacccgattatgtatatgctatgttcatggcgtgttcatggtatgttcgtaagtataggcaaggatagagaagagacgagcaaaggaatgctcacccttaattcatcccacaagaaaaaaaagagagaacagattccccaatttttctttcaaaattctccgggccacttgtttttgctttttcacggtctccacggcaattcccaattcatcagcgatctccttggcagaataaccttgtattgctcgagaaaacacatttctacttccaggtggtaaatcttctaaggtttgcatgacaattcggaaagtttcgtttttgatatattcattcacctcggtctcctccagttcctcggtaaaaaacttcgtggcatcttgacgaactttctccgcacgtaaataattaaaacttctaaaacgaaccatctggtacagataagcggacaaattatcaatccctcccaacttttcccgagtttcccatatcttcacgaatacatcttgcactatatcttcagccgtttcttgatcttcaagatatttcattgcaaaagagactaatacagaataatagtctataaaaagtgcttgaaaagcattttcatcacctttcattagaccatttacatttatagaagcctcttctatcataaaatgaacgttaaatgattctcgttttataaatttttatcaaacttattgctatttgtaaatcaatgctttatgttttatatataaagatctaaaatcaatatttccttgagtttttgtctgtcataaaacgtcatttattgcgcaaatataaagaatttattttacaatcataaattacaaattctcaaatcgcaacacccttataatcatccaaaaacaaacaaattaactgacaaataattttatttttttcattcattttctcccaacccaatatatactctttgcaattttatttcccccgttatgctattttgtcagctaaaactgctaaatttgcagatgagtattgaggattggattctttttcacattccatgccaaatatcaaggacaaagaattcataaattgcaaatcacatggaggacatcagaacgattaaacaacgtttcgaaattatcgggaacgacatcaagctaaaccgggcaatagaaaaagccgtacaagtggcacccacggattttaccgtgcttatcacaggtgagagtggtgtaggaaaagaaatttttcctcgaatcatccatagtttcagtgcccgtaaacatgcacagtacatcgccgttaactgcgggggaattccagaagggaccattgactccgaattattcggtcatgaaaaaggatcattcacgggagcgcttgctgaccggaaaggttacttcgaggttagtgacgggggaacgattttcctagatgaagtaggggaattaccgctatccacgcaggcgaaattgttacgcgtacttgaggccggagagtttatccgggttggctcgtcgaaagtacaaaaaacgaacgtgcgggtaattgccgccacgaacgtggatctgccagcggccgtcaaaaatgggaagtttagggaagacctttattaccggatcaacacgattcccatctcgattccggcattacgagagcggaaagaagacatatctctcctgtttcgaaaattcgcagcagacttcgccgagaaataccgtatgcctcctatccggcttaccgaggacgccgtgcaaatactcgaaaactaccggtggccgggaaacgtgcgtgaattgaaaaatatcacggaacaaatctccattctcgaacaggaaagaacggtggatgccctaagactaaaagagtatcttccggtacaaaacaatacgctcccggcattaacatctaacccggaaagcgatcatagtttcgccacggaacgagaaatcctgtacaaaatactttttgacatgaaaaaagacatgaacgatttgaaacacctcgtgtacgacatcatgcaaaaagaacatacgataaagcccgaaccggaaccttcaacctctatcgttctccggaacttgtatgaaaccccgcaatcggaattcctaggacaagccccgcaaaagacaatcaccgtagagaagaataatcatatcgaggatacggaagctgtcgtggaagaatccctctcactggaagagaaagaaaaagaaatgatcgtgaaagccttggaaaaaaaccacggcaaacgaaaactggccgcacaggacctcggaatatcagagaggacactataccggaaattaaaagagtatgatattgaaatttgaaaacacgaagagacgaatttctgcaaattaaaattatctttgtctgacacaaatagaactgcgcgcatatcaagataaaatacacatgatcaagaaaattatacctatattactactggcttttgcctttaacgggtgtaaactacaaagtattagttactcgttttcaggcgtgtcgttacaaaatggagaaaaaacattttcggtagattatttctcaaataaaaccgcttttgccccgaacctaggagcggatttcacagaagcactgaaaagttatttacgctcgcgaacaaacctgaccgaattgacagataatgacggggatatccgttttgagggacagattaccggattcgcacaaactccggttgacatcacggccgatgaaatcgctgccaagaaccgattgacaatcacgatccgggtgaaatacacgaacacaaaagatgaatcagggaaatcggatttcgacacatcattctcgcattatgaagattacgggattgacgagaattacgagtccatcgaacctgacttgataaagaaaatcacggaaaagattatcgaagatatttataacaaggccttaacaaactggtaaacgttgaaaccggaagaattaattgatattatacgttcgggacgaaaagagggagaagacatccggaacatggagtttctcatagaacaattcccttatttcgccacggcacgaaccgtgtacttgaaaatgttacacgattcgggccactcggcctaccccgagaaattaaagcataatacgatttacattcccaatcacaaacaattttatcgtttcctgaacaatttattatcggattggaacgagatcgggaatccggtgttcaaaccggaacctgttgcgatcgaattgctggaagacggggaagaggagaagaaagtcgttcccgcaaccacgttctaccaacttgaaaacgagttcccggaggaggaattcctaccaatagatgccatcgcaaatgaatggttgtcacgtaaaaaacaaaaagaggaacgaaaagactcccttattgataaatttatccaagaagaaccctccatgcccaagatcacggaggaaaacccggacataccagtcgttacggaacctgtcacgggagagaaacccgaatttttttccgaaaccctggcaaaaatatacgtccgccagcaactatatgacaaggccattgcaacttatctaaaattaagtttgaaatatccggaaaaaagtgtttactttgcagttcagattgaaaaaataaaagagaaaattaataataataagaactaattatgtacatagctatttctattttgatctttattgtttgcgctctacttatattgatcgtattggtgcaaaactcaaaaggcggtggtttatcttcttcctttgcttcttcaaaccaaatcatgggtgtaagaaagacaaccgatttcttggaaaaagcgacatggacattagctggggcgatgcttgttttatgtattgtatccgcaatggtactccccagaggtgaacaagccgggaaaaaatctgctattcaagagcaaattaatactgccgctccgggaacacaggcaatccccgatttcggaacgatgaacaataacaacacgaccacgacaacgggtgaagagaataacacgacttcacaagaacaagaataacgattcctagaatcgacacaagaaaatgtcagtatgtcagtcatactgacatttttttgtttggcacgaattatgctcttctccaaacgtaattttcaattaaaaagaaagaattaattaataataaacttttaaatattaagaattatggcacttaagacagttcttaacaaaatcattgtagagccggtagaggcagaaactaaaaccgcatcaggtatcatcatccctgattccgcaaaagaaaaaccacaaaaaggaatcgtagtagcaaccggaaaaggcaaacacgacgagccgatggaaatcaaagtgggagatgccgttctattcggtaaatattcaggaacagaagtcaatatcgacgacaaaaagtatctggtaatgaatcaatcagacattctggtggttctttaatcattgaaaattgaaaatgaatttcaagttatccaattttcaatctaaaatttaaaatctaaaattagaaacggttatggcaaaagagataaaatttaatgttgaagcccgcgatttattgaaaaagggtgttgacgaattggctaatgcagtgaaagtaacgcttggccccaaaggacgtaacgtggtaatcgagaaaaaattcggtgccccgcacattactaaagatggtgtttccgtggcaaaagagatcgaactctctgacccgtatgcaaacatcggggcacaaatggtaaaagaagtggcatccaagaccggtgatgacgcaggagacggaaccacaaccgcaaccattttagctcaatccattattagcgtgggattgaaaaacgtaactgccggtgcaaacccgatggatctgaaaagaggtatcgacaaagctgttgctgaagttgtaaaaagcttggaagctcaaaaagaagcagttggggaaaattacgataaaattcgtcaagttgcccgtatctctgccaacggtgatgacaacatcggttcattaattgccgaagccatggaaaaagttaccaaggaaggtgttatcacggtagaagaggctaaaggtaccgaaacagaagtgaaagtggttgaaggtatgcaatttgaccgcggttatatttctccctatttcgtaactgacacggagaaaatgaacgcagaattcgagaaaccttacatcctgctttatgacaagaaagtttccacgatgaaagaacttcttccgttgctggaaccggttgctcaagccggacgtgctttggtaatcattgcggaagatgttgaaagcgaagctttagctaccttggttgtaaaccgtttgagaggttctttgaagattgccgctgtaaaagctcccggattcggagaccgtagaaaagaaatgttggaagacattgccatattgacaggtggtgttgttatctctgaagaaaaaggtttgaaactggagactgccacgatcgatatgttaggatgtgcagacaaggtaactatcgacaaagagaacaccacgatcgttaacggctgcggttcaaaagaagctattgcagaacgcgtaaatcaaatcaagaaattgatcgagcactctacttctgattacgacaaagaaaaattacaggaaagactggctaaattagccggaggagttgccgtactttacgtgggtgccgcttctgaaattgaaatgaaagagaagaaagaccgcatcgacgatgctttaagcgcaacccgtgcagccatcgaagaaggaatcgttcccggaggtggtgtagcctacatccgtgctatcgaaagccttgaaaaattgaaaggcgaaaatgaggacgaaaccaccggtatcgaaatcattaaacgtgctatcgaagaaccgcttcgtcagattgccgctaacgccggagtagaaggagctgtggttgtaaacaaagtaaaagaaggtaagaaagatttcggttataacgctcgtacaggtgtttacgaaaacttgatgaagaccggagttatagatccgaagaaagtaacaagagttgccttggagaacgccgcttctatcgccggaatgttcttgaccaccgaatgcgtgttagtagaggaaaaacaagaaaatcctgctcctgccatgccgccgatgggaggaggaatgccgggaatgatgtaatcatcgaggaatttagataaaaaaaagccccttttcggggcttttttttatttactttatatacctttacgaccgcaaattcaatttattacaataacacgattttatgaattacacgattctcgatttcttgcagttgatcggatcattgggtgtgttcctcttcggtatgaagatgatgagtgaagccctgcaaaaggtggcgggtaataaaatgaggaccatcctcgccgcaatgacatccaatcgcgtgaaaggtgtgattacaggtttgttaatcaccaccatcatccaaagttcttcagccaccacagtgatggttgtcagttttgttaatgccggcttacttgaccttatcggttctatcggggtcatcatgggagccaacgtgggaaccacgttcacggcatggctcatctccatcctgggattcaagatcagcatggtaagtctttccctccccttgatcggattaagtctccccttgcttttctcggcaaaacggatgcgcaagagctggggggaattgattatcggattcggacttttatttatcggtctgaatttcctgcaggaaaacatgccgaacattcaagaaaatcctgaaattctgaattttctacataattacacggatttaggctacggttcctacatcctattcatgcttatcgggacagcgctgaccatactgatacaatcatcatctgccacgatggccctgacgctggtcatgtgtgctaacggctggatcgggttcgacatcgcagcttccatggtcttgggagaaaacatcggaaccacgatcacggcgaacctcgccgccatggttgccaacactactgccaaaagagccgctttcgctcatttcctattcaacctcttcggggttgcatgggttttagccatattcccgttctttttaggctgggtggcacaattgagtatttacttgggaattggagatccgtttacaagcgtaggttcggttccggtagcgctatcgctgttccacacttgctttaacgtggccaatgtgcttattttgatctggtttaccaagatcattgcaaacctcgttacccatattatcaaatctaaagaatcggcagacgatgccttcacgttgaaacatattaaaatcgggttattatctaccccggacgcatccttgttccaagcaaaacaagagatttctcactatgcgaagaatacgttagatatgtatcgccaagtagtggaatgtctgcatactcccacgaaagaattcgaaaagaaattcaataaaatcgacaaactggaagacgagagtgacgtggtggaagtagaaattgcagactacctgacgaaagtatcggaatccaaattatccacggaaaactcgcaacgggtcagagctatgttcaagatcgtatcggaaatcgaaagtatcgcagactcgtcattgaacgttgccaaagctgttggacgtcggaatgaacaaaacgtggaattccccgaatttatcgacgagaagttacaacacatgatggctatcgtggacgaggctctcgtagttatgtgtgcaaacctcacgattgaatacaaggaagtgaaggcaaagaaagcttacgaagtagagcaaacaatcaatgattaccggacgatcctgcaacaggaacacttgactgcaatcgaggaaaagaaatatgattatgccacgggtattatatacagtgacattttcttcgaatgcgagaagatcggggattatgcgattaacgtgaccgaggcaatcaaggaaatcgggacagacaattaatgaattgaaaattgaaaatgaaacattcagctttcaacttttagtctttagcttttagtttttaacttatacatataacatggcacaagaagatatttttaaaaagctggtagcacactgtaaagaatacgggtacgtgttccagtcatcagagatatatgacgggctggcagcagtgtacgattacggacaatacggggttgaactgaaaaataatatcaaaaaatactggtgggactctatggtgctgctacacgagaatgtggtaggattggattccgccattttcatgcacccaactatctggaaagcctccggacacgtggatgctttcaacgacccgttgattgataataaagattcaaaaaagagataccgggcagacgtactgatcgaggatcatattgccaaatatgacgacaaaatcgaaaaagatgttgccaaggcaaaaaagagattcggggaaaagtttgatgaagcattatatcgccagacaaacccgcaagtactggaaaatattcggaaaaaggaagaacttactgccagaatggcaaaggctttgaatgataacgacttggttgaacttcgccagattatcgttgacaacaagattgtttgcccgatttccggaaccagcaactggacggaagtacgccaatttaacttgatgttctccacggaaatggggtccacggccgaaggtgccagtaagatatacctgcgtcccgaaacggcacaaggtattttcgtgaacttcctaaacgtccaaaagtccggacgtatgaaaattcctttcgggatcgcccagatcggtaaagctttccgtaacgagatcgtggcacgtcaattcatcttccgtatgcgtgaattcgagcaaatggaaatgcaatttttcgtacgccccggtagtgaactcgactggttcaagaaatggaaagagactcgtatgagctggcatcaagcgctgggattcggaccggagaaataccgattccacgatcatgagaaactggcgcattacgcaaatgcagccacagacatagaattccgtttcccattcggctttaaagaggtggaaggaatccattcccgcacggactttgacctgaaacgtcaccaagagttctccgggaagaaaatacaatacttcgatcccgagttaaacgaatcatacgtaccttacgtgatcgaaacatcaatcggtgtggatcggatgttcctacaaattctttctgctgcctacacggaagaagaaatcgaaaaagaagacggatcgaaagattcacgggttgtattaaaattacccccagccttggctccgatcaagttagccgtgatgccacttgtgaagaaagacgggctacccgagaaagcagaggagatcatgaaattgttgagactagacttcagatgccagtacgatgagaaagactctatcggtaaacgctatcgccgccaagatgccatcggtaccccattctgtattactattgaccaccaaactctggaagataacgcagtcaccatccgttacagggacaccatggaacaagaacgcgtggccatagaccaattacatgatatcctgagaaaaaagacagatcttcgggaaattctaaaagaagtcaaaatataatgctggagcgatttccgattctgcgatttatgatccttttaaatcacagaatcgggaatcacttcatctaaaaatcataaaatccactatctccttaacttttacttttccttccccgtatatagtgttactaaattaaccaattaatttgtaacgctatgaaaaaattgacattgctattgttgatagccatttcttgtggattctacacgggggtacgagcacaagtcaacgtgacttccgtctcggaaaaaaatgatgcggacaacttctacaaaatgatgaaagaggctttcccgctatcattcaatgacccagcatctccaagattcgtgtttttcaacaagaataaaaacttcgttttcggtgtggggggattcgtgcaagtacaggggatttacgattttaacggagttcccaatgacaattattttaccacaaacaccattgttcttaaaggagaacaatccgggggtagatatggtatttctgtcgggcagtcccgcctattcttcaaattagtcggggacacggatgtcggtagactggtcacctacatggaaatggaattcgagggtaaccagagcaccccaattctaagacaagcctttatcaaatttaaaggcttcacgatcggtaagacatggagtacattctgtgatattgccgcaggcccggccacggtggacgaggaaggtccttccagcgaggtggcattacgccagccgcagattcgttacacgtatgattttactgacaagctggaagcatccttggcattggagtacgtggagccatcctacacggaaggagaatttaccaagtacatcaaccaacgaattccggacatcccggtcaacgtgaagtacagtttcaaaaacgggagtcacctgcaagcgggagccgtgttgagaaatatgtattataaagatgaaattgaggataaagaccggatcgttaccggttggggagcctcgttgagcggtatctggcaatttgcccaaaatacatccctctgtttccaaggagtatacgggaaaggaatctccaattacatacaggacatttccggtacggggcttgacctcgttcccaatgccacggcagaagggaaattgaaagcttttggcgcatggggtggctacatcggattctctcacaactggagcaaggtactgacatcaaacatcatgtacagctacgcccgggtccttgatcgctacgggatgcccacgacatcatacaaatacgcacaatacgccgccgccaacctgttctgggatttcagtgaatacggttcttgcgccatagagtacgtgttcggtcgccggaatgacttcaacaaagattacggtaacgccagccgtatcaacacgatgatacaataccggttctaaaatcagcaccaagaagtacgaatatattttaatcgggaaagggattattccaaaataatggataatcccttttctatattgtcagatttgtcgtcctcaatcccatttactcgtgtttcttcacttcaactttacgagccttctccgtgtaaatatccttttgatccaccgacatatccttaccctctccaaacgtactcatccggtcggctgaaatgcctttgcctatcaagtaggttttcaacgcctctgcccgtttcaaggataacggcaggttcacccgatcggtacccgtgtgatccgtgtaaccccgaatgtcaaccttcacgcccgggaactcctttaacgtctccacgatacgagacagttctccggcataacgcgccgtgtcaatgaccgccaaattacgcttgaaatggattgtcggtaattccgggaatgttttctccactgcctccaccttcaccacgttctctattgtcttctcctcttgcttgacaaccggtttttgctcctccttcaccaccggacgagtctcctctttcacgggaactattaccggggcagcggaacgagcagccgcgtacatcaggttctctttcttcttgttgttaccgatcttccacaccaccccaacagagagattc

SEQ ID NO: 10720 - DNA, 189 bp, Unknown
  gut microbiota DNA sequence
ccttgatatcgtgggaatcgttgatcccacgggtatagcggatgccttgagtgcctctctttacgctcaacagggggaccttgtgaacgcgatggtaagcggagtggggttgattccttacctgggcgattttgccaagatgttcaggatgaagaatcacttcaagattcttagcatggcggtggagag

SEQ ID NO: 10721 - DNA, 97885 bp, Unknown
  gut microbiota DNA sequence
ctattgatatctatgggtaagataaataaaggcgtgcaatattttcgtttataaacgaaaatgattatatccatgcaaatatttatgttgtggacaaaaaaattgcattattaaggtggttataacttcgagggctgattctatagatttacacgacaaacgaagtactgcacggataacattgccggatatatcgaagacgcttttcttaataagtccgttcagatgaattttcctgtcattcggatgataaatgagtgtgttcggatagaatgattggtaacgggcgttctggggtgtacttttggtgtatcaaatttaaaaacagaagattatgggtgtattacagaacgtgattagggagatcggtgacatcgtgaaccggttgtcggtttcttcgaaggagaaacagaagattcaggaggaaatacagtctttagtgtatcgttacaagagtgagttggtgcgggaacagtcggcggcggtgggggaagaagcccggggaaattggttgcagaggtcttggcggcctatcgtgatgttggcgtttgcgttggtgattttgtcggggatgttcatggaatcgacgttattgtccgacagttcccgtttgtgggatttgctggagatcgggctcgggggatacgtgataggaagaagcggggagaaggtaacagagagtttgttgtcaaggaaatggaaataaaacgtgatgtcatggaaattattgagaatttgttgttcggggagaacgtgacgtatttgcagtgttcgaagtgtaaagtaaagttgtttagcgtggatactattgttttacacggaacggtcggggcagggacgatttcatcggcactttatttgtgtaggccggacacgagtgtttccgctcacgtggtggttggaagggatgcggagattttccagttgttaccttttgacgtgaaggcttggcacgccgggcggagttttcatgccgggcgggtgaacttgaatgattgttcgatcgggatcgagctggataatgccggggagttacaacgtgtgggagatcgatattattcgtgtttcgggcgggaatattctcccgatcaggtgtacacgacggaagaagggggaagggcgagatactggcattcttttaccgaggggcagtttgcaattacggaggagatctgtcgtttgttgaaagcgtgttacgggatcaaatacttggtgagacactcggacatcacccctcgaaagacggatccggggccggcgtttcccttcgatgagttgagaaaaaggttgaagttttagtaatgaagaaaggaggtaagtatggcttgttgttattcaaatctgtttaatcgtttgtcggggcgggtgggacgtgttatttactatcaggtaggggatcatctttacgcgagagctgccccgggaaaggtgaaggattgtcgttcggagttacaattgtattaccgggagaggatgaggaagacggcgactttttacggggtgatccggcaaacatggctggcccggatttggcagatgttgggcgtggtggaacgtcgctcgggatatactcttttcctgcaagctaacatgcgggcgtttaacggggaggggttgctgtatgatctcgtgcatttcagtgcagggaacttgtttttaccgagagagttgcagggatgccgggagggcgataaggttcgcctgacgtggaagaatgaaaacgtggtacgggaagaacgtttaggggacgagttgtggtgcgtggtgatgatggaagacatgaggtttcggattgtaactcccgaggcgatcgggagtgttcgtcgggatgagagtgcggagattgaactctcggaagagcgggggaagaggattcacttgtattgttttttcggttcgataaacaggtgtgatttttcggagaatttgcatttagtattgtgatttatatgtttcattttaaattttaagattatggctttatttaaatcatttgtattgggggaagtgagaaaatcagtggcaaatatcacgatgtactcgggtgcaaacgggtatagtattgcccggggaaagagaagcacgatgcgtaatcccaaaactcccgggcagttggcgcaacgggcgaagatgaaagcgttacaaaaggtttcgctgtattttgctccggcggcagaattcggtttcccgggaagaaaggcgggaagtacgttttataacgccttcgtgaaagcgaatatgcaagccgttacggttgacgaggagtataatcccacgattgattatgagaaaatcgtgtgtgctgaggggagcctgcaggatggaacgctggccgtgtcgttgaacgaagatcaggatatgataacgattactcaggaggcacaaagtcgttggtcggtggtggcgaacccgacagacgtgttgtacgtggtggtttacgagaaaacgggaaaccaaatgatcgtggagccttgccggaatcgtcaggaaaatggggtgacgacgattagtttggatagtggctgggtgaaagagaatttggaggtgtatgctttcatgttgtcgaaagataagaggaaagcttcgaagagtaaacgattgacgattaatagttgaaagtgaatgaaatgacaaatggcacccttttcagagtgccattttttatatcatgaaaaatgaattacatgaggaagtgatcactgatcgatttatgctcgtagatgttgcggatcgtgtcggcaaacatgggagcgatcggtaatactttaatttttgagcaaggttgtttctggggaatggaatcggtgaagattacttccgtcagttttgatttctcgatattttcgtatgccttaccggaaagaactgcatgggtggccacggcacgtacgctggcagcaccattgtcgataagcatatcggctgctttgcaaattgttccggccgtatcgatcatgtcgtcaacaacgatgatatttttgccctctacatccccgatcactttcatgtcggcaacctcatttgcccggatacgggttttgtggcagatgatcaaccctgaatcaaagtattttgcccaggaatttgctcttttggctccaccgatgtctggggaggcaatggcaaaatcacgtaatcctaaagatttgatgtaaggaatcaacacggtagaaccgtataggtgatccacgggaacatcgaagaatccttgaatttggtcggcgtgtaaatccatggtgataatccggtcaaccccggcagcttgtagcatattagccactagttttgccccgatggcgacacgcggtttatctttccggtcttgacgcgcaaacccgaaataggggattacggcgattaccttgtaggcggatgctcttttggcggcatcgatcatcaagagtaattccatgaggttatcactgggcgggaaggttgattgcacgataaatacatgctcgcctctcaccgtttcgtcgaatgaggtgacgaattctccgtcactaaatctcgtaaacgtttttttaccgagttccagccctagagaactagcaatactttctgcaatatattgactattctctccggcgaaaactttaatttcgggaagatttgacatatctaattcattagttgaaacacttggcaaaagtatgaaattattttgttccaccaaaggaatttagcggaacagttgtttgatcccttcgtctgaaaatgttatatttgttccaacaaagatgttgttggaatggttatttgtaactatgtgcagtatgtttattttattaatcaatatattttcaaatagatggaagaaatcaaaaagtacgtggaagagaacaaggaacgcttcttgaacgagttgttcgagttgattcgtattccttcaatttcttcattgtctgagcataagccagatatgtatcgttgtgccgagcaatggacgaaaatcatgttagctgccggagcggaccgggcagaagtgtatgaaacagagggtaatccggttgcttacggggagaagatcattgatccggctcttcctacggtgttggtgtacgggcatatggacgtgatgccggttgacccgatcgagttgtggaacacgaaacctttcgagccggttattaaagatggtaagatttgggctcgcggggctgacgatgataaaggacaggctttcatgcacgcgaaagcatttgaatatttaatgaaatccgggaaattgaactgtaacgtgaagttcatgatcgagggagaagaggaaatcggttccccgagtctccccaagttctgccgggatcataaggatatgttgaaagctgatgtgattctggtttccgataccagtatgattggccgtgatattccttcaattacgacgggattgagaggtttggcttactggcaggttgaagttaccggtccgaatgctgatttgcattccggtattttcggaggtgcggtggcaaacccgattaacgtgttgtgtaagatgattgccgatatgcaggatgagaaggggcatatcacgatacccggattctatgatgacgtgttggaagtaagtgctgaagaacgtgccaagatggcgaaggctccttttgatttggagaattacaaaaaatctttagacattaaggaggtgaagggcgaagaaggattcacgaccaatgagcgtacgggtattcgtccgacgtttgacgtgtgtggtatttggggtggttacacgggagaaggtgctaagaccgtattgccttccaaggcatacgccaagattagttgccgtttggtgccgaatcagaaacacgagaagattgcgaaattgttcaaagaatatttcgagtctatcgctccggattacgtgaaggtgaaagtggattacctgcatggcggaccttcttacgtgtgcccgattgatctcccggcttacaaggctgccgagaaagcatacgaggaggtgtatggaaaacaacccgttccggttcgttccggtggtagtattccaattattgccactttcgaggaagtgttgggaatcaagtctgtactgatgggcttcggtttgggttctgatgctatccattccccgaacgagaattatccgttagagcaattctttaatggaatcacgacaattccgttattctacaagtatttcggagagatcatgaagaaataaattttgtagtcaataatttagactcccctcattttgcggttgtaaggtgaggggaattttattattgtctagaatccattgtttggaatgcgtggaagcgggttttacgtccaccgccttcgacggagaattgttccgtgtgctgggagccgtttcgggcattcaagcggagcgtgaggttattcgttccggcggataagggcagacgagtgtaggagatggaataaggtagtgtttgccagttgcgggtgtcggctttttcggtgaggctgttagcgataccgacggcgaagcccaaccattcgttttgcttgcgggcggagtattctaggccttttttggctgccacccggaggagggaatttgaaaattcccgtaccattcggtctcgtaaggtcttgaatgcgatctcattgatattctcggcgagttccagcgggtacgagtgattgccggttacgagagttcccgtggcgtaaagcgggggacgttccatgtattttgggaacgcgacacgcaaggtttgcagatcggcaatacttcgtttttcatcatcgctgtatcccgagccaaagaagaaagggaaggtaagcccgagggattcgttgtgaaatacaatcgccccgtctcctcttttttgtttggcgaagtttatgctccattcagcctttaccggtcccatgccgttcagccagaaaaacacgagttgtccattcgcgggcgtcggggtatgggtgtatgtcgtgttaaactctttctcgtattgtttcaattctgcggagaaaccgcaaatataggcggtacgcatcaagtcctgttttagttgttccggggcctttacgccgaagtttttaatatagtcggactggtagacctcgtaggcatttcgataggcgataaacgcattattgtaatctcccgtggcgtcatagatcaggcccattaataaatgggcgaaagcatctcgttgataccggttcttgttatcggggtacttgtcgtttagctggttgagtttgatattgattttgcgaacctcgaccaaggctccttccatgtcattcagatcgatatagttcaaggccttgtagaagttaatcatgatgatttcaaagtcttccggtcggtagggacgtgtttccgggttggtaaccaatgctgcagcttcagtcccgacattactgtgatactcgtcaatcaagttttcggcggtctcgaagtattgattactgttggtgggattgccgagcatgaattccacgtatcctttgttgagataatagaggatgcggtttttacccgtggcttgttttttatctttatctagaagtttgtttgctttctcgaaatttcccgagttgacggctgcttggaactctgccgttcgctggtaccaagtagcgcatccggagaaaagaaaaacgagaagaacaattaaaaattgaaaattacgaattgaaaataaatgatttaccttctccaagcctccttctttgggaaggggagatccgatgcatgagcattctttccttttattaagggatgttggagaaggtaacgatattttcatccgtttgaatgtctctatattacagaacccggtcgctgatttgtttcttgatcttcttgtcacccatccagacaacctcattggtctcgatgttcgtgagttgcaggtcgatttgataagtcacgactttttgtttcttgtacgagtcgacgatgctgttgattgtcccttgcaagatgaaatcggcacccagttcttttccccacttcttggtggtttccggtgatgcgtaatcttgttgctcggctctttcttttcgaagttcattccgtttctctccggcaacaaccaaacgaatgttaccatcccggataatcgctttttctacatctttaatgaaggtttccgagttgatatgttcgtgacttttgttctccacgagaccgaccaccaccacggggcgtttgtcgtttgcttttaagtatcttggaatccaggctgaagtaagcaggtcaccgatcatttcttcggaaacaagccgtgagtcactatcattccaacgtccgctaaggtcgatggtttcattcgggtctacccgtgtgattttccggttagcacatccgttaattaaagcaatggttaacacaacaagtgttccgataaatattcttctcatattccgttgttttaggtttctattcaatttccacgatcacattttgtgttcttgtaaaagtttataacaataattctaccaaatatacgtattacacagttttatggatgttaattagatttaaaattgatgaggcggccgatcattatgccggaatgtgacgtgattcgttgtaagtaatcggggagtgtttctgtcgtgatggacacttttttgtcggaaaacgaggcgtggagcaggtatatttgtccttcgttttcaatggcaatacccacgtgagccgtgtcaagtccttttttcttcgtggtgatcagtataatatccccggttttgatttggcccgcgaaaggaagtactttttctttcgggatatagtaatatgccctgccgttaatagttttttcaatatcaattatttttgtaacaagggtggaatcctgtattagggccgggtactttttccagttttgggagatgaaggataccttgttggggaaggggatacctcctttttctttcgtgatgtcttccagaaagttcaggcaggtcatctcgtataaccagtcggaagagtaatgcaggcgtgacgtgtagtcaactatctttccgttccggtaccgaatttcttgtaaattcctttggaattgaggaatactttgttcttcatatttatctaggcgtgccagggcgatgacattatcgacgaaagtcacgcaatcaaattcccgcaggttgacaaccagctcctcctggggattgatgtccaacgttcctcccacgtaaggcgtttcgagaaaatagcgtccgatggcgacaactttctcgttgatcgggagtttggctatttcctttttattggcgtattcaaagaaatgttttagtaaagtttgatctttccggtacacggaatcaacgggagagcaagcgaaagccccgaatgaaaaggtaatcaggaatagaaggactaaattcttcatagtaaccaattttgagaataaaaaatgaggagtcgtgtgaccgacatcctcatctctcttgtgttgtgtttatatattatttgcctgcggccgaaaactgttcaaggaaacggatgtcgttttcgaaaaagagacgtatatctttaatgccgtattttagcatggtgatacgttcgatacccataccgagtgcgaacccggtatatttttccttatctataccatttaattccaaaacattggggtcaaccattccacatccgaggatttccaaccatccggttcctttacaaacattgcagccttttccgtgacatagtgtacatgatacgtccatttctgccgatggttccgtgaaggggaagtatgacggacgaagacgaatttgcgtgtccggtccgaatagttctttcgcgaaataggtcaaggtttgctttaagtcggcgaaggaaacgttctcgtcgatgtaaagagcttcgatttggtggaagatacaatgtgcccgggccgagatagcctcgttacggaacactcttccgggagtaactaatcggatcgggggacgatgagcctccatgtctcgcacttgcacggatgaggtatgcgtgtgtagcacgatgtccgggttcttactgataaagaatgtatcctgcatatcacgtgccgggtgttcttccgggaagttcaacgcggagaagttatgccagtcgtcctcgatttccggtccctcggaaattgtgaatccaagtttattgaagatggccagaatctcgtttttcacgatggctaacgggtgacgggttcctagttttaaaggatctcccggcatcgtcaagtcaataccgcttaaatcttcttccgcgttagaaagtaactctttcaactcgttgatttttgccagagccgtgttcttcaattcatttaattcctgtcccatggcttttttctgatccgcgggaacggttttaaaatcatcaaagagagctgcgatcgttcctttcttgcttaaatgcttgattctgaactgttctacttcttctaggcttttcgcctggaaaccggctatttcagcactgagttgtttaatcttgtctaacatcttctcaaaatttgaaatctttggtggacaaagttaataaaaaagtctcatacatttcaattctttcgagaacttcatttttcatcccaaatatttttcatcgtgtacggtccgttggggaaaatccaagccgaaccatcagtcatccgggtgtgtgagtcaagggtggcaattttggtcatatcttctggtgaaatattgatgtccagtgatttaatgttttctttgattcgctccgggtgaactgattttgggataatcacgattcctcgttgtactccccaagcaatgataatttgtgccggtgtgcaattatatttttttgctaaattgataataatcggttcattggtcaggccgggtttgtttttgatgggtaaattacgtccgagaggggaataagccgtcaagtaaattccttcagactgacagaattgaaataattcattttgttgcaagtaaggatgcatctctacctggttcatttcgggtttattttttgccacggcgatcagttctttcaatttcgggatgctgaaattcgaaaccccgatatgtttgcatagcccttttgcctgcatttgttccatcgctttccaagtctccgtaaggggacattcttcgagggaaagtaagtcggatgcttgttgcgggtattcgatgtcgtgtttcagcgctatcggccaatgaatcaagtataggtccaggtagtctagccggagatcgagcaacgtctttcgaagagcctcttccacgtgttccggggcatggttattattccataatttggacgtgatgaaaagttcttcccgtttcacgagtccggacgtgaatgtttcttgtagagcagccccgatgatttcttcatttttataataggcggcacagtcaatcagcctgtacccgtctttcagcgcgctaatgatggcgtcgtgtagttcgtttgctttggattgataggttcctaacccgaagaggggcatggggtccccgtttctaaatgtaattgttttcatatttatgaatctttatattccattttagtgaacgagattttccccggggtggttatacttctttccggctttttagtttcttgtatagataatcaacaagtttgtctttctgttttttcgccgtggggtatagcaggcaacccaccactcccccgagaacgtcggcaaacagatcccaccagtctccgccccggttgaaatatttgaattgcataacttcgataagtcctccatagatgaaactgaacccgatggcgatcagatagattttttgtagagacaatcgagtctgatagcggagttcgctgcacaggaatattgacatgataaagaacattccgaagtgtaccaccttgtcaaggtgggggatatttaatttcggatcaggaatcgagtcggatggaatagcgcataagaaaaagattactccagcccagatgatattcctccataataaggagtatttgcgtggtatcatgttattctattatttttacactgattattctgacgtctttgaacgggcggtcctgcctgtccgtgggaagagcggcaattttatccagaacatcgaaaccttcgatcagttctccgaaaaccgtgtactctttatccaaatggtggaccccgcctatcgtggtatatgcctttcttttttcatcatccatgtagagcttgtccgtgttgttttcccattcgaaattgatgtccgatttgatcttttccgcgatagcccggaactcaggtactttcttttgcgccctcaaagtgtcaagaatggcttttttctctggggtataatacttcttctggatggcttttttaatcgggttgtttattgatttctcgattttgtccagttcttccggcgtgtattttttaccgaccacgaaatagaattgggcgatatccgattctttgaagacatttacccggtccggttggcggggagcggctaaggctccttttttgtgataatggtgtggtttgatctctgcgtcaatcgtgacccctttaccgtagccgatagcttgtccggcaatagcatttcgactgtcggaagagcctccctgtaccacgaaatttttgacaacacgatagaataatgtcccgttataatggccggattttgccaaccggataaaattgtcccggtgcaagggggtatcgttgtatagtttcgcttttaagtttcccatatttgtttcgattaaaacaacaggctctttctcctgacttttcgaggtcaaggggagtagggtgagcgttagggataaaagtgagagcgttaaaagtttatacatggcgtgatccttatttatgatttgacgattttgttcacgaggtattttaccgggaaatgcgaggccaggtaaccgatagcaattaccgtgatcatgataatcaaaatatccgatgcgatgactttcaccgggtacgcgctgacgatgtagcttccgttgccgagagtgatgaacccgtagtattcttgtagcaggcataatatggtccctaatgccagaccgatcaatgctccgaatccggtaatcaggttaccttcaagcttgaaaatcgagattattttttctttggtcatccctagggcttgataaatcccgatgtcttcttttttgtcaataattagcatcgatacggaaccgataatattgaaggaggcgattaacaggataaataacaagatcagaaagacggccagtttttccgatttcatcatggcatagaaggaacggtttaagtcatatttgttctcgattttgtatgtcggttgtatttggacggatagtttttcttttaatgattctatctgattggggtcttttaattttatctctattttggagatttgtcccggaaccccgaacaactcccttgctgtttctattccggtgatcacgtatttaccgtcaatatcttgctgtgcggagaatatcccgagcgggtatattttctggctgtttagtgcagagtttgatgcggaagacgcttttcgatctgggtagtagaatgtaacgggagagagcgttcctagtctgatttttaaagcagccgcaatgccatagcccatgacgacggccggtttatcgtctttttcgagcgagtagataccactaacaatagaaggatgtatattcacgtgttcggcataagtcgagtctactcctttcacgaccaccgggattaatttatctccgaatttcacaagagaattttcttccacgacgggatcacaggaagagatttccggcatacgggccagcttatcaattaaaatagtgtctgtcgtgatgaatttcccttttgccggggaaatcgtgagatccggggtaaagctgtcggttgcttctgtgaggagtgtgtcgattccgttgaacacggagagtacgacaataagagccgttgtgccaatcgctacaccgaccatactaatgatggaaatgatgtttatggcattctgtttctttttggaaaacaggtatctccgtgcaatgaatatcgacagattcatcgtggatacaggttattgtttcaacagggaatcgattttatctatgtaatcgagactgtcatccacgaaaaatttaagctccggaatgattcgtgtctgtttgccgatcttttttccgaggataaaacggatacttttgtttttttctgccaagctctccagtaccttttccgtcaggttcgaagggaagatactaaggtaaaccctagcatatgacatatccgggctaactcgtactgctgtaacggataacatggcacctacggtgaattctttacactctttctgaaacatttcactgaggtctcgttggattaagcgaccaaccttattttgtctaattgagtccattctgaagaaaaatattttatacaataaaattttttacaaatatagtgattataattgatacttttattatctttgccctcgcaaaacggaaacgagatgtagcgcagttggtagcgcgccacgttcgggacgtggaggccgctggttcaagtccagtcatctcgaccatttaacaagagttctgaatttcaggactcttgttatttttagagttccctgttttcattgaaatttcaacaatccttctccgtttactttttcatcgtgaaatgtgttgatagttcgtcagccggataaaaacctgtgtggcggaagaactcttttcccttcctgtcaagtagtatttgggtgggaattgtggcgaccccgtagtattcgaagaatcttttgctctcgggttccattaagtttataaaaactacatttactttccctttgtattcggtttttattttctccatgacttcttccatttggcggcaggagtgacagcctgtggagccaaattcaatgaacgtgtaatcgtaagtttccccgttatgatgatagttgtatttttgggcaatcgagtcgctgatactttttttggtgttggcggataattgttcgatcttactttgcgagatgtaggtggcaatgtctttgtgaaagattatgagagaaaggaacatcaagatgataagtgcgaccggtatgtatgttttgtattctttcatgattatatctttgaaaagattttataatggagactatttgttcgtaaatttacgaataatattcatgcgagtcaaatgttattgaaatatttttatggaatgatgggagtgtgttgacaacgaggaacggggaagtaaacgttctttgaagggaggataaccactgaaccctttgttttatgaagagaaagaattcagtgattgtatattgtcggttattattttaagctttttgaagttgcacgtttggctaatttaaaacggatggcttttctttccgggagttggacaactattttcgaagctggattatagcctttgcgtggtttgtaagtctttacggtaaagctaccaaaattcattaaccgtaccgattcttctttttccagactttctaaaatagtctcgaaaatggaagaaaatacttttgccgtgtcttttcgtgatatgccggttttctctgtcacggctttaattatttgttgcctgttcatgcttttttattttagatttatagtgtaacaaagttatgtattaaaaaaacaggaaacaaataaatgtgtataaatcgctcctaaatagttgaactaacaattttaagaatacttaatgtaggatattcttctgccaggtagatcctttgggtttagagtattactttttttcgtatcttgcgttgtgattttatgatatgatagatattcaggttaagttgcatgatcggtactccgtggaatgtaaggttggttaccatgtcgatcgggacacgggggagaacgagttcaggatgaacgcgtggtttttcattcctcatagtttggatattaatgcctcgacttatcccaaggaggctttttatcgggatgtgaagtccaacgtgcgtttgatcaccccgatctacacgttggaggagattgcgagtggcgaatggacgcctttcgttttcttggaggatgcattccagcatttggtggcggatgggacgagggatgcgttagcctcttacgagtaccagatcaagatgtttacatccatttttaaaagtgcccttcgggggatggcgggagagacgattcatcatgaggtggaaagtggtgaacgggaaggaatggtcgatcggtatgttgaatgcgtgcaattgattgtgagacggtaccgggatttgaaggccattattaacgtgccggaaattccccgggaagcgttgaattatttctctttcggggatgagtatctttccaatctggtggagtttcatacgttcaagttactggacgggttaaagacgactgatctggggtgttatgatcggacggtgaagttattgttgtctttggtatattcggaggttgattacaagaaacagaacggttatctcgtggcagatccggagagtaaggatcggaatcagacggtgatctatcggcgggggatgctgaagaaatatgcggagagtgatttgttcttgaaggcatcgaagaaaaaagatggagtactggtggagcagatatattatagtattgcggcaggactttctatgatatttgccacggtggtcgctttttcatttcagaaaaaatacgggaatttcacaatgccgttgttcgtggctttggtggtgagctatatgctgaaggaccggattaaggaattgatgcgtttttactttgcccatcggctggggaagaactattttgaccggaagacaacgatcagtatgaacgagagagtggttgggtggatcaaggacggggtggattttatctcggaaagaaaagtcccggaggaaattgtcgagcgaagagcccggccggatttgttggaggcggataatcggaatggcggggagaaaattattctttaccggaaatgggtgcaactcgatcctgaggcgcttgacgaatatagccagtatgatattgccggggtgaacgagattttgcgttttaacgtggggagtttcgttcagaaaatggacgaacgggactatgagttatacgtgccgaggggagaggcggattacggtctgatcatgggagacaagatatattaccttaatttcttgatacaattgctacatggggagcaggttgaatacaagcgttaccgtttggtgataaatcgggacggtattcaggagatccagaaaatgtgaggttgtttgacggaattgttattctgcttggcatgatgccggggagcatgaaatctaatggctaaaatcgtgaaatcctaggcgattaagcatataatattgaaaatatattgtagctttgccggacaatcaatcttaatgagcttatagaatagaaatgagaaaatggagtattgacgattcagcagaactgtacaatattaacggttgggggctgaactatttttcgattaacgagaagggacacgttacagtaacgccgaaagtcggaggaccgaaaattgacatcaaggaattgatggaggaacttcaggtgcgggatgtatcggctcccgtgttgttaaggttcccggacatccttgataaccggatcgagaaaatctctagttgttttcaagctgcggcaacggaatatggttacacggggaaaaattttatcatttatcctattaaagtgaaccaaatgcgcccggtggtggaagagattgtcagccacgggaccaagtataacattggtcttgaggcaggctcgaaaccggaattacatgcggtgttgtcgattgatattgacgacgatgcgatgatcatttgcaacggttacaaggacgaaaattatatcgagttggctcttttggcccagaaaatgggacgaaatatatacttggttgtcgagaaattgaacgaattgagaaatattgcgacaatctccaaacgcttgaaaattcgcccgaatataggaattcgtataaaactggctagttctgggagtggtaagtgggaagagtccggaggagatgtcagtaaattcggagtaaattcgagcgagttactggaagccatggatattctggaaaagaacaagatgacggattgcttgaagttaatccatttccatattggtagccaggtgaccaatatacggcgtattaagacggcattgaaggaagcctctcagttttacgtgcaattgaagaatttaggatacaatatacattttgtggatattggtgggggattaggagtagactacgatggaacacgctcggcaacgagcggaaacagcatgaactactcgattcaggagtacgtgaatgatgccgtgtccgcgttggtagatgcatgtgaaaagaataatctggagcaaccgaatattatcaccgagtcgggacgttctctgactgcacatcactccgtgttgattttcgaggcgcttgccagtacaagtctgcccgctttcgatgaaaacgaggaaatcgacgggaatgctcacgagctagtgaaagagttgtatgatttatgggagaacctgaatcagccccggttgatcgagacatggcatgatgccatgcagattcgggaagatgctctcggtttgtttaatcttggcttgatcgatttgttcacccgtgcgcaagtggaacggttgttctggtccgtggctagggacgtgtatgacatggcagtggccacgaaacatgccccggacgagttgaagaaaatctccaagatgttgccggataaatatttctgtaatttctcgttattccagtctttgcctgattcatgggcaatcgaccagatcttcccgattataccgatttctcgtttgaacgagcagccgactaaatcggcaacaattcaggatattacctgtgattctgacgggaagattgataattttatctcgacgcgtaatttctcgtaccatcttccggtacacgagttgaataataaggaaccgtattatttaggagtattcctcgtgggagcctaccaagagattcttggtgacctgcataacctgttcggagacacgaatgccgtccacatcaaagtgaaaggtgatgattacgtgatcgacaaggtgattgaaggggagacggtggctgatgtgttggagtacgttcaatttatgccgaaaagaatggctcgtacggtagaggtgtgggtaacttcttccgtgaaaaagggaattatctcggcagaagaaggacgggagtttttgtccaattaccgttccggattgtacgggtatacctatttggaataatttgatagataataataaaataaagaggtcgtgccgaatttgttaaaatgaatcaggtacgatctttttttgtaaattttctgtcatacaagtgttaacgtgaatttcactcaatcagataatcagcatgttaataaaaacctaatttttaacactattaaattttacgcaaatgtttgcgggtaaaaaaagatttgctagtttagcatcggtgaaagaaaaaaggcctcgtgctgtcacagcaggaggcaaccaataacaaatttatgaaaaaaaattgaagtcttttcttgaaatccgatacaaaggtatcggcttttctttatatacaaaaaaattagtagttaaatttctgttatatcgattaattttcgatacacacgtttatatacgaatacagggagacaaaagttaggatttatgctaaaataaaaatggtccgcgctgtctcagcggggacccaaaataccaataacaaatttatgaaaaaaaatcgaagtctcttttgaattacgatacaaaggtatcggtttttcatcgtaaccttgtcacttatgtattaagtttcggttacactatgattacattcaaaatatatgcctatatacggcacatgaacgtaaaggtttcataattaatcaaaattaattcttaattgtaaagggccatcggtgattaattcttcgaaaggatttgacacagagagacctagaaggcgtattctaaattgcgtaagttctaaatctttgagtaattttttggctaggggaagaatatcctgttttgttcgtaactcgtgtgccatagtgatactacgtgtcttttgggtaaaatcgtggaatttgattttcaaggttagggtatgtcctttgaaatcagacttttctagccggagaattaattctgttgtcacgtggtacagttctatgatgacagcgatatagttcgtcaagtcattctcgaaagtactttcacagcctacggatttacgggttctttcgggggtaaccattctgggatcgatgccattggcaaaatcgtgatatagggtaccggctttcccgaaattgcgggtaaggaatgtctgtgtacatttcttgaggtcagcccccgtgtgtatgcctagtgagtgcattttacgagccgtgactttgccgataccccagaatgcctcgatcgggagtttggagataaaagcgggggcccggtttgggtgtatggtgtaaagcccgtcgggtttcttgtaatcagatgcaatcttggcgaggaatttattgtaagagatcccggcggaggccacgagccctagtttttctttaatctctttcttgatttctctggcgacatcgacggctaacgggatgttttttttgttctcggtcacgtctaggaaagcctcatcgagtgccaggggttcgatcatgtccgtgtattcgtggaatatttcgtgaatctgcatagataccgatttatagtattccatgtgagaaccaacgaaaatgaggtcgggacaaagctgtttggctttcagggacgacatggcagagcgtatgccataacggcgtgcctcgtagctggcggcagccacgaccccgcgtttctccggacgccccacgacaagcggttttcccctgtattccgggtgatcccgttgttctatagaggcgtagaacgcatccatgtcgatatgaataatttttctgttttccatctcccgtttcgatgagtaaatatacagctttctcttgaattttgattgtatatgtcgggcgattaatgtagaagaggtggggaaattttcctcagcttaaacgtggagatattcctcgatcgggtaaaagaaagagggaaactttcgcttccctcttgtgtaattatttttggaataatttgttccagtttttgtattctctctctttccaaggtccgttgtggtaaacgtaacttgcaatagcgggaataacggtggttccttcagcgtaaaccatttgttcgtaggtaacgtcaactttaccccaagagcaagcctctttcaaggtagaagaagagcaagccccgtcacgaacgtcggccacggtgatctggatagcgtatttgtgcatcggcacgtcgaatccgagaatctcagcacaaacaacagtgtcttgagcgaagttcttcggtgttccaccacctaccataaacaaaccggtcgtgcctgctttgatcttgatttgggtcaattcgataaaatcttttacagagtcgatagatacatgtttgtcggggtgttcccattggtgtttaccgataccgaatcctgcgctacaatcggagaaagccgggcagaagataggcactccgcattcataacaagtttggatcaagctgtctttcttaacagcgtgtccttcgtgtaaccatttaccgatttcccagataaattcacgtgaagaataaggacgaggttccaagctattagcgatctcgaaagtcgtgtggtcacaagcttgtaattcctcttcgtcgatgaacgtatcgtaaatacggtcaatgtaaagttctcttaattgcatgtcaggtacgtcctggtgtcccttgtagtgtttgtagccaagagcctcgaacaagtccatgtcgatgatagacgcaccggtggaaacaaccacgtcaaccattttgttacgaaccatatccacgtaaacctgcatacatccggctgcactggtgcttccggcaatggtaagaatattagtacactctttctctccgaccatcatcatcagaatatcggttgctctggccgtgtcgcgagaggtgaatgacatatcgcgcatcgcgtcgatcaattgggttgagtcatacgacttgatgtcgatgtgtttgatagtgtcttttaataaatctttcttttccattttatttatcttaaaaatataaggtacaattatgaggaccttattgactcaatttcttaatttagatttcagattgtagattcgtgcgtgtaaatcttccgctttttgaatcataaatcgtcaatcataaaccatcagttatttgcttggttttgatattttatgctcaatatctggtaaatcagtttgctagccaaaaagtcagatgatttgttgacttcgttggggcaaagttctaccacgtccaaaccgacaatgttgtgacgttcgttgatcaatttcaagaagttcagcacttctctgtaatagagtccgtccggttccggggttcctgtagccggaaggatagccgggtcgaaaacgtcaaggtcaatcgtgatatacacgttgtcatgtaatttttgggacaccatgtacatccagttgttaccttctttggcatcatgtaaatcgtgagcatagaaaatacggtccggcatgatgttctctttttcttcgatggctgaacttctgattcctacttgagccacggtggccacttctttggcccgggccatcacgcaggcgtggttatgagtggaaccttcgtattcgctacgcatatcggaatgtgcatccagttgtaaaacagagaatttgtcatagtgtttggcaaaagcccggaaagcaccgatactaacggaatgctctcctcccaggatcaccgggaactttttgtcggttaatatcttgtcaacttgtttttcaacttcctgagacatggcttccggagatgaggcctctgtcactggttccaaggttgcgataccatgagtatacacttcggaatccgtttcaatatcgtagagttccatgttagccgatgcttcaagaatagcattgggacctttatctgcccctttcaaccacgtgcttgtcccgtcataaggtacaggtaatactacaatctcggcagtttcgtatgccgtaaactcgctgtcgagtcctccataatttttattttccatatctaattgggtttatagtatttataaactcctttctttgtaaaaaggtttgcaaaactaacgaatataattgagaattgaaaatggaaatttgaaaatgaaaaactcattttcatgttatcattttcggttgtcagtctggctgttaacgatgtgtttcatgaactccatggtctccgttttattgatatacacaagttcccggttgcgcataatccatttcccgtttaccatactggaacggatgtttttgctattggacgcataaacgatagctgaatacacatcgtagatcgggagcatattgctggcatcggcatgaatcacgatcaggtcggcccgtttcccgacctcgagagaacccgtgaggtgatgaataccgagggcttttgccccgttaatcgtggccatacgtaatgccgttcgggcattgacggcttccgggttgtagagggagcctttgggaaggagggctgcgaagcgcatttcttccaccatatccagcgtgttgttgcttgccgtgccatcggtgccgatgctgacgttgatgcccgctttcatgtatgtatccgtgtcggcgataccactggccagtttcagattacttttcggacagtgggcaacggacgtgcgggtctgggcgtataattcaatttctttcgggttcagccagacggaatgagctgcaatcacgtttctatccaacaacccgatagagtaaaggtattcggctggagccatgccggtttgagccgtgatgtcttccacttctttacgggtttcagccacgtggatgtggagaggaatattgtatttctcggagaggactttggctttttgtagcgtctcttttgaacaggtatagggtgaatgggcgcaaatggcaggatggatcaagctgtccccgtaccattgttgaacgagggattcacagcgagccattccctcgtcgacagtgtgaaaactcggtgtcggaaagtcgatcagggattcccccacgatggcccggatacccgctttcttggcttccgaggcgatgatgtcttcaaagaaatacatatcgttgaagcacgtggttcccgatttgatcatctcgataaaagcaaagcgggaagcgatggccacgttctccggggtcaccatgcgtgcttctgccgggaaaatatgttcgtttaaccaagtgtggaggggaagatcgtcggcatacccgcgtaacatagtcatgggtacgtgagtgtgcgtgttaatgaatcccggcatcacgatcatgccttcggcgtcaaagtattcggcatcgggagattcgattttatctttgcgtatttctttaatttgattaccttctatccggatagaaccgtttttgatcaactccatgcgttcgttcatggtaatgatacaagcgttaaatataattgttgttgccatattcttgtttttatgccaaagttagtgatatttccggtcctgttttatgcgtgttgatattttctaataataaaacggatgaatcattgatttttgttcactaattggttatctttgtgaaagcaaaaatacttgttatgacagaaaaaagagaatatgttcgccaagtagtagcgtatgcaaattattttaaggatttcaaaaagactttatctcgggatactttgcgtaaaatctaccagatttttatttatataatgacattagaacaggttccagagaaatttcttaaagcagttgttggggtacatggactttttgaagttagagttgaagagggcggtaatatttatcggattttttgttgtatggatgagggtaatttggtgatattgtttaatggttttcagaaaaaaacgcagaaaacacctctcagagagatagaacgagctaaacggattatgaatgaatattttgctagtaaagacaggaaaggagaataaaatgataagtaatgatgaattgaaagcaataggatgtaccccgattgaggatttaatcacggaagattttggtgctatcgggacggaagaacgtaatgaatttgaaaatgggtgcgaggcattcattataggggagcaattaaaagcagagcgtttgaaagcgggtatgacgcaggagcaacttgcagctaagataggaacaaaaaaaagttatatttcccgtattgaaaatggacatgcagatattcagctttccacgttgtttaagatatttcaagggcttggacgtaagattagttttactataatgtaattccataaatcacctcgtttccaagctagacgagtggttaattacttcaccatatatttccgtaacataataaccgcttcccggcgtttgttgtagacggtttggagggcgatgcctagcttcgtggcgatctcttcgggtttccagccttcgaggtacatgcggatgatcgtggcgtaatcgtcgggtaggaatttgagagattcgtacagggaatggtatagctccacttgctcgatgtcctccgaaaattcgttttcaactttactttccagttcgaaacgttgctggtatcccagatgtttgattttattcttgtaggcatttttcaatgcgatgaagcagaatgtcttgatataaaggatcgaaggaaattggacagattctcgaagccatatatcggtgaaaatgtcttgtataacgtcttctgccggaacattcagggattcgaaaagccgggtggcgtataggtataattctctatatatcattcgataaacgatactgaatgcacgcgggtgacgccggttaaaagattccaaaaggattacatcgttctgttttgacatacatccaatatagatttatttgtgcaaatgtaaatcttttttgaaaaaaaacacttttctgcggtagtttttcctatctcggtttatatatgtataaaaaagtatagatatgaagactgaaaaagatatagaagaaattctggataacgtgaaaatcccttcggatgaagaggttgaggctgcgggaatgcggtttgaccgtcggatacgtcgcctgaggatgcgtcgtcgcgtgatgtgggcaacaggttctgtggcggcagttctgtgttgtgggttagtgtttacttctttgtggatgaatagaggggtaaaagaaaatctcggcgtgtcggaaatacctcgtgtccttacaacggatcatcaggttgtcgtgccgacattgattttggcggatggcaacaagttgaacctgaaggagaggaaagcggattcaacggtcgggaaatcgaatatccggattgcggatgaccgggtgatctacgataccatgcctgccgtgcgggaaatcgtgtacaacaggttgatcatccctgccgggtttacctataacgtcacccttgccgatgggacggaggtaacgctgaatgccgggagtagcttgaaatacccggaaatattcgttgggaaacaacgggaagtggaattgtcgggtgaagcctattttaacgtggccaaatcggatattcctttcgagataagtgtcggtggttcgaagatccgggtttatggcacccgtttcaacgtgaaagaacgtcctcaaaaggccatcgaaaccgttttgatcgcggggaagatcggttttaaatcccccggtcacaaggaagtccgggtcagtcccggggaattagtgtcttatgatatggtggcggcaaacgtcaaggtaaagcccgtggatgtactgtatgccacggcgtggttagacggcgtgttccgttatcgggacaagcctttggatctggtgttagaagacatttccatctggtacggggtttcttttgaatcccgggaaggactggataaaatagaagtcactatgaatctaaataaaacgacaccgatagatgaagttgtgtcgttccttgaaaaaataacaaattgcaaatttatagaagaaagggggcattacaccgtgaagtaaacatcttgaatcaaaaaaattatcccgctaggcaggataatttcacgtgaaatcgctatcgaataaaattgagcctttatcatagcgaccatcaaacagtaaatcaaatttactatttaattaattagtacgacaaatttatgcaaaaaaatcacatcggcggtattcatatcgctaaaaaaattgcgttgtgcatattcttggtatctgcgacgctaagtgctgtaccaaagagtactttcggggccacatccagtgtgtttcaggtcatccaaaagaaagtaacgatttcgatgaaaaatgccacgctggaaacaatccttgccgaaatcaatcggcagacgggccttgattacggtttccaaagtaacggatcggtagataagaaccggagattcaccttagaagtaacagatattaccgtggaagaagctctcaatacactattgaaagatagtccgtatgattatgtgttggagaaaaatcggatcgtgatagtcatccgggaaaagaaaccggtacagttgattgccgttaccgggcgagttgtggatgaaaaagggaatcctattcccggggcgacggtgcttatccagggaactacccaaggggtggccacggatgctgacggacgttacacgatcaatactcggccggaggatgctttgcggatttccttcattggttacaaaacagaggtagtgccacttaaaggcaaaacgaaattgaatgttcgtctgaaccccacggccgaaaatatcgaggaggtaaccgttgtggctttcggggagcaaaagaaagagagcgtggtttcggcgatcactaccgtggatgcaagaaccttgaagtcttcaagtagtgacttgacttcccagtttgccgggaaaatcgccggtatcgtggggtggcagacgggaggtatccccggggcgttgacagaagaagaaatgaataccaaattttacattcgtggtatcacttccttccaatccaaggctaatatcgatcccttgatcttgattgatggtgtagaatcgtccaagttggatctttctcgtatgacacctgaagatattgaaactttcagcgtgatgaaagacgcttcggcaaccgccatgtacggggctcgtggggcgaacggggttattttgattacgacaaaaaaaggacaggaaggtagtgtttacacctctgttcgttacgaggcagtattgagtatgccaacgagggagatcgaggtggtggatcccatcaattacatgaaaatgtacaatcaggcattgttggctcgtaacccggatgccaccccgcaatatagcgtggagcgcatcgaacgtaccggttctccttcctatccttcttgggtgtatccggcgaatgattggtatgacatcatgttccacgattactccattaatcatcgtgccggattgaatatccggggtggttcccggttggttcaatattacacgtccgtgaattatgtccgtgacgagggtatgttgaagaccgatcgtttgaaccagttcaagtgtaatatcgagaatagtacgttctctttccgtacgaatttgaatattgatttgagtgctggaattcggttaaacattaacacttcggcgaacttggataaataccgcggtccttatgccgatgtatcgcaggcctattatctggcttttaatgcttctccggtggattttgctccaacttatcctgcagatgagtcatctaactggccgcatcttcgttttggcgccgtggatcaaaatactaccaatccctatttgattttgcatcagggatataaggatcgtcgccgttactctgctgtggcccgtgcagagtatatacacaatctttcgactcttctcaagggattggagttacgggcttccgtttccatgaaccagacggggtactacgcgaatgcttataaaacagttccttatatgtatgctctgaaagactatgattttgaaaccggagtacatcaattaaatgctttgaatagtagtgaggcatcaaggacattgacaaaagatacagatggtcaacatacgaatagttctcaatccacgcaaatgagttacgaggtacgggggctacacgtggtggcttggggagaacatcagaccagcttgactgttgtgtttaatgcgcaggagacaacctattcacaaaccgcatccgtgttggatggtattcctaaccgaaatatgggcgtgtccatgcgcggtacttacgggtggagagacaagtattttgcagaagctagttttgggtacaacgggtccgaacgttttgccaaagatcatcaattcggattcttccccgcattaggagcggcttggattgcttccaaagagagatttcttgctgatcacaccgctcattggctttctttcttgaaatttcgtttctcgtggggtaaggtcgggaatgacggtgtgattaaaactccgcgtttcacgcatctacctttgctggataatgacagtgcgttagatccagctccaagtggaaacaatatatcaaggccttacgtggcttcttatccgaatgagaaactcacgtgggaaattgcagaacaaagtaatatcggtatcgaaaccaagttctttggtgggattgtggagctaaatgctgacatttatcaagaaattcggcataatattctggattatcgttacacgatgccctcgactactggtttggagaagccgcaaattggtaacgtgggtaaggctcgttctcggggtattgatctttcgggtaagatacaacacgcttttactccggacctttggatgattttgaacggtacgttcacgtatagtaaggccacttatagggagatcgaggaagccacgagtaagccggaatggcaacggagagaggggcatgaactgtcgcagcagatcggttacattgccgagggacttttccgtgaccaggcagagatcaacaattctcctacccaaggaggagacatcatgccgggagacattcgctaccgtgatataaacgaggatggagtcattgacgtgaatgatgccacgtatatcggattcccgacaactccccgtgtgatttacgggttcagcggtttctttaacttcaagaatattgaatttagttttgctttccagggatccgggaaacgggctttctttatgaatcctcagaatattagtccgtttgtggacaaccgagctatgttgaaagcgatttacgatgaccattggagtgcagataacatgaaggaacatcctttctggccgcgcctttccacgcaatcaataaccgcacataatcctcaggaagcatggaccggatcagaagaacgaagatcaacttattttatgcgtgaatgtagtttcttgcgttgcacttctatcgaattggcttacaatcttccgcgggaattcctgcaaagattgagaatgcaaacggtgaaattctacgcccgtgtcaataatcctttcctgatcacgaactttaaggtttgggatgtggagctgggggacaatggttttaactatccgattcaacgcacctggtcgatcgggttaaacctaagtttctaatttaaatatatacaggaatgaaaaaatatttattatcaatactttgtggtattcttctgctccccgggtgtaattaccttgatatggtgccggagaaagatattgaaacggtagaatcgctttttgaacaacgcacgaaagtagagctttggtggaaaggactttatgccgagttgaacaacatattcgccgattttagggttaatacggcttatcttggagcggatgaatttgtaacttgtcaggccctgcatagttctacattgtataatcttgacgggttaaagattgctgatggtcttcagatgtctcaaaatccttatgggtcaatatggtataggatgtatgtcgttatccgcaactgtaatattttccttgaaaatgtggaccatacctataacatgagtgaggaagatcgtaattggtggaaggcagacgtgaaagcagtaaaagcgtatgtttatttcgaattggtacgccgttatggtcccatttgtttggttcctcaaaatatgccggtagacctgccagtaaaagattatcaattacctcgccaacacgtggacacttgtttcaaagagatcattaatttattggaggaatccatggagtacgtgcctaaacatagccagaggatatccaattatggtcatacgtttagcctcgaagctgtgtatgcgttgaaagcaaaagtgctactttatgctgcctcccctcttttcaacgggaatgcgttttattccgactttaaaaacaagaatggggaattactttttaattctacttatgaccggaataaatggttattagctgcggaggccgctgataaggccgctgaaatgtgtgaggacggcggacgggctttagtctcgggtgcgaccgggaaaaagaccgatttattaaataaaatggctgatattgagaatatgtcgttttctcgctttaataattcggaatacttgttagaatggaaatacccgtctacattttaccaatttattttgccgcgattggttggtgatgacgataattttgactctcaagcgttaggttgcctttctccttctatgaaaatggtggaaatgtactacacggcgaacgggctacccattgatgccgatattacatggaattacagcaatcgttataaattagcttccgagagtagccccgtgtacgaaggtgtcgttccgatgaatatcgacgtggtgaatcttcatcttcgtcgtgaaccccggttctatgcttgtattgcgggagatcggatgtattggcaacgcggaacaaatacggcagacaaggactataattttcttgtaaaagcacataaaggagaagaaccgtggggaacgcaatatgactttattgtcagtaactcatggcagaatatcaacggttactggttgaaaaaacacctgttttcgtggttcaatactttaggatatgccaataacttacaaggaaatgaaacggcagctattatccgtcttgccgaagtctacctgatgcaggcggaggcttggaatgaatatttggagcagccggatagccgggtgtatgatccgttggacaaggtgcgcgaacgtgctggagttttacccgtgagagaagcttgggggagttattccaacaacccggtaaaagtaaccacgaaagttgggatgcgggatattattcatcaggaatatggcatcgagtttgccttcgagggacatcgctactgggatattcgccgctggttgacagcccaccagacgatgaatgaaaaacaatatggctggaatgttatcgggaccacggatcaggcattctataactatgaaacagggccagtcgtggtgtatagcagtaataaattcattgctccgcgggactatcttgatccgtttgatgcggaagagatcttgatttccggaatggtgcagaacccgggatggggtggtaggtaaatgatggatttatgattgtagattttaatccttaaaaagatagaatgatgaaaaataccattttcttattattagtaatattcggtttgtttgcctgtgaggacgatgattcggtttttgagccatcgactgagggactggagatcaagtttactccggttgcgggaggagcaatgatgcattacaggttaccgaacaatagcgacatctttgccatgaatatccgttacaaggattggcaaggatttgatatattgaaagcatgcggttatagtggagactcggttttgttggatggttttactagaaatcaggaagggataaaagcccggatctcttttgtgaaccagaataatgaagaatcggaagccatggaatatgaattttcaacgctggatagtgcgccttggtctttcttcgatgacttgatggtaagatcctcgtggaatggttttcaggtgatttacaagagtccctcggtggttaccggaatggttcatgttttttacttgggaacaaacccgttgacgcagaaggaagatacgattctgatgagtagtttcccgatcacgcaacaaggagatacggttaattttatacaaaaacaggaaagagcaagcaatacggtgattgtccgcacggaagattttcatggtttccgtgtaagacaggaaatttatccggacattgatgcttttcgggctgaacagtggccgatgtcagccagtgatttcaatgatttcggtttgtcaagagaaagtgctaaggccaagacgggagtggaatatctgtttgacggggaattgaaaggattggaacgtttgatagcttctgcttatgaagataaggattctcgtcaaggtacggaaatttatggagcttaccttgccggaccttattcctacgaaaaaccgattattcttgatttgagagaaccaaagactccggcatggattcgtatttattgcctttatcccatgcatgcaaatcatgccgttggtttggctacttggggaaacgtgtggatcggttcttacgaagataaagtgccgtgtaaaatgtcggtgtatggtaacagcgcatcttcagatccggatgacgagggatgggtgtatctaggacaactgaatcaagatcctaaacgtgaggcggtaacaaaaaggtggtcacgtcttacgacagatctgatgttagcgcccaaggatgtgaatgatttggaaacaaaagacccgatttacgtggatattcaactccctcctgtaaacgacaagtatcgttacttgaaagtactggtacacgacacgtttgacacgtcgaaagaagacgggataaatcgtaatttacaagagtattttacattacaggaactggaagtttatgtgaaaaaggattaagttatgagaaagagaaaatacatcataaatctatttgcggctgctgcattgttggtgggatgcggtgagagcttggaagacacgtatagtgattatgccggagacgggaagatccgttatgtggcaaaatgtacagaagttcatgccactccgggctgggaacgcttgcttgtggaatggataaacgggactgatgctaccgttgataaaatcaaggtaaaatggtcatgtgaagacctgaaagattcgattttacttcccagtacgaccgagtcctacgagttgaaaaatttgacaaatgggacttaccgtttcgacgtgagtgccatagattttgcgggtaacgagtctctggtggaaaccacctatggacgtccttacacgagagaacatgagattatgctggcattcacgagaggagttgtgaaaccgtacttcctgaaaaataaattgattttcttctccgatcaatggaacgagaatattgatgagattaaactgcaatacaagaatacacagggtgatattcaatattatacgtttgataaagaaaccagttatagtgcttttatcacgatcgatgatgtgagcgtgaacccgacggacacgatttatgtgcttcggaaaggaagggtggaaggttgtccggatttgattgaatttgatccgctggcattgagtcacacgaagattttcagttcgggatttgtgaatgcgatcgaacgtcgctatgggtattctaacaagacgaaggaacaagaagtggaatttgagagatttgtagaagaggtgaccgagttggaatttgactacgacatcgaaactttcgaggacgtgttgtattgcccgaatctgaaaaaactcgtgtttgcgaaaaatcggtatttagataaagagcatggctattcgacggatgacgattatcctaaattacggagtgatatagggaggagtctgctggtgttggataaggcaagtgaaccggatgttttgggattgaaaatcgaatggtatggaggttggaatatcccttattttgaatatgaagaacccccgtatatggaacacatgggattctccccgcttcccgcgatggaaattattcagccggaagctttaaaaacgtatgacaatggtagcaaaataaactgttctccttcggacctttatgccgatttggatgccttgttagatgatgattatcaaacgacatggacaaccacgtctaatactgtacctcgtaagtacgagatggcaatggaattgctggaagagacagagattagcgggataaaaatagcgcaacccttgtatcacccgatgatggatagacgaatgcagtatattatgccttctcaaatttctattcaagtatcaaccgatggaggtcattggcaaaatgtcacttattttgaaaccaatgagctgggacgaggttctggtgaggttactttattgaaattccctgaaggttctcggcgggtacgttacatcaagtttaccttgcaagacggtacggacccgggagggaactgtgcgatcgctttgggtgatattcttctcttcaaattgaagtaaagaaagatgtctttatgtgctcgcttgagcgactttgataagtattaaaaagagggtgtgtcaacaaattttggcacaccttctacaaacagatctaaaaaagtatgctaaaaatcaatcattttactaaactcttttttagcgggatactcttattgtgtttttccggtgctttcgctcaagaacaggaggatcgtctcctgcaactgatgaaacaagagctggtgtactgcatggagcaactgaaaaaacaagaaagtattccctattacatgaacctgcgggcgatggacgaccgcacgataacggtcgtgagctcgttcggggccgtgactacttccaacgagaatcgtatgagaacgttggtgccgcaaatccggttgggtagcccggaattggataatttcaagtataatatgcagggtgggtttgccggacctaatgcacggggagcacgaggggtagttttgcctttggatgatgatgccacggatgcgattcgggaagcgatctggcgggaaacattgcaacgctacgagtttgctcgtaatatgtatgatcaagcaaagactcgggccacggtgagcgtggaggacgaggataaagccccctgtttttccgatgccccgatggtgcgttattacgaggcacccttggctgccggaaggcaaaaaatggatattaaacgggcttgggaacagcgtctgaacgaggtttctgccgtgttcaaaacttgtcccgagttaagcgagggatcagccagttttagttttcagatattgcgtacctatttcgtgaatagcgaggggagcttggtggtgcagaaccgggtagccacccgggtgatgttaatggcatccctgaaagcggcagacgggatggaattgccgttgaacagggactattttgcttacacgcctgatgacttgccggataatgaccggatgattgccgatgcacgggacatgatcaagcgattgttggctttgcgtgatgctccggttgctgatccttacacggggcctgctatcctgtcgggccctgccagtggggtgttctttcatgagatttttggccatcgtctggaaggtcatcgattgaaatcgggcggtcaaaccttcaagaagatggtgggagagcaagtgttgcccgtagaattccaagtgtattgtgcgcctttgttaaaacgctatgctgataccgatttgtatggtcattacgtgtatgatgacgagggcgtgaaagctcgccgggtggataacgtggtgaatggcgtgttgaaagagttcttgatgagtcgggttccgctggatgggttcccgtcaagtaacggccatggtcgtacttctggcggtggcgatcccgtttcccggcaatccaacttgatcatagagacctctcacccttacacggaggatgaacttcgggctatgttggtggcagaggctcaaaagcagggaaaggaatacggttactattttcggaccgtgacgagtggtttcacgtacacgggcgagggcggaagtctgaattccttcaacgtgacacccttggaagtataccgggtcttcgtggatggtcgcccggatcagttggtgcggggggtggacttgatcggtaccccgttatccatgttctccaatattgcggctgccgggaatgaacccagtgttttcacgggtgtttgcggtgcggagtcgggatgggtgcccgtgacggcatcttctcccacgatattcgtgagtaagatcgaaacgcaacgtcgggcacaagctcgtgatattgccccgatactgccttctccgaaaccggaaatggtgaaagagaatgatccggatggtgttatttttgccgcgatgcgttccgaacaggaacgtaataaggcggctttagtcctccctaacgggccgaaaccttattatatttcgtacacgatagcccgttatcgtcactttcagatggcggcctcgttgggaggattaatgctttcgaacgtgtccccgtggcaaatgagtggcggtactcaagttttgcttggtgattaccagagaaacagtgatgcgcaatatcaagaacagatcgctcccgcacaattaccttcggaggtggactatgatgtgattcgtcgtgggttgtgggaatcatcggatatgatgtacaagtacgcattgggtatgatggcgcagaaaatgaattatctgcaacagaacccacttccatcggaagaggcagcactggcagatatgcaacctctgccagcggttacccgcgtacaagagcgttcggagacctacaagattgatcaagatgtcttggaacggctggtgaccgaggcgtctgccgtgttcaacgagtacaaggagatttataattccagcgtggcgatcaacgggatggaaatggatatgtaccgtctgaccatggaaggggtacaactgaaagagcccggtggatacgtgagtgtcacggtttccgcggaagtccgtggtgatgatggttcgaacttgggtgattcattctctctttccttgttaaatccggcagagattccttcggttgaggaattgaaagcacgggtaaaaacatttgccgagggattgatgcagctaaaagcagctcctcccgtagcggaatattataacggtccgatcatgttcgaggggggagccgtggctactattttggcgaataatctgctctatcgcggtgggttaattgcggcccgttcgcttatgcctacggggcggggattagcggatcagtttggccaaaagatcgtggacgagcgtttgacggtaaagaactacacgaacaagaaggaatataacggaactccgctatatggttattatgaggtggacggggacggagttacgccggaaccggaaatggtgttggtagaaaagggggtattcaagaaaatgctgaatgggcgaatccccgcattgaaagccccggagaccacaggtagttctcgtttcatcatgtccccgcagagcccgacgttggtgacgggtacgggaacgatccacgtgcaagcggagaagggcattgctcacgagaagatgaaaaagttattgatcaagacggcgaaagctgccggacaatcctgtgcctacatcgtgagaggtatttccgggtcggcacttgtcgtgtaccgggtagacctgaaagacgggaaagaaacccgtgttcgtaccacgggcttccgtatgccggagttgacaaaattgttgaagttggttgccatatcctcgaaggaagaggtgatgaactacctgccgaatgcttacccagcctcgatgatttatcccgccgggataatcgtggacggaatggtgattgaaaaggctaacccgaagacggagaaggaaccggcattgaaactcccaagacagcgggattaaaacatgaatattggaagtgctgaaaagtcccgtttgttacggtgagcgggctttcagccacttctcaacaacaaaaagcggaaaagatgaaaaggattttatttacagtatgtatgttattaggttgcgtcctgtttaccatggcacaagaagatagttataaaattgaaggaaaattggggaacacggtcaacggtaaattactgttggtggccaatacggataaggggatgcttgatattggcgaagccacggtcacgaatggcgagttcgagttcacgggccggatgccggaagtgacattggtctatctgatgccgatgaaaaagaatgccttgttggcagctttaatgttggagaatgcccattacacgattacgatggggacaaacgagctagtcgtggaaggtggtggcgaggcacagaaaatatggagggaatttaacgatttggataagtctctggcacgaaaaaggcagcaaatacaagctcaagtccaaatgaatccctcgcaagaggcgggattacagagggagtttaagaaaatcgtggataaagcggatgcggaagagttggccttgctgaagaagtacaacaattccttcgtggcggcttacgtggtggcctccaagatggcgcaaattctggatgatgcaaagttgaaggaacgctacgaggcgttgggagaagaggcgagagcaacaatctatggcaagcaagtcgctgacgagttggttaagctggaaaaggtgaccgtgggagctgttgctcccaatttcagcgccccgttggcagacggtggggtgttgtctttacacgagacgaaggcgaaggtaaaagtggttgacttctgggcttcgtggtgtttgccctgtcgtcaggagaatgtaaacctgataaaaatctacaagcggtatcgtcccaaaggtttagagatcatcagtgtttctattgatgataacaagcaggcatggctgtcagccatcgggcaagacggttgtgactggaagaacgtgtcggacttgaaaggtgggcagtctgaaattgctgcagactattgtgtgaaaggaatcccttgcaccttcatccttgatggtgaaaaccgtattgtggctaaaaatctccggggcaaagacttggagaagaagatcgacgagatgctgaaaaagaaaaaatagcaaatgtgaggcgtgtgttaaatcaggaccgtctctaaactcatccaaggggcggtcctatttaaagaaaagattaaaatatacgtttacaatgatggaaaaacaatttatattcttagttgtaagtttgatattcattcttgcatcgtgtgtaaaagaacaagatttcataaacaacgaacttgaggaaccgtcattgtttactcgctcttacgatgaaccaataatagtaccttgtgagatccctcgtttaaaaacaatgttaacaagagctttagatattactaaagactcgacattgaccgccatttttacagaaccgggtagagtcgaatatgcagtaataacaggtcaaaaaaataatatagtcatgcaaatgcgtccctcaaattataggccgcaattcacgatatatgttagtgacaaatattatgggttgacaaataatggggctatttttgttgttatacatgaattatttcatatctatcgctataataaaggggtttcgagtaatgatggggaccatgaagcgatgactggaagttatatatatcgagactgggttggtgctgctcttggaatacctcaatatagttatgttcaagattatctagtgtattgtggcacttatgggtctccggtgtatgggaaattgtcatctggggaaaaagaaaaaataagacttctatgtgaaagttatggattacctatttgaaatattatgaaaaaattaagtttacttataattatgattttggggagtttaaatttgatatattctcaaaatgaatgcatgaacaaaacgaattcttcgaacaggcaggatagcttaagtcaagtaaatacgaagattaagccacaaccagagcacgtgtatgttattttcacttcgaaggaatacgatccggaaagtgaacacgggattacagaaggggtcatgcggatagaaacatgttatccatacacgaatgatacggctttaatttcttatactttcttatccagatcaaagaattttgatattgctttcttacattggaatttaaaaagagaagaactgaaaagaccgacaaaatctaccgataagatgaatatcgttatgatgtcgaaagattttttattaacagtcaaccctattgaccttgataaaaaggggccctctatgacacgtgaagaagcgttggagttaagagaaagactggttggaaagataatctggataattgacagaagggatatcgttagcgattctgtgaaattaatacagacagaaactagagttccagtttgtttttagatggatagtacttatttgatcgagttacaataggaacggtattatgtaatctcaaaaacacgaaaagatgaaaaaaataattttaacactatacgtttgtttatcatgtatcatgatagcaaatgcacgatggaatccaagtgttgtggataccttgcccaaaagggttattaacggtttggaagttattctaataagagagacttatgaatcgggaaacattttttggacattgagagtctctgattttaaaaaatgttttcaacggtttgagagtaaatatccgggtggaattaattacaattttaattctgaagaagtgaacaagtctatttatgattgggaggatcgactttggaaaatatttccttccgagataaaagctttagaaagatttaatcttaacctttttgttgataaaaatggacgtgttttcaccgtggaattttctatgccggacgaagcgtttcaacaattagaaggatttcccaagaatacattgaaaaatttttatcataatttaataaaggaggaatgtaaaactttcaagaaagtagatttccaagtattggatccagatagtgaaggaggtagacagattcttttagacgtatgtggttcgtttggaagtggaaatgagtacacgactatttttttgaataagagttgttatgacatatttggtacgtttagcccatggagattgccaaaagacgagtttaatagattgatcaaaaagaatgaggcagagatgaacagccaacagacagataagtaaataattaagcaagagaaacgtatggaattaggaccgtttttgggatgagtttagggcggtcctttttttaaactttaaaatttgcgattatgaagaaagaattacttgtactctgggtaatgggtatcttgatttttttatcatcatgtgcctcgttatatgggaacctgtcgaaaaaagaattggcaaacgccgttcatgcaaaagtagatagccgggaatacaggattgatatgatacccgaagtttataccggcgagagtggtttggacgtgcgtgttccggggtatattcaagtgtggggggattccgttatttcttgcatgaactatgataatccttttccggggacgatgccccctaaaggttacgtggagaacatgaaagccgtgaaatatgaaattttagactatcagcaaacgacaacccggcgaggacgtcgaattgtcagtttttggtttaaaatgaaatacgacgagtatgacccttacacgttggcaagatttaaagatcggatggttccggtacgttacaggttggaatttggtaattcgactaaagtgtgtgttcttcagtttggatatctgatgaagtttggaacgttgtcgttataggagagtgatgtaaagaatttgttattaaccaataatttacgagttatgaaaaaatagaagtttgtgttatggatatttttagtttactttcatatttttgtcccgatggcagttaccgggcaaagtatggtatttatcgagagggatactttccttatgtattctaatcctttaaaggcagattcaatattgaatgccaaggtctacgatcgagtgtattattttgatttggaatagttataagtgacactttgatttaggtgatgtctgtttggtcttttgttttccgggtttattcgcaaatgtcaataatcactacaaccgccggggctgattttacgaggtgtaaaatcaataatctatggaaaacaaaaagaccaatactttgatacatttgaacggcctccgttatggtgaggggcatatatttctttggtgggagaattattggcggcggcttttgtacgttgacatcctttacattgagggaacgggcagttattgtgaatttcacgcgatcgacgggagtcggatgacgatttcttatcgtttgggggtgatgaaactctctttaccggatgatatgttcatccgggtacaccagagtttcatattgaactggcattacattgatacatttgtgggcaacagtgtgaaaatcggtgaccgatggtttccggtaggtcggacttatcgtcctcacctgctgcaagtgctgcatttcccgaaacttcccctgcaaaatagtaaacaagaattataataatcatctttaatcatcaacccgcctggtgaatcggccatcggcggcttttcctgttggtaggtgatatgtcaattacggctataagagggtaatggaattgcattaatttgctagtaaataaatctttaattaccttttcctttcctttgtccttaaaaatacgtacctttgagatagataaatcatttttaatcatggagaaagataaatacattcggtttgactgggccgtaaaacggttgttgcggaataaggcgaattttgacgtgctagagggattgttgaccgtattgcttgatcggcagattcatatcattgatattttggaaagcgagagtaatcaacaggattacgacgacaagttcaatcgagtggatattaaggctcgggatagcgagaacgagattattatcgtggaagtgcaggttacccgggaattatattttttagaacgaattctctatggcgtagccaaggcgatcactgaacatatggcattaggagacctttattcggaagtgaagaaagtgtactcgatcagtatcctttatttcgatataggaaagggaaatgattacttgtatcacgggcaaaatacgttcacgggagtacacacgggagaccacctacaagtgacggtgaaagaacgggatgctttggttcaacgtttaccatcggaaatcttcccggagtatttcttgatccgggtgaacgagtttgacaaggtggcgacaactccgcttgaagagtggctggattacctgaaaaacgatcatattcgtcccgatacaaccacgccggggttgaaagaagctcgggaaaaattggtctattataatatgaaccccacggaacgtgctgattatgatcgtcatgtggatgctattatgatccaaaatgacgtgctgggtaccgcaaagctggaggggaaaatagaagggaaaatagaaggaaaaatagaaggaagaatagaggggagaatagaaggtcgggcagaaggaaaggcagaaggtcgggcagaagggaaggctgagggaaaagctgaagggttaattgaaggtgaggaaaaaggagtctttaaagttgcccggaatatgaaaaaaatgggagtttccctagatacaatagttttaagcacgggactaacagaggaagagatagaacgattgtgacgtcagcgtgtagggaaattgtaattgccaatttttcatgtttcaataatttcctctcattattgtcgctgttttccaacacgctcatctgatgaatggctattgggttaagtttgacaagccgttcaccttgcgacatatcctgttcaatgaacacggcattgaggttctccatgtttgacggacaaataagttcgttgatagtggcataatcacgtatattgcctttcaggtcggaattggtttcccgcattgctttgccgtcattccgaacattgccacgttcaatacatcggtttcgttggcatagatcatattttggacggtaatctttgccatatgatttatataaatacccgtacatctttcggtgtgtgcagggtgttcttagggattaaacacgtatcactttcgaatcaaagacgtttcaaagacgttcaggggtgtctttgattcgggagggtgaggctgttgttgtctgtttgttggggatgcttgtcggtgattctccgttttattacatgaattgtttcgggggattttgttggagcggggtgtgtttttatggatgagggaaatgtgggatttatgtcgaatatgtaatgaaaaatgtcgtttgtgaaaagattcggttgtttatgaattagaattttatacggaggatgcatgtcctacctttgcctcagaaaacaaagaaaaatcttaaacaaacgagcgatggcaataatagacgaaaatattcggggaaaggttggaaattcggttttttacagggtggggtcaataacgcgggtgaggagtgcggcagcgaactacttggatgcgaatacgataaaacaacaggaaaaccgttcccgtttgagagtagcaatacgtttttatcagcgtttggtggagatcgggttacaggaggcatggtatctggcgactcaaggaaccgggaaaaatgggtacaatttctttttgaaattaaacatgatggtttttaagcctaacgggaagattggggattttgcccgattacagttgacggttggtatgttgcagaaggtaaatcatcttatggcgtgtgttgacgaggaagatgcggtggttttgtcatgggagaaggcggagaatcttccttccgcggggatggaggatgagttggtggttgtcgtgctttatgccgatcgttcgttttctccggaatttgttaagacgaacggggagacgagaggtgacgggaaagccactttccgtttgccgggtagacggggaacggcggttcacttgtactgtttcttccggaagaagaacggggaagcttattctccgagccaataccttgggatttcgtgattttagatttacgattgggtgattaaaggatttccaggtgggaaattactttataaattgacagaagacgaggcgttcaattgttcctgacgtgtcgttacgggggagacgtgtgtgaggataaaagggaacgggtaattttaatactgaaaaatatggcaaaaagagagacaggtaaaagagaagaaacggcggatgtgaccgctcaagtattagaggaattgagtgaattgcgtcaggaggtacgcttggcaatcgaggcggcatcaaatgctgcttacaggttgatggatgctgacgggttgtgccaggcaatgcgaatatccagacacacattacggcggtacgagaaacaatttaagattccggcgaggaaggtcggtaacaagaagttttattttgtagcagaagtgaagaattgtatcgttacggctttacggctttggaaggagtgaaaggtgtggtcggggcggttggcaaggtgattgaccgcctgacactcccggcgagggagaagcgacaactggaagcggaattgttggaattactggttgaacacgagcaggagatggctcgatcccgctctgcggcggtggtggaagaggcccggggaaactggttgcagcgatcatggaggccgttggtgatgttggtgttcgcgttgattgttctcgtgggaacgttcacgacgttacccctcctttccgatacttctcgtttctgggatttactggaaatcggcttgggtggttacgtggttggacggggtggagaaaaaatggccgcggccgtttttagactaaaagctaaaaagtaaaagttaaaaacttggttaactaaattttttatttatggcattttcaattttcaattcttcattttcaatcgtgaaccatcgcttgatgggagacagggtggttcacttggtgagcgcaaagaatacccggcgtttggaggggccggacatgatcgtgttacattacacggcgggaacgagtgctgaaagttctgcacttttcctgactcgtcctgacgtgtcggcttcggctcatctggtgattgggcgggatggggaggtgtttcaactggtgcctttcaacattgaggcatggcacgctgggaaaagttggtatgccggacgtggcgggttgaatcattattcgatcggaatagagctggataacttggggaaactccgcttctcgggtgatttgtttatcgcggagtgtgggcgtgtggtgccgcttgatgaggtttacacggattgttccggtgatagcccgacatactggcatcgctacacggcaagacagatccgggtgttacgggaaatctgtactctactggaagagacctacccgattcgtgacgtggtgggacactcgctaatcacgccgagaaagatcgatccgggcccggcgttggaattcgcatttagcgaatttcaagataaaaattaaaagttagaaactaaaaatataccttcttggggcagggcccgccccgggagtgtagagttcattttcaattcttaatttcaattttaaaattatggcagaatttaattcgtatttattaggaaaagcaaggaaatcagtaggtaacatcacgttgtgttacacgagagggaagaatattgccaaggcaaaggtattttctcggaaggataacccgacgccggaggtactggcacagcgggcaaagatgaaagcgttagtgcaattatcccgacagttgttgccggtaatccggaaaggttttgtcggaatcggcaaaggctcggcggcaaacgctttcacctcggtgaatatgtctcgggtttcggtggacgagcggaatgtggcaaccgtggattttgaccgcttactttgtgcttccggaatgttgtatccaccgaaggtggaagtgacttactcggaagagaataaactttactctttcgtgcaagagatgcaggacgaggagaacggctacgctttcaatgatgacgtggtgtacgccatgttatacgaaacggtacttggtcgtgcccgtttggtaacgttacgagctcgtggcgagaacggtaacactacttatgctctcccagaggagtggagtaacgagaatgtgaaactatattgttttgccacgttgaagaacgggaagggagcttcggatagccaagtgatgacgttgtaagctgtgatttgcgattttgaattcgaggattcaagagtttcaatgatcgagtgattttaacgaggatgaagtttcatgtttccggtatggaattcctgccggaggcatgagactcatcgttatcgcagatggcggataacttgttgacgggagttttttagtattattggtggagtgatcagttcccttgccgtgacttgggtgaaacgatggtaggagagaaggagataagatgcttgggggcaaaattcgttttaaaacctaaacgagttaaaatttaacattgttaaatgtaatttttccccattttttgaagtaaaaatggatgggtaaacatgatatatataaaagtggataaaaattacgaaaagatatgataaagaagaacgagataaacatggaaagcgaagattgggaaatggctgaaagggcgataaagcagtcggggacggtgaaagagaagcttaccagccaagagattggggaagaaacattttcgggtaaagttgaagagtgggttgaggcagttcatggggtttcgaaaatagataagaaaaaagcagttgaaaagatgttggctgagttaaagaagcgagatcggaaaaagagggcggttcgtgtgtggtggacagcgggaggatcggtggctgcggcaatacttgtgttctttaccttgacacagtggttacaatggggaaaagagacatcggacgaggagaagattacgactgtcgctttgaccgagataaaggtaccgactttgatcacgatggagagagagcatggtgtattatctcaagaaatattagatctgaagaaagcaaaagagggataccgtgtaaagggatcgggaaaaaaggaagaagcggatgttgatacgagtgagccgattcgttataatcgagttgtaattcccgcgggtttcacttataaagtaagacttgccgatgggtctgtcgtgacgttaaatgctggtagtgaactgaagttcccggaggagtttcgagattcattacgtgaggtggagtttacgggagaggcatattttgaggtggagaaatcagataagccttttatcgtgaaggccggagattcacgagtacaggtttatgggacacgtttcaatttattttatagtgagaaacttgctttggccgaggctgttttggttgaaggaagtataggtatgacggcgaatggtaaagaaactaagattattccccatcaacgggtatggtattccatgaaggattcattgatgcgtactgaaaatgtcgatccggcggattacttgacttggttgggtaatagttttaaatataataggaccagattggataaaattgtttttgatatagctcaatggtacggggtagaaatcaagattgctccgggcttggagaaacaggcatatagcttggagtttgatcgatcagccactattgattgggtggtgcgtgctttaggactgattattgacaaaccgattaaaacagagggaggtgcatattatatagagtaaattcacatttacctaaaaaagagaatcttctcagagaagattcccttttgaaacataactcaaaggttcgatttctcaggtctgacacctttggtggatgttcatcattacaacgtaagtaaaacgttacatttaatttctcacaaatttatgaaaaagaaagtggaaatcattaaaacaagggcaaataaaattgccgtcggtatatttttgttgtttatttcgacgttgtattgccccaaacaactttttgcttctgaatttatagaagtacaacaacagcaagatcaaaagaaggttactttaaatatgaaagacaggacgctagtaaatatcctgtcggaaattaaaagacaaacgggtttggcttatggttttcgcgataatcgggatgcgacttcgaatgaacgtttctcgattcaagtgaaagaagtaagtgtcgattccgctttgagcgtgttgttgaaagaatcaaaatattcttatcagatcgtgggtgatttaatcttgatcagtactaaaaaagatacaacaaccgaagaccagaagaatttgatcatggtaaagggaacggttgttgacgagaatgggaatccgattcccggggcaacaattcttgttcacgggacgtcccggggtatagcttcggatatggaaggacggtattccatcgaggcaaaaccagatgacgtgttgaaaattacctttgtcggttataaagatgaagtgattccgatcaaagggaaaactaaaatcgatgttcgtttgaacccgacggttgaaaatattgaggaggttgccgtggtggctttcggtacgcagaaaaaggaaagtgtggtttcagctattacgacggtagacgcttccatgttaaagtcttccaatagtgatttgacttcccagtttgcggggaaaattgccggtatgatcgggtggcagcagggaggtattcccggggccttgacagaagaagagatgaatactaaattttacattcgtggtatcacgtctttccaatccggggcaaatattgatcctttgatcttgttggatggggtggaggcttctaaattggatttggctcgtattgatccggaggatatcgaaacattcagtgtgatgaaagatgcttctgccacggcgatgtatggagccagaggagcgaatggagtgattatcgtgacgaccaagaagggacaggagggttcggtttatacttctgttcgttatgaggcgatagcgactatgccgacggatgagattgatgttgtggatcccgtcacgtggatggagatgtataatcaagctcttttaagccgggatcctaatgctactcctaaatactcggccgaacgaattgccagaacaggaagtaagaaatatcctgatttcgtttatccggcaaatgattggtataatgtcttgttcaagaatttctcgataaaccatcatatgggaatcaatatccggggtgggtcgaaagtgattcaatattatgcttccgttaatcataaccgggatcaaggtatgttgaagacagaccgattgaatcaatttaaggtgaatattaataataataatacttcttttcgtttgaatttgaatatcgatttgagtaaaggtattaaattggttgtaaattcttttaccactctcgattcttatcatggccccctggaggatgtaagaactgcttattctttggctttttacgctaatccggtggattttgccccgacttacccggcagatgacacctataattggccgcatttacgttttggaaagtctcgtgatagtgataatccttatgccttgattcaacggggatacgtggatcggagtcgtttctcgacaataaatcggttggaatacatccagaatctttcttttctgttgaaagggcttgaattccggggggatgtttcttttagtcaagcgggttattattccaatccgtacatgacaacacctttctattacagcttgttggattatgatcatgttaccggtaaacacacgttagaagcattaaatccagatgaagggaaaagaactttattgaagggaagtggaacgacaactggatcgaatcagttggcatataatattaagattttgcacacggctgcctggaaagatcacacgacttcttatctggccgtgttgtccggacaggagtctttacagtcaactcccaatagcgtgttagacggtattcgtcggcgtaacctgggattgtcgatgcgtctttcatacggttataaagagcgttattatcttgaaggcagtttcggttataatggttctgaacgttttgcaaaggatcatcggatgggatttttcccgtcggtaggaggtgcttgggtggtttccaaagaaccgtttttattaggttcctcgaagtggttatcattcttgaaattaagattatcctacgggaaggtcgggaatgatggtatcattgatactccgcgttttgttcatcttccgagtattgggcaggatcaaccgtctggctcgttccgtccgggattgggacagatttcaaggtatagaatcacgggttaccagaataatgatgtaacttgggagattgcagaacaggcgaatttggggcttgagaccaagttttttaatggattgtttgaggctacggtagatatatatcagcaggttcgtcataacgtgctggccaatcgtactgttattccggaggctatgggattgggtttgcaaccattggataatattggtaaggtaaggtctcgcgggcttgattttgccggtaagattcaacatgcgtttaactcggatctttgggtgattttgaatgggacatttacttacagtaaagcaacttatctgaaaatcgaggaagctgccgataaaccggaatggcaatggaaaaaaggacacgatatttcacaacaggtcggttatatcgcggaaggtttgttccgagaccagatggaaattgataattctcccgtgcagggaggggatttaatgccgggagatattcgttatcgagacataaatgatgatggcgtgatagatgtgaaggatgccgtgcatatcggtttcccgacgactccacgtatcatttatggatttaacggttttattaattataaaggattagagttcagttttgcattccagggatccggacaacggggattctttattaatccggcagcaatttctcctttttatgggaatcatgctttgcttacggcgatttataaggatcactggtctgtggataatcaggcggaaagaccgttatggccccgattgtcaacaaaaagtatcacggctcacaatccacaggaagattatacaacagataaagaaactcgaatgagtacctattttttgaaagagtgtcgtttcttgcgttgtacttcgttggaattaggatataatcttcccaaaaagtggtcacgtaaactggcattgaaaaacttaaaggtgtacgtgcgtgccaataacccgttcctgatttcgaattttgatctttgggatgtggagttagggggaaatggatttaattatccgatacaaaaaacctattcggttggtttaaatgtaaacttttaatgtatcatgattatgagaaaatattttatatctgttattataattgttgcattgtcttttatggcttgtggcgattatctggatcaggtgccggaaaaggatgtggagacatttgaatccattttcgaacgtagagcgagtgctgatatttggttaacgcaagctacggagtttatggctggtgtttctttttcggggtttggtagtaatgcgggagttgtgggggcggatgagtttgttaccggaaattatattcgcgataacaatacggctaaattatttaatattgcggacggtctgcaaatgagtcaggatccgttaggtaatatctggacaacaacttattattcgattcggatgttgaacacgtttatttctaatattgataacgtgtacgatttgacggcagcagagaagagaaattggaaagccgaggcaattgcagtgaaagctttttattattttgaattggtgagacgttacggacccattgtattagtgccgaaaaatattgatgtgaatgcagatttggcagaaatgcagattcctcgttcacatgtggatacttgttttaacgagattgttcgtttgttggatgaagcgattccggatttgttatatggtaaagaaaggttgatttctcataaactcttcttgagtaaggaaggagcgatggcattgaaagctcgcgtgttactttatcaagcatcccctcttttcaacgggaatgagtattacgtgaattttaaggggaaaaagggagaatctttgtttagtgctgaatatgatcctgaaaaatggaaacgggcagccgaagctgcagatgccgctgtggagatgtgtgaaagccagggatataaattaaagacaggtgaaggaaataaggcaaccaagttgttaaatcagatgcgagatattgaaatgtcaatttgggaaccgaattacgagggagaggaggctattttcttgaccggaaatgcaaatataatgaattcttatgtcatgtttacattacctcttttccccgaaggtcattctgatcgatatgcgctgttgaccgggtgtgtggctccgagtatgaagatggttgaaatgttttataccaaaaatggtcttcctttgaacgtggataaggaatgggattatgcaaatcgttacaaattgggacgggaagtgaacaatgattaccagaatgttgtggctttgaacgaggatgttttgaatcttcatcttaaacgggaaccccgtttctatgccaatgtggcagctgatcgctgttattggcaacgcggtcccgccgcgaacaaaaatatgcttgtgcaggcttatcggggagaggcatttggaatccacgaatcttttctgctgtattctcaaccacaaaatttgtgtggctattacgtgaagaaattctctcgttcggaggtacagacttatcaatatacgagtaataccggtagtttgggagattgtcggtggccaatgatccgtttggcagaactttatttgattcaggctgaggcgtggaatgagtatttgagcaaaccggatgataaggtgtatgaacctttaaataaagtacgcaggcgtgccggtattcccgacgtggaagttgcttggaaagaattttctactcaaccgcaaaagatagagtcaaaagaaggaatgagagagattattcagcaggaaaattttgtggaatttgcttttgaaggtcatcgcttttgggatttgcgacgttggaaattggctcacttggagttgaatgataaaattttgggatggaatgttttgggagagaatgcccgtacgttttataataatttcgaaggaccggtggttgtatgggataagacgaagttcgtggctccgcgagattatctcttcccgataaaggcggaagaggctatgattgccgggtatgtgcagaatcccggatggtaaacgaattttagatttacgattttgattgtagattttaatcttttaaaaatagaatgatgaaaaatacaattttgatattattgttgatattcggattgtttgcctgtgaggacaacgattcctactttgatgcttcgatcccccaggaaaatgttcggttcaaggccattccgggaggggctgttatgcattacaccttacctgaaaatacggatatttttgccgttaaggcagagtatgaagattacaagggaaagaaaatgatcaagattgcctcttatgcttatgattcactcgtgcttgacgggtttaatgaagctcgaaataacgtgccggtgcgggtgtcattgttgaatcaaagtaacgaggcatcgaaagcgatggagtttactttcaatacacaggattctggtccagtggctttctttaacgatatagaggtgttaccttattgggatggatttcaggtaaaatataaggtccccggagctgctaccggactttgtaacgtgttttttatcggaacgaatcccatgactcgggagctggatactcttttattggaaactttcgctattgaggccggggagaatgtgaaatatttttctttagctcaaaaaagggacgtgaatactgttgtcgtgaaaacggaagattttagggggaatgtggccatgcagaaagtatacgagggagttgcttcatataacgtggggaaattggatccatcgaatttcgagtggctggatccgttctctttgtccgtggagaacgataatcaaggatttatggtcggttggaagtatctttttgatggtgatgtaaaaggttctcggaaattggcttttcaagaatcttggggtacagcaatgcctccggcgaatatgtattcttttgtaactgttccctacgcggtgaataagccggatgccccgaaatattttattttggatatcaaggaacccaagcaagtttctagtattaggatgtatggaatgttaaatctgaatagcctgacaaaaccctctgttttcgtaacgtgttacggtacgatgttacctaatgaggtgacaatatatgcatctaataataaagatgataatacttcttgggtcaaggtgggtaatttttatcagtcgttgacagcggcggttccatggatacaacgtgccggtgatgttgatggttccacgaaaataaagacaacaagtgaacttgaagccgtggaaccatgctaccttacggttaatttttctgttgataatcctccttacaggtatttcaaggttgaatttaacagtgtttttaaagagataccgaatcaatattataaaaataccacggaacgggtgactttgcatgaggttgaagtatacgggaaataataaatagacgaattatgaagagaatatatatagtcattgttttgacggcaatatttgccggaatctttgccgggtgtgaggaccaggaagatacgtgggatgattatgcgggtaatggtcggattcgttacacgggaaaatgtacggatgtttctttggaattgggatgggagagtgtggttgtttcttggaaaaatacgttggatccgaatcgggaaaatatcttgatagagtgggttggtggagagcagaccggagattcgcttttgacgaaggatatggaaagttgcacgattaaaaatttaggtaacgtgacatacacgtttcgtgtgtatgctatggataaagaagggaggcgttctttgggtgccgaggcttatgggcggcctttttccatggcacatgaagcgttgaatgggtttaccccggttgtaacgaaatgttttcctttgggaggggataaactggttctctattttgatcgctggcaaaatactttagcggaagcaagtcttcggtattacaaaaaatcgaatccgaacgaactgattactttggaattaacagatacggatagtatcctgaaacaaaggtattacgtggtggaggatattgatgtaaacaaggatgtagcagtggaacggaaaggtcaattacaagaacttcccggtgtggatattgtttttacccccctgccgttggatgtacatcagcgaatatttaatagtgattttgttcgggagattcaaactcattactttattgaagaactggatgagaattttattaacacagtagaggtgttagagtttgattatgatttgtctacattggaagacttgttgtatttcccgaatttgaaaaaagtgatattaggaaagaatcgatacttgtatgaggcatataaagatgccgttaagcagagtgtgttagcggacacggcggctagtcgattcgccttagaggtactccatgaattgcaaggagtggaagtggagagatataacaagcattatttcccgaatccattggcagtgctgaaagaacaaggacattctaaggtccctactacattaaattatctgacggccacgggaataacggtttcgccttccgatcaaaccgggtataatgctcatcctgaatttttattagataataatcaagcgacgatatggaatcctcagcagataaatactttccgacaacatgaattgcttatcgatttaggtaaagtggagtccgtgtccggctttaaagtggtgcaagatgccacgaacccgattagtagtccatgggacacgaaacataatttccgtccgagcttgctaaaagtgttagtgtcaaaagatctagcatcttgggaaggggctacttttgatgaggataatgagatcgggaatacggcaggagagatcacgttacttcgtatgaaacagcctaaagaaatcaggtatgtcaaaataaccgtgagtgatcaggcttattatgcgaattttggtgtgatcttggctgattttgttgcctttagtgaatgatgattaatgaggttatcatgaaaagaatcatgttatttattgcttgcatggcccttttggggctatgcaatgctcaaagaggttaccggattacgggtaatttggggcaactacagcaggatactttttatttggtcgttcccaatctgaacgggactgtaaatgtgttgggcgtatcgatactcaaggaggggaatcttgagtttgcaggacaagttccagaacccgtgatggcaacgatcatgacatctgatcggcagggaatgatcccgttaatgttggaaaataccgattattctgtacagattggaacagagtctattgaagtgaagggtggagtagaacaggctgtttttaatcagtttaataccttacagagggaagctaaaaagcaacagcaaaagttacaatctgatatgaagactgcctacgaggatgcaaaccagatgcgggttcaggctctttccggacaggcacaaaagtttatgcaggatatgcaaaaacgtcaaacagagatcgtgaaagagaatgcgaataccagtaccgccgcatatatcgtattgacttgtggtttacaggctcctgttgaacagttgcaggaattgtataacttattgggcgaacgagccaagaattctgtgtatgggagaattattgctgcccagttgtcggaactcggacgtgtggctattgataaagtggcaccggattttacggtgaatagtccggaagggaaaccgatttcgttgcatggaattaaagctaaggcgaagttagtggacttttgggcatcatggtgcggtccctgtcgggcagaaaatcctaacgtgatccggttgtacaaaaggtatcgtgataaaggcctggaagtgttgggggtatctttggatgacgacaaatctaagtgggtgcaggcgatcatggaggatgggttgccttggttgaacggttccgatttgaaaggacaggcttcggaggtggctcgagtatatggtgtacggagtatccctttcacgttattattggacgaggacaatcgaattgtagctaagaatcttcgggggaaagagttggcgaaaaagatagaggaactactaaaatctaaataattgaaaatgtaaatttctagttatgaaaagaattataatgctgttaggtatctgtttttgtatttccggtgtgtatgcgcaaaagtttgaggcaacccctcttgatgaacaaggggacgtgtacgaggtaaaaatcaggcagtttaacaagttgttcggtaaatggtttaccgcagaacgggttgcagaaccaacagatggagatgtggcacaacgatcggtatggagggattcgtgtgcggtaaaattgctaaccccggaattgaaagaaatcttaaaagaagcagcagataagggtggaggtagtttctggatagccttttattgcgattcggatggaaaaattcagacagtgacattcacgatgtcatcatctgtgtacgtgaatttacctaacaaaatactacaagaactttatcggcaggcaatggatatcgttatgaatccgggctactataaattcgacggggaacacgattatgcgattgatacaatagaattgatgcaacgagtgtaaaatttatggttaagaaagagcgtttgaaaagaattatatggattctgttgttggcagtcttttttatgtaaattttatgagcgggctattctcctaatggtataccctctttaatctttagcttgtggttgtctgtatggcattaattaaggtaattatatacatccttacagccaatattttatttttactaaacaataaatataatattaggaaagagtatcgggagaagaagtggaaagcaggaaggtttgggctataattgattaacaggtgctgagagtgtgtttggggatatggttactatatttggaaaatctaaatgcccatgagtggtcagaaatgaaagagaaatataataataattgtaaggtgtttgaaaaataatgttaagtggtaaaaatatgggaaataggatgtcggtaaagaacttaggttggagaagtaaaaaatgtaataaatctgtattgtcatttttaatagtggttttatgccctttgttacttgaggctgcgtctgctacgagggatagtgctgtgatctcctcgatcttgaattacagagattctcatggtgtacctgttgtcagcgtgtccataaatggtagaggatattctttcctgtttgacacaggggcgggaatgacctgtatttcggataaggtggttagcgaggtgggattgtctctccgtttgacgagtaactatatcgtggggatggatgggaatgtgtcttatgccacgattccttcgcttgttttcggtagtgtgaaagcggatagtcttgaagccattgtgttgcccgggaataatcttagtttgaggacactcggtattgatggaattatcgggactaacgtacttacgaattttgtcgtaacatttgatgcgaagacaaaaacgataacgttaggggaagcagttatcgaggaggaagagaattggattccgatgaaattgtgggatggacttcccctactaacgcttaaattgcgtggaaaggaagagttgtatgatgtcccgggagtgtttgatagtggaagtagtatgggagctttcggcttgccttcggtgaaaggttttgaggagtggactgctgccggacttattgatagcgtggaagaggggcaggggaccaccacgcttatgcttggcggtagagtggggatggataaattatatcgaggtaaattgcaagaatgtcatatcgggagtggagttttttccggaatcccggtatacacgggaggaatcgactatctgttactttgtttcaaaatcacggatctcggcaagctaacactggattatccgaacaaacgtttcagttttactgcttacgaggatgctaccgtttgggaaggggatcgacgtcccgtgaccacggcagcgattaacggggaactcaagattacggccgtgtggggaaaggaggcccttgaaaagcttgcacccggttacacggtgatcgcttttgatggcaaaccgacaaataaaatacccatcgggattcccaatattgacctgtttatcgggatgattaaggccaaaacggtgacggtgcgagatgcggagggaaaggaacaagtattacctgcgaccttatttttgacagaataaaaaaaggttcatttgcgattttagaaggtatgttttttatccctgtatgaggttgattttcacttgcaaatgtatgacgttgttgtaaaatttgaacgagttgatattgagttttgtatttacattattacttaatttccagagaaggaggaaataatcagaaattttttataaattcgcctaaataatcttttggtttatacatggaagtctgccggaatgatgacgatctaggttttttgttaatgcgttttaatcaacgtgatacttctgcatttgcaacgatttatatggatttttttacagaacttcatgtttatgctaatcgcttatactgtaatacatctgaatcggcagcagatgccgtacaagaggcgttttgttatttgtgggaaaggcatgatgtaatttttgacagtttgacgaagataaaagcatttttattcgttgcaataaagaatcggtataagaatcacgtgaatcatttgggtgtgaggcagaaatataaagatgcgatggaacgggaaacttcttttgtagaggatgttttagatagtgagctggcaacctctttgttagaatatgtggagtatattccggatccagaggggaaagtaatgaaactttatttggcagggttagatgcagaggaaatagcggatcatatgaaattgagcattcggactgtttataatgcgaaatcaagagctgtcggtatgttgaaaaagttcttttcattggggaatcgataatgttttaaagatgaaggtattttatgttacgttgtatttgttattcgtgttgtctttgacagcgaaagcacaggattcggtaaaggtggctttggtacaggcacatttggcatggggtgatgtggatgccaatttgcgggattttgataagcgtgtgcgttcgtgtaagggatgtgacatgatcgtgttcccggagcttttcacttccgggtgtgaaatgaagaagcgagataaagaggaagcggtatgttcaaaagatggggtggcttcttattatccgttagtgatcaaacggatgaggaaatgggcgaaacgttcgggggcgttggttgtcggttctacgatttataaagaggaggggaaatattataaccggttattggctgtttatccggatgggaaatacgagtattacgataaacacaattgttttaaaaaaggtagcttctcacccggagaccgtcatctggcgttggaatggaaagggatacgcttctcgacttatatttgttatgacttgcgcttcccggagtggagtcggaatcatggagagtatgatgttgcaatttatattgcaaattggccggaatcccgacgagacgactggaatcgacttttgcgggaacgagctatcgagaatgaggcgtatgtcattgccgttaattgtgccggagcggatttaacgggacttatgtatcgaggggagagttgcgtgatcgctccggacggggaggtaagggcgaagtgcagagattatagggatgacatcgtggtttataaggtcatgaagtagctttaaagataaaatattataaataaagcgtcccgaaaggacgctttatttataatatttagaactaacttagtccaatttcagcaccgcaaggaacgccttctgtggaacttcgacgttaccgatttgtttcattcgtttctttccttttttctgtttttccaatagtttacgtttacgggagatatcaccaccgtaacatttcgcagtcacatccttgcgaacagccttgatggtttcgcgggaaataatcttcgcaccgattgcagcttgaatcgcaatatcgaattgctgacggggaatcagttctttcaacttctcgcaaatgcgtttcccgaaggaataagcgttatcaaagtggatcaaggcagacagggcgtccacggattcaccattcagcagtatatccaatttcacgaggttggccctacgatagccaatttgaaaatagtcgaaagaggcatagccttttgtgatactcttcagcttgtcgtagaagtcaaacacgatttcagccagtggcatctcgtagttcaactcgatccggtttcctgtcaggtagtgttgctttatcaacacgcctcgcttgccgagacaaagagtcataatttgcccgatgtagtcggtgggcgtgatgatttgtgcttttatataaggctcctcgatatagtccagcacggtgggggcaggcatatcggaggggttgtgcatttcgaaaacttcacctttcgtggtgtgggcaatgtacataacattggggaccgtggtgatcacgttcatgtcgaactcccggtccagacgttcctgtacaatttccatatggagcattccgaggaacccgcagcggaatccaaatccaagtgcggctgaggattcaggctcgaaggttagggaagcgtcgtttagctgtagtttttcgattgaagtacgcagatcttcgtaatcctccgagtcaatcgggtaaattccggcaaagaccatgggttttacttcctcgaaaccctcaatggcagcggagcatggacgttccacgtgcgtgatggtatccccgacttttacctcggatgaggttttgataccggaaataatgtatcctacatcccccgttttgagttcattacgaggttcttgttctaggcgtaatacaccaatttcatctgcatcgtattctttgcccgtgctcacgaatttcacgatatcaccttttttcaagctaccgttcatgatacggcaataggtgataattccgcggaaagagttgaattccgagtcgaacaccaaagcctgaagaggagcgtcgggatcacccgtgggtgcgggaatccgtttcacaaccgcttccagtattttatctacacccaatccggtttttccactggcttcaataatatcgtcccggtcgcatccgatcagttcttcaatctggtctttcacttcctccggcatggcattgggcatatccatcttgttcaagacgggaatgatctccaggttgttgtcaatggcaagataaaggttcgagatggtttgtgcctgaattccctgcgtggcatcgacaatcagtagcgcaccctcgcaggctgcaatggaacgtgatacctcgtacgagaagtccacgtgtcccggggtatctatcaggtttagaacatatttctctcccttgtaatgataatccatctgtattgcgtggctcttgatggtgatacctcgctctcgttccagatccatatcgtcaagcacctgtgcttgtaaatctttccctactacagttccggtcgtttccagtaaacggtcagcaagtgtactcttaccgtggtcaatatgtgcgattatacagaaattcctaatgttcttcatctacgaaattttagatttaggctgcaaagataatgattttccggaattattcatttagtaaccacttccataggggaataatagggtaaaaaataacacctttcgtgcgaaaggcgttattttgttttatggataaaatttgaagtgtatgcttgattatttcaacacgggttgcccgttgtaagtgactgattttagtaatgcttttgcattctttactgccttttccgggagcggggagtagtttactttcgtggttaaggcttgggcttctgcgtccagcatccagttcaatagtttcaatgtttcttcggcttgggcttgatttctatcggcataggcttgctccttgtacaggatgatccatgtgaaacaactgatcggataggcatccggggctgccgagttggtgatcattgtacgggtatcggcgggcatatctcctttcgccgcggctgagatgctttcagtgtttggggtaataaagtttccggccgcatttctcatctgggcgaattggattttcatggcaaaagcatattcggaacccacgtaaccgatggaaccttcagtttgactgattaccccggcaacgcccgggttacctttagcggccatacctaccggccattttaatgattttccggttcctatcttctcggcccattccggacttactttggtcatgtagtcactgaacacgaaagtggttccactgccatctgaacgataaactggactcatggctttgtcgggtaagttcacgccggggttgatggccgcgatacggctgtcgttccatttggtgattttgcccaagtaaatgtcagcaacgatgtccccggttagttttagattgtcaacccccggaaggttgtacgccagtaccacggctcccatgcacgtcgggatgtgaaccacggttgcgggcatttcgctcatttccttgtcggatagataggcgtcggaacccccaaaatccacgattttgtctttcaggctacggataccgccaccactacctatgcccccgtaggtgatggagttacctgttttatcttgataggttttgaatgcaaggttatagaagggaagagggaaggttgcccctgctccagagatggatacttttttagcgggaccgttcacgtcatttgttgcgttgctgctaaaaataacagctaacataagaactgtggttaaaagtaagtttttcattttctattcatttaaataaattgttttctttcttttttgcgactgcaagttccgctgattatgtgaatctaatgtttcgaaacggttatttttttgttacgcagtagggtgtaagggagtggtggatttgttgatccacaagagatgagtgacgtttggaagcttgtattatgccttggattcttttgtcggtaatatcaagtttaaaatgacacccaataaggcggcaagacctatgccggacatggagaaattaccccattcgaaggcagcccctccaataccgaaggttaggatgagagagacgataatcatgttgcgggtgttggaaagatcaactttgttctggattagattgctcattcctaaagaggcgattgttccgaacaggagtaacatgattccacccaaaacagatgcggggatggattttaacaaggcgctgattttgccaaagacagagaagacgatacccgtcacggcagcaattcgaatcacggcagggtttgtgacctttgttaaagacacggctccggtaacttcggaatacgtggttacgggaggtccccccactaatcctgcgaaaacgcaggcaagaccatcacctagtagtgtacgatgtaagccggggtttttcacgaaatccttaccggcaacactgttcaccgcatagacatccccgatgtgttcgatcacgggagcgatggctgcaggaaccatatagataatggctgcccaagagaaatcgggtgtcacgaactggggaagggcaaaccaggcggcttctttgatcggggcagtgtccacgttatagaataaaagtgctacgagatatccgacaatgattccgcagaatatagggattaattttaacagtcccctgcctttcagagagacgatgacagcagtgattagggagataagggccaatacccagttctcgcttgccatttttaccccggagcctgccagggaaagcccgattaatatgattaccggaccgatgacgatcgggggaaatagtttcttgataaagtcggtgcctcgtaattttaccaacaggctcataagtccgtagaccgcacccacggcaaccattccggagagggctccggccataccgtacaattcactggctttgatgattggggcgatgaatgcgaaactacttccgaggaagatgggaacgatgcctttcgtcacaagatggaaaattaatgttccgattcctgctgtcagaagtgctgtcgatggatccaagcctacgagtagggggacgagtactgttgaaccgaaagcaacgaaaagaaattgtaccccgataactcctttttggaaggctgaaaggtgattcgcatccatgattatgtatattcagatgatttgacaaactgaacaaaggtagttatttggcggtgattttcaaaaaaagccttacttttgtggttaaatgtttgtatttaaaacaagagctatgataaaatcaatgaccggtttcggtaaagcaacagtggactgcgggacaaagaaagtgatcgtggaggtaaaaagtctgaattcaaaacaattggatattaatttgagaactccaagtatttacaaagagaaggatattgagatccggaatatgataaagaacgttctggagcgcgggaaggtggacgtgtatatctattttgataacgcggaggacgagaaggatgttgccgtaaaccaatcggttgtgaaacaatattataaccagatgctggaagttgccggttcgctgggagtagaaatcaacaagagtgagttgttgcaaaccatcatgcgtttccccgatacgatgcaagccaagatggaggagttagatgaagaaggttggaattgcttgaaaagtgctatcgagaaagcgttggcggacgttgacgctttccgtattcaagagggtaaagttttgattgcagatattttgaaacggattgagttgatcaaaagtttatctggtgaagtaccccaattcgagaaacaacgagtggttaccatcaagcaacgcttgcaagacaagatgaaggagtggggagagatcaaaaatattgacgagaacaggttagagcaggaaattatctattatttggaaaaactggatattacggaagagaaagttcgtttggcaaatcattgtaaatattttgtcgagactgtggagaaagaagaggccccgggacgtaaactcggattcatcgcccaagaaatcggtcgcgaaatcaataccatgggttccaaagccaatgatcatgacatccagaaactggttgttcgcatgaaagatgaacttgaaaagataaaggagcaaagcctcaatgttttgtaacttgttacaaaacattgaaactaaaagataaaagctaataactaaaagttgaaaattgaaaagagcattcggtctcattttcaattttcaattttcaattttcaattgttatgggtaaggtaatcatattttcagcccccagcggatcggggaaaagtacgatcgtgaattacttgttggcgaaggatttgggattggagttttcggtgtcagcaacgtgccgagctccccggggagaggagaaacatggaaaagagtattatttcttttcgacggatgagtttaaaaagagaatagaggcgaaagatttcttggagtgggaagaggtttatccggggtgtttctacgggacgttgaaaagtgaattggaacgaatttggaaggctggtcatgccgtggtatttgacgtggatgtcgttggcggggtgaatatcaagaaaatattcggagatcaggcgttatctgtctttatcaaagctccttccgtagaggtcttgcggcaacggttgatcgggcgaggtacggattcaatggagaaaatcgagcaaagggtggccaaagcggaatatgaaatgacatttgccgataaatttgacgtggtcatcgtgaatgacaatttggacatggctttagccgaggcagaaaaagcagtaagagattttttgaaataatcggatggtgcaaggtcagaaagagaatagagaacccgttgtcgggctttttttcggatcgtttaacccgattcacaatggacacgtggggattgctcgctacttgttggaaaaaaaactgtgcgaggaagtgtggttcgtgatcagtccttgtaatccgtttaaagtggatcgtttccttttgccggaaacggatcgtctggcaatcgtgagcgccgctattgggggaattcccgggatgaaagcttgtgatgtggagttttctatgtctaaaccttcttacacggtcgataccttgcgagtcctgtttgatcggtatcccggtcgtcggtttgctttgatcatcgggggagataacgtaccggatttcccgaaatggaaagactatcattggattgaggcacattgttccatctttgtttatccccgtccggggatggtgaattctgaagaatctccgagtatgacgttcattgatgcgcctttgttccccttatctgctaccgagatccgggaaatgattcgaaaaggagatgatatttcaaatttggttccaagcgaggctttatcgttgatctggaagttgtattcagaataagtgagcttgttatgtggtgtaaaacaaaattggcagagatcttctacatctcataacgtgctcacttatttcacagaacaatgcttgttggaaaatttggatagaagaagatcatgttaccatgatgaacatcttgccagcttcacttcccgaaagctacataaacagttacgtcttggcaggttttctgacttgcttccttttcgtcgccttcccatctatgtacagacagtggcagtagagactaaagttttgaagcttacagctgcgggtacagttcccgactttcacgggattccctcgtaatgtcacgaagaacattacctttccaatacgtttacaaacatagggaaaataattgaaaatcggaaatagaagattgaaaaatattctttttcatgaggttcgtgttttttcgaataattatgagatgagttgtataattatgcatgggaattaaaatgtaatacacgtgtaattagatagttaagattaaattcgagagatcgaaaacgttgtaaaaagtcgaaaacaagttgtacttttgtgtggctaaaaataagcgaaattaataactaaaataaaataagttgtagtatgggatttgtaactaaggagaaattgttctccaaggatttctttatcacctacggatggttgttgggtggttgttttgtgtttgcattaggggctgtattatttgcagagccttacggttttgctcctgggggaacatatggtctgtccatggtatttcatcatttgtgggggtgggagactgaaattgcggccctttgtatggatgtgcctctgttattgctgggtatctattttttgggaggaatgtttggtgtgaaaaccattatctgtacgtttgctattccggcatttatgcggttgattcactatctttatggttacgatgctttgttggagccgggaattacagaccggacaatgttgaatgagcagttgctgtcggctattttcggtggtattgtttatggtatcggtatcggtatgattttcaaagcacgggcaacttccgggggatcggatattatttccatgattttgaataagtacacgcatatctctttaggaacattggtaattatcgtggattgcacgattaccttgtcaacggttgtagcctttggagactggcgtttgcccatgtattcttggattatcgtgttcatcgaaggtaaggtgattgacttgatcgtggaaggtgcttctgttcacaagacattgatgatcgtgaccaaggagatggataccgtgaaaaatataattttgaacgatattaaccgcggagctacgattttaccggctatcggggcttataaaggagagtcgcgtgagatgatttacacgatattaacccgtcgcgagatgatggttttacgtcacaaaattcgtgaaatcgacccggaggcttttataaatgttattgattccagagaaatattaggaaaaggattcaagtcactggatgcagaataaaaaaagaggctttcgcctcttttttacaatagaatatatactaaaaaagagccgaaaggctctttttttaatacatatccgtgatatcccagacaaatgcccggataccgttttctttattcacttcgtccagattcttgacatatttcaagatcagagggaccatttcgtcttccacgatggtcatggtggcggagttcatctccggccaggtatgagttcccattctgggttctccatccacggttccagccccgttgaccagaggccattgcgtgaatcctcgtatttgtaattggtcaaggataaaagcaacccgttccgtcaaggcttgattatatgatataaatactgctttcatagtgttttaggttttagattttagatttacgattccgtatcgtaaatctaaaatcaagtattatttatttctttttcgggagatctctttccgggttaaagtcagccatgaacttgaattgtttgctgagaatcttcttcttgtcacggctaccactcttgtccatcgcggcgtaaacagccggaacaattaacatggtgatgatcgtggagaagatcataccaccgattacggcgatacccatcggtctccaagtttcagaaccctcaccggcactaattgccataggcaccatacctaagatggtggttaacgaggtcatcaataccggacgcaaacgagaacgacaagccattgcgattgcgtcgtacaggcggatgccccgttcacgcatcaagttaatgaagtcgatcaacacgataccattcttcgtaacgatacccaccaacatgataccacctaaagcggcgacgatactcaaggtcgtgttcgtcagcaataaggctagaaccactccggtgaaggcgaatgggatagccaacatgatgatgaacggcatcttgaatgactcgaactgtgcagccatcacaatgtaaaccagcatcaaagagagtaacaacaataagaataaagaactgaatgattcctgttggtcctcgtagctaccaccgatgtacatggatacttcctgaggtatttccgtgttgtcgatgatttgttgagctgcaacagcaatatctcccaaggcaactcctgctgctggtgtgatagatacttttaacaatcgttgtttactcttacgttcgatatttggtggagagaagaactcttggatctctcctagttcttttaaccgtaccttctggcctttaccatcgggaattataatattctcgatctcggtgattgaagaacgatatttctcgtcaaagcgcacgataatatcatattcctctccgttttccttgtatttactattccggtaaccatagatacggttacgcatgtatgaacctacttctgatgtagtcagaccgtggcgagccagtttatcttgatccaacatgatacgtaactcggatttatcttcgtcacgactgatcttgatatcctcagctcctgggatttggcgggctttttctgcaattaggtgagctaagtttgtggtcgtgttgaagtcatgtcccatgatttcaatatccacgttgttaccacccatggaaccaccgcttgatgttgttaccgtgtactgtagaacatccgggaatcctttcaagatgccacgcacttggtcggcgatctggaatacactacgtttacgttctttgatatctgtagttctcaaacgcatgttcaagatattgttacccgtgctattcatcatggaagcgaaagaggcctcttcctcactaccgtatgacaagttgatcaacttgatttccggaatgttcttgcggatgatggaatcgatttccaaagcaacttctctcgtcacttccacgcgttggccggattgcatcttggcgtacacgttcaagtagttttggtcattctggggcatgaagtccgttttgatcaatttagccatgaacatggaggcaaagaatagggcgaacatgctcaagatcgttacggtcttgtgaacaagtacccaccggatcaatttctcgtaaacactatccagtttgtccaacattttggaaacgaagttgtaaaaactgaatttgcctgaatccgtcttttcttggattttcatcaattgagaacacaacatcggggtcaaggagattgcggttacggttgacgtacataccgtgatacaaacgatccatcccaactgtttgaacaaaataccggtcattccggtcaccagcgtcaacgggaagaacacggccacggttaccaacgtcgtaacgattacggacaaccaaacctcgtttgtaccgtatttagcggcctctcgcggacggctaccccggtcgatatgtttcgtgatgttctccaataccacgatggcatcgtccaccaccataccgattgcgatggacagggacgacagtgatatgatattaagcgattccccggttgcaaacaggtaaatgaaggcaacaatcaaggagatcgggattgtcaacgcgatgatgaaggttgctctccaacgtcccaagaataagaacacgatcaaaattacgaagatcaaagcgtacatcaaagactcctgcaagttattaatagacttgatgatgaagtccgagttgtccgaaatgatttggaatttaatatccgtgggtaattccttttgtgctttttcaatttcaccttttgcctgttttgcaacggccacggcgtttgcgtcagtttgtttggttaccatcaaaacaccaccccggcctctgttaatcgtttgttccagcgtaatatctttcaacgtatctcgtacgtttgcaacatctcgcaagtaaatgattttatcattctgggtacctagcacgatatttttaatctggtcactttcttcgaattctccttccacacgcaaagtataatccatctgtcccattttcacgttaccggaagaaacatctttattttctgccaagatcttgctgccgatttgttccaacgtcaaattgtaagcgtcaagtttattggggtctaaatccacgtaaaccacacgctccggggctccggccacgataacggaggcaactccgtccacgcggtttaaccgggtaatcagcttgtcatccaaaatcttgtcaataccgggatatgattcttttgcggttacggcatagatcaagatgggcatcatggacgtgttgaaacgcatgatggtaggacggtctatatcgtctggaaggcgcgacatggctttatccacggcgtcacgtacgtcgtttgaagcctcgtcaagattcacttcccactcaaactccaaagagataacggataagttatcgtaagaagttgaggtcaattccttcaagtcatccaccgagttcaactggtcttcgaggatcttggtcacgttctcttcgatatctgcggcgttagctcccggataggttgccattaccgtgatataaggcgggtccatcttgggatactggtccaccggtaattgtatataggaggcaacacccaatacgatgatggcaaggaaaaccatcaaggttgaaatgggtttgttgaccgctgtattgtatatactcatattctgatttttaaattttaagttttaaattttaagttgcgggattctcctattttgtgatagaaagcggtgatccgtcaactaaccggccttgaccgacaacgatcagttcgtctccttcgtggatttcgtcgctgattagctcaacttgatcctcgaaacgtctgccaagttttactgccacgcgtttcgcctttccaccttgattcaagaatacataacggtcgtttgaaccttgcaatttcaacaccgcaattgcaggggcaaccacggtctccgtgttaccgatgaaaaagtcgatggttccgtacatccccggtcttagtgattcatcgctattcgggatttttacttctaccgtgaatgttcttgaggcggggtcgatcgtcgggtaaacgatgctaaccgttccatcaaatgttctgtcgggatagatattgctcttcaactgaactttagttcctttttgcacggccagataatattgttcggctaggttcacgtaagctttcaacgggttaattttctcgattgcgataatggacggtttgctagcaccaccaaaagcggctcccgtgtaaagttctccgttctcgaaatattttccggttacgattccgtcaaaaggagcgagcattttcgtgttttctttcaagaaatctacgtttgctttggccacctcgtattgagttacggcagcatcgtaagcctgtttggaaatacttccggtttcatttaattggacggcacgattatattctgtttctaggttttttaattgaacttctgcctgaacgagctgggttctatccatttcaacgagtagctgaccttttttgatgcggtcgcctacttccacgtaaatcttctcgattcttcccgtggcagcgggggcatagtacacttgtttgtcagcttgtaagttggcagtataatccaatgttttggcgatattcgttttctctaatttttgtaccttaacaggaaccgcctccacggtttcctctgtagtcttatcttttttgcccgagcaaccggcaaggatagctaatgctataatcgataaaatgagattctttaccattgtatttcttttttgtttttattattcaagttgttttatcgaggaagttgattatacaatttttccaagcttacttgtgcttgtagcaagcttagaattgcttccgtgtaatttgtttctgcttgcaggtagttattatttgcttgtgtcaaatccaaactggaaacagctcccagctcgtattttctctggtagttctttaatacccgcgtggcaacatcgatgttctctttttgcaggttgtaattctccatcgcatttttcaagttgaatttcaactgttcgtcctgcacgttcaactggtcttgcaacaaactcttctgcatataagattgttccaatgtgattttggcctgtttaaccttggaatcccgttgtaaaccggagaaaataggaatgttcatcgtgagtcccgccgtgtgtttcgggctcatatccagtgccggtttcaaaatcttgtagttgaagttgtaattaccggagatcgtgggagcgtaactccatttttccagccctaacatctttttattcaactcggtttgcgtggtaattaactgataactcaagttattattaatgtcgaatttctcaacatataaacgagcggatttgtcgttttccaagaatacgttcagagcgtccgttagtttgatcggggttcctgcttccaatcccagttggaggcgtaataaattataatttacggcaaccgttctttccatagataataagctgtttttcagttgtcccacgttaatgcggatttggtccacatccgtcacttcaactgttccggccttgtacatgttatcggtgtgcttgtaaatttcattcatattctctaggttctgacgcaaaatgtcgagcattctctcggatactaacaccgtgtaatatgaattataaatattctcaatgatgtccagctccgtggtttcaacttcttgctcggttaggcgtaccgcaattttgctggtttgtaagcccagaatccattggccgctgaataataattgttgtaaacctactgttaggttggattggtctttcatttttatcgcttgaccgccgaaatccatcttgtagttgaaattagtggaatacgttacggtaccattgacttgtggtaacccttgtgatacggattcccgtaccttctggcgatacaaatcaatattcatctgcgaagattgcagttccttgttgtgcttgatggcaaactccactgcttgttgcagcgatatcgtttgcggcgcttcctgtgcgtggagcatccatggcacgaaaaacattaggaggaaaagagtcgttccttgtttcatagattatagatttaattatttattttttccgggaaatttcaaatgttttttctctcgtaacaaaactcataccaaaaaattcaatcatccgtcttctggtcgttttgcagtgttctttaagcgttcgaattcttttaggcctttttctgtggatatagcgtaaataaaattgataaagatcgttgaaataattaccgaaatcgggtattcaagcttactggtgatttcaggatcttttagaaagtgcaattgtttgcctaacaggtacaattgtaattctttgtcaatatccttccggaaaagttcttgttttataccgttatccagtaatgccacgagaaacttcttcgttgactcctcttcttgcttggctactctttcgtacccggccgggtgatatttccttaaatcaaaatgattggcaggtaagcggctacccaagtcactcaccataaaatcccgaatttcgctcatgaccacgatcggatttttcttggctagttgattaacatccgtgttttttattttttcatctctcctgtacaacatcacttgctccaccacgtcgtctttattggcaaactgttggtagagtgttttcttcgaaattttcaagtgattcgctatatcatccatggaggtacttctcagtccgaatctcaaaaaaagattcgagatagcggctataagttcccttttttgttttatgttttcttccatagctgatgtcttagtgtttgtacttggaaacgaaacgtatttaaaacgtttccccgtgcagaagtatacaaatattgttccactaatacagcacatgtgttaaagtattgttaaaactcttgtcgggcgcaacttttcaatgattttaatcttattacatcattttcaattttcaattctccattttcaattccattatcctatctttgtgtcatgattgatcaggctaccatacagaaaatttttgatgcggcggatatatacgaggttgtttccgatttcgtgagcttaaaaaagcgaggtgtgaactatcttggtttgtgtccgtttcataacgagaagacaggttcgttcaccgtttccccggcaaaaggcatatataaatgtttcggttgcgggaaagggggaaatgccgtgaattttatcatggaacacgagcagatgtcttacgtggaggcattgaaatatctggccgaaaaatatcatatcccggttgaagaaaaagaattaacggaggaacagaggaaagagaagacggaacgggagagtatgttgattgtctcttcgtatgcgaatgaatatttccaatatcaactgtggaacacggacgagggacgttccgtgggattgggttacttgcgccaacgaggtatcagtgacgagatgattcgtaaattcggtttggggtataatccggaaggttggggagccttcacgaaagcggctcaggaaaagggctacaagaaagagttcctcgtgaaaacaggattgaccatcgagaacgagaaaggacttttcgatcgattccgagcccgcgtgatgtttcccgtgtttgatctggcgggtaaggtgattgccttcgggggacgaacgatgacgactgataaaaagatttcaaaatacctgaattccccggagtccgagatatatcataaaagtaagaccctttacgggattttccttgccaaaaaatctatcgtgcagcaggatcgttgtattttggtggaaggctacacggacgtgatctcttttcatgcgaaaggaattgagaatgtggtggcttcttcgggaacctctttgacgatcgaacagatccggttgattcgtcggctaaccccgaacgtgacgatcatttatgacggggatgctgccgggatcaaggcttctttgcggggaatcgatctcgtgctggaagagggactgaacgtgagagtgcttttactgccggatggggaggatccggattcttttgctcgaagtcacacgccgcaagatttggcggactttattgcgaataacgagacggattttataaatttcaagacaaaattgttattaggtacggcaggggatgatccggttgaacgggctcgcctgatcacggacatcgtgcgaagtattgccaagattccggataacatagtgcgttcagtctatgtgcgagaaactgctcaccagttggatgtcgaggaacgggttttgtataccgagattgccaaggtccgcttgaaaaacgaagaacaaccttccaagacttctgttacgactccggaattgaaggtaacaacccagacacgaggagcgactccttgtgacatcgaggaaagtgtgttaattcgttacctgcttttatttggggatagcgagttgtacgaggaggaacgtaacgggtatatgcggagcgtgagtgtcggggaattcattatccgggaacttggggaagatgatttggaattattaaatcccgtgttccgtacgatgcaacaggaatatcagcgtcaatatgaatcgccttcgtttatcccggcccggtattttatttcttacccggatataaaagtcagtaccatggcggccaatatcctgagcgaaccttacgagttaagtaagatttggtataagatggatagttttgtcgagacggaacaaatgaaactcggtgaacttttacctaaaatactagacaattacaagatgcgaagagtagaaatgctttcccgggatatagacaatcgcatccttgaatcacagaatagtaaagatccttctcaaatcatagaacttctcaagcgcaaaaatgccatcaatgtcattcgtcgtaaattaaacgagaaattgggacgtacggggattcattaaacagaaattggagcagaattctaagtttattttgaaacaactgctctctccagtctctcggggaatcgcctggtaatcagcttttccccgaggggctggagggggtagcttatagatactggataagatttgttaggcagttccaagaaatctttacttaaggtaaagcaacatatatagcgtgaaaggtaattctgttccgtcttggaatgtgcatttgcaaagagggaaaggattttcttcgtttcgcattaaatttacgaattcccattcaccgattttctcgtctttatccgtgaaaacaatgacactttcgtgcatatttttttggataagttctgtagccaattcgttataacgtccttcgttagtgtagtgtatttcctctattaacggttggatattcttgtattgtccaatcgttgtgcgaacccggatgttgttgaaatctgtcacccaatgtaaattaccattttcctcgtttagtgaaatataataatggtctcctccttctttctgtagtgtgacctctttgggcattctcctcatgataaagcgggagataatgtcatcatcatttatctccattttgatcgttgcactgtaaggggggcattttactgtttgtatggcttcggaggtttctttgttgtattgctgtgccttgtgtaatagaacttctttgccattggagacttctattttaaggtaaaccccggtactgtaatcaatcgttgcaatgaaatgaagatcattattggactgatccgtcttggaagagggaaaaaaggcttccatgaatccggctgcattgatcgtggtgtcgaaatcctgtttgtttttgttccaaactaatttcattccggtaaacgtgttctctttgctttggtctgaactacgagagttcataaaatcggaaatatcgaaatagaagtttataccataataattcatgatatctaatatcgaattattttcttccatctcggcgaattcctctaccaaggttatacatgaattaatattgtcttcgatcaaagttcttaattcggaagttggcaacttcgagtacggcttgtcataatcggtaataattttgtcatcgtcatcactacacgctacaagagtcgtaagcaggcataatacatacaagatttttctcatttctttatttttatggtgataatatcgacaaaagtataaaaaatgatatagcttacataggacgttggaattattcttgcgagagtctatttatttttattggagcgtgagtaataaaaaccgccgtcctgcactggacggcggttttgttttatataaatttctcccggtttcgggtgttgttcagtccgaagatgataaagaggacagaggcgatcaacatattcatccggcaatggaagaccgtgttgaaaaatatctgcgggttcttgtcaatgggaacatcgtagggattcaggaaaatattccattggctatccccgatagctccctgtatcatggagaataacaatccgataatgatgatcaccacggaagtcccgttcccgttcttgatcatcgtgctcagcatgaatgaaagcgtaccgatgaatagagccggaaccatggcttgcaacgtcaggcccatcgggggaaccgacacgatggccaaatccgttaatagagcaagaaaacaggtaattacgaaacagatcacgtaagaaatgatcagtcgtaataaccagaccttgtaactatagtttgggattccaaaaataatctccacgatcttggcgtcctgatcgttctgtatgccgaaacacatcgggtagaaaaccaacagaatgctcggtaacatcaacatggagtatgctgttgcctgcgtgatctcgtcatcgcccagtaatttcacgatcaccgtgatcacgtagaaggcgagggcactcaacatgaaatataggaatttattcccgaatataatcttgatgttatattgtaccagcttttgtagggttatccaaaattgcaccataataattgaaaattgaaaattgaaaattgaaaatgtgaataaattcagattcacattttcgaatcttctaattttattgtgttataatttgctctttgttctcgatcttcacgcttctcaatagccacaagtaagagtcctccagagccgggagaatcttctcggcagtctcggtgggcttatgctcgctaaggcaacgtactttgatcatgtcgccttggcggatgtggtggacgatcagcatatcggacggtaattttgcgaaatcccgtacgggaacttcaaaggcccacgtaacatccttggcaatattggccatatcactcggcgtaccgtggtatttcagaatacccttgttgatcacgccgacctggttacaggaactggcaatatcctctataatgtgggtagagaaaatcacgatccggtttcgggacaattctacgagcaagtttctgaaacggattctttcccgcgggtccaatccggctgtcggctcgtccaccacgagtatccggggcaggttcaacagggtttgtgcgataccgatacgttgtttcataccaccagaaaaacctccgatcttcttgtccttgttctcgtacatatgcacggcggaaagtacttcggcaatccggttgtgacgtacctttttattatatattcctttcaacagggcttggtactccaaaaattcccatgccgtgaggttctcgtacgttccgaattcctgcggtaaataaccgatcaagccttgcaactcttcccgtttcttctgggtatcgatgccgttaatgaatattttcccgtaactctgttcgaagaccccgcaaatgatacgcatcagcgtggttttacccgctccgttaggacccagcaaaccgaacatcccggtatgtatctccatggaaacggaattcaacgccttgaacggtttcttcttcaccccgataaacggagccttggaagccagacggaaaatggtctttctcagcatacggaaccgaccgtcaatcaaatcaatattaatgttttccttgttgatcttgttggacaggtagcgggcggcaataccgagataccagaacataccgaggaagatagctcccccgctgttctcaaatttcttgcttgaccagatcaggataaccatgggaccagcatagtaaatgacaatagcgatgatccttagcgtcttggcgataacgttctgtttccggttctcgcaaaactccctgaaaatgttcatgatccttagcgtcatcgtccaggtaatgaaagcaaaaacaattgcccaaaagaacagtacttggtagctgaacgtgaagtaatacatgaatcccagcaccggcaacgaccacaacagcggttgcatatcccgccatttgcgataattcccttgcagtccgagacgttcccgaattttcaaaccggaagtccattcccggttgaaacgtgacgggcgtccgtacactttaaccagattgcatatcttgatctccagctcttcgttagccgggatgatattactttgcgcccggcgtaaactgtcttccaagaaccaggtcactcccggtacgagaatcaccgtcaggatcacgtatagaatccggttcagcagggtataggtccagaagtacacgcagattacggccacgacgaaaagcacgatttgcaatagtttcatgaaaaggctttgtgtccgcaggcggtataaagcgtcttccattccggaatacaacgttgggataatcaccagagtcagcagcgtactcatggtaagtcccccgattaccgtgatggcaaacggggctcccagcccggacacgtattctccttgtcccatggctaatgggatcatggccacgatagttgtgattgccgtgatcagaatcggccttaaacgggataacccggccgttatgatcgcccgttgcttgcggtttccgttgcgacggagtaaagacgtgtaatcgataaggatgatactattatttaccacgataccgatcaggataatgaaacccacgaaaacattggcattcatcaatgaattgctcgtgaataataaagccagtaaagaaccgatggcggccagcgggatggtaaacatcagcacgatgggagccgtggtcgattcaaatacggcagccaaaatcatgtaaattaaaatgaaggcggccaagatgaggaagatgaaatcattcatttcgttttcctcatgtacgacttccacggcgatacccgtcgggacatccatgctttgcaccagttcgtcaatctcttcccgtgcggactccagcaaatcctttgattcattgatgtctgaattgaacatgtaaacaaggttcacctccttttcctggttgatacgggtgatgtttcctttgtcacgtcctagattgatgcggctgaaactccgtaattgaactaatccgttgttcttattcgtgacttccagattgcgtaaatcttccagtgtccgggtttgagttttctgatcatcttcatcataattgatgtcccggatcagaatgtcatattcctggtttccggctttatatttgacctcggctttactttgaggctggaaattggaaagttcttggcttacattcccgggttcaacctcgttcatacccatgaggtactggtcaaagaaaattttggaaaccgtgcttccctgggaaactgaaatatgggaatttgaaatgttatccaggtcatcaagttgatatttcaaatattcggcaaaattcgccatcgactcgaaatcctgacctttgatgatcactttttctgtttgactacccattcccagcattttgagcaaggaactattaccaagcattccaccgcccccgctgcttcctctaaagttctcgctactctcgctggcttccaagctaatctggttaatattaaccgtttcggccaaccggagtacttcggttttcagttggatgagagattttttatttatcttttgataatcatctttcagtcggatcgtgagccggacatcctctttcataatgttggaagagaattctttgatttccgggacttcgagtaattcgtcctcgaaaagacggatcatttcgtcggttctttgaagcgtgtagcctgttggcggggtgatatacacgttgaacgtgttcaattcaacctctttcagcgtgttcaaggttaaagaggtggatagcaccacggtaaccagtaaagtgactagagcgataatgatcacttgtgccggacgccgaagtgacatcttgagtatagcaacatatatctgcaccaatctgttatggatggataggttgctgaaattgacatcttccggagtcttgcgcaaaatagcgtttaccgccatcggtatcaacagcaaggccacgaccagcgatatggtaagtgttgccacgatagaaattccgatgtgttccccgatcagcttgaccaagtaattgtccgcaaaaaggaaaggcaggaacacggtaatcgtagtgaccgtggccgccatgattgctttccacacttcggtagttccccgcacacaggcctcgtcggtggaaactcccaaccccttcagtcgatagatgttctccataacgacgatggagttatccagcaacataccgacggcgagtgcgatacccgtgagggttagcgtgttgatcgttattccgaatagataaaagaaatagaatgacgagaacacggaaatcggaatggcaaaagccacgatggagatgatccgtattttccggaggaacaggaacaacacgaatatggccagtaaagctcccgaaagtccgagatcgatgatttggtcaatgtttttattcatcacgtcggcagcgtcgtcttccacttcaataagaacccctttggattctaattctgcattcaaacgatcaatttcctgccgaaccttttcggaaaggtcaatcacgttagctaacggggatttggacaggatgcaggaaatcacctctttcccgttggtacgggcgtaggattcctcttccttcacgccgaactggatttcagcgatgtctttcaactggatcggaccatcggcaaccacgatacttcccaagtcttccgtggcaaggtattcggctgtcacgttgacaaaataacgtttattgttctcgtaaaccgaaccggcaaaactcttttctgccaagttgctcgaaatggccctgctgatcgttgatgtcgtaatgtttagagccttgcatctttccggatcgacaataacttcgatgcttttttgtcgccctcccatgatggtgacattagcgattccgtcgatattttccaggtagggaacaatctctgaatcggcaatgttacgcacgtagtcaatgtcgtcctccccgagaatccgtaggttcatgaacatatcactggcggaacccgaagaagatttgttcacgtttaacctgaaattatcaggtagattcggggtgatgctttttattttttcttccagttgtagaaaggtatatttcaagtcaacgtcctgtttgaaagagacggttacctgtcctcctctcgaataaatctgggtttctattttttctaccccgttcagggcactgacggccccttccacgggaatagctacttgattttctatataggaagggtcggattctgtttcggagctaatgctcacgctcaacaccggcagttcggcattggggtataattccatgggaaggtgtttataggagaaaattcccataagtaccagtccgatgaaaagcatcgatacaagaacccttctttttataatcgtgttcatgatttctttctgtcaataacgtaatacacacacgggataacgatcagcgtcatgatagtcgaggtcagcaaaccaccgatcacggcaagtgccatgggcgagcgcaaggaagctccctccccgaatccgaaacacatgggcagcaatgccagaattgtcgtggcactggtcatgataatcggacgcacgcgatgctgtgctgccatttggatggcctcttccaacgggtgaccctcttctttcagacgattgatcgcatctacgagtatgatagaactgttcacggcaatacctgccagcatgataatcccgataaaggccatcatgttgagtgtttgtccggtgagcaggaacgctaaaatacatcccacgccggctaacggaatggtcagtaggatcgtgaacgggtggcgcaaggattcgaattgtgccgccatcaccatatatactaacaatatggataaaaacagggcgaatcccaacccgctgaatgactcttgtcgcatctcttcctctcccgttatcttggctgaatacttggccgggaattcaacctcggacaatttagctttaatggcaggggtgacatggctcagtgagtattgcttctcgagcatggctgtcacgatacctgtccggctttggttaacccggttaatctctttcggggctgacgtgatttcgatgtcggcaatctctccgagacggtatttcttttcgccttgtacgatttcaatatcataaatttcagaaagggtcacttcgggtactttgatgttgatgtcgatcgtttcgccttgtgtttcgaaagttccggcatccttacctgccagtttctcgctgacttggttacttaccgtggcaacatcgatcccgtagattccacttttcaagcggtcaatcttgatatttacttccggagcccctttttctagggaagatttgatatcgtatataccggggattccgatgattttctcttttatctcggtacatagttcatccaacaattcaagttcctcccctttcacctcgatcaccaatggtgccccctctgttcccagaatactttgtaaggcagattcccctttctcataggagatttccacgccttccggcaagggataattctcgttaatattcgtgataaaataatcggcatccagcttggagtctttttttatctttaccttgatctgggattgattttctgattccaactttcccccgctttggctttccaagttggatggacctaccagcgtgtattgccattcgatatcatcttgccctagcgttcgaatggcatcttcaatggttcccacggcgttatccgtactttttaaccttgttcccggttccatggtaacgaggattgaaaattccttcgactctgttttgggcatgaattccattccgattaacggtaacatcaggtaagagacgatcataagaatcgtagcgacaccaatcaccaagtatttcctcttgagtacttttccgacgaaattcccgaaacctttgatcgtgatggcatgactggaaatgttgtctttcttccgcatgaatttcgatgctagcatcgggataaacaggatggaaacaaacagcgaggataacagcgagaaactaaccgtccacgcttgttctttaaacagctctccggcagctccttgtaggtacacgatcggaaggaacaccacgatggtggttaaagtggaggccgtgatcgctcctgcgacttccgaggtacccctcacggcagcctccgcgggtggcaggttattctcatccatgtttcggaagatattttccatcacgacgatggcattatcgaccagcattcccgcacccagcgcaagtcctcccaacgtcatgatgttgatggaaaggccgttgaagtacatcaaattgaacgtggcaataatcgagatcgggatggagagactgacaattaatgtcatgttcactcgtcgcaagaatatataaagtataataacggcgagaatgatacccattaacgcggaatctttaacctcgttgatggaactcccgataaattctccctggttactgatgatatggaaatcatatcccggcagacttttacggaattcgtcaatcttggccagcaagttttccacggcatttaccgtgttatatttattttctttgtaaatactgattcccagacaacgttctccgttgtaacgggccaaattttccgggtctttgttgcgaatggacacggtggccacgtcttttaggtataccggggcttttgttttactggcactgcttgtcgattccgaggaagagggacttccgccggaagaattctctttaaatgccacgataatgttttcaatatcttggaggctggtaattaggtttacccctttcaccgtgtattgaatatctccgtccgtgatcgttcccccggaaacattttgattgatggccgtgatttgtgaggcaatcccgtcggctgttaacccgaatgcctccagcatgtaaggattcgtggatatttcgacgatagcctgttcctgtccgttcaactgaatatctgcgattccatctacccggacgagttcattacgcatgtaattttccgctatctttcgcaattcgttcatgtccttcacctcgttatgggtgagggcaatggtcatgatcggtgttgcgttggcatcgtaacgggtaacgttgacttcttcgatggtttcatcttgggaaagagaagaaacgcttcgctgtaaatccaggaaagcagcatccatgtcttgatcccacccgtattccacggtgactttcgtgtatccgactttcgtaacgctgtacacactcttcacgccttcctggcgtgcggctgtcgactcgacattggtcgtgattagtttttcaacctcttcgggtggtctctgaccgcttttcacttccacgtaaagagcgggatttttcaagtcagggaaaagatctgtccctaatttattataggatattgtacccagtaaacataccgccagcgtgagcatcaatacgcttaccgggtattttactgcaaatttggtaatactgttcatgtctttttatttcatgatttttactttgcctctgtttctcaggaattcgtagcctttcaccacgatcttgtctccttggttcagaccgctttccacctcgatgaaacgatcgtcactgataccaaccgtgatgattttttccatagcccggttttgttccactgtgtagacaatccggttcccccctcggcgggagttaacgatgtccttcggtatgacaataaccgaatctttttgcaaagtaataatctctcctttcgcgaacattccgggacgtagtttcagttccgggttgttaatcgtgatgtatccggtgtatgtgcgggtatcctcgttgattgccggggatagctgggaaacaaggccggacagggtatctgatttgatattataattggtgaccaacactttttgacccactttcaccttgtcgatcgtgttttccggcaatgcgatttccatgtacatctggctgtagtccatcaatccgaccatcgtttcgcctgatgcgatctccacgttcggggtaaaatacggtaggttcacgatagctcctttgaacggggctttaatcgtgagttttgccagctccgtgtaggccgattccaatgccgattgcgcctgtatgtaactactttcagcatttagtacatctttttccgtggctccgcctttttcaaatacggctttttgaccttcccactctttcttggcgatatcgacctgcatcttttttgtcgacaatgatacggtattttcgtgttctttattatttagcttgataatcacggcaccttcctcgacaatgtcgcctagcttgtaggggcgcttggtcttggggttaatcatcaactcgtatttaccgtttgtctcggatttcacttctaccgttttggccgctttggctgttcctgtcgtggtggtcagttcccggacatcacgttttccgacttcggcaagccagaccggagtggttgtttctgaagaagaattcattcgttgctcgttgcaagcgttcaaggtgtaagccaataaaatcaccccgatatattttatagatttgttgatcatagcgttttgttttatattttgtgttagggttatttcaataaatcaaccggtaaataagacttgttgttttggtaatcccacagggtttggattttcagatccagtaatttcaatttatatgaaatgatggcatccgtcaacgagtttttcgcgtcggtcaactgagtctgttgatttttaagttccataccggtaaggttcccgctacgatatttttcaacgtttatgtcatacgtgcgttcggcatttttaaccgtttggcgggcgatttcgatttgtcttaataacttgggtaattcccgacatacctgacgtacatcgagcatgatggattttctttcttcctcgttactgatttctgtgttctcgttggataattccgtgctgcggatgtttgcttttcttgcgccccaatcccagatcggcacggtcagcgtaatcccgatcgtttcattgtcatccggtttcgagaaagctccgttgaacttgtctccttggcccatcaatcccactctggcggagatactacctttaaacttattgttgtcttttgcctcgatcaagctgaaaataccttcttcaatggcaatttgttgctggcggatctccatgcgttgagttaaagcatatttgacagcttgatttacatccacgtgaaccgaatcaatctggatattaggtaggatgctgatgtctatatccaacggtaaacccaaggtttgcttgaattgatctttggtattctcgtaactcgtttccgtgtcggcgagtgaattctcgttcgtggccaaggtcacttccgcttggaaaagttcttccggggcaatcaaaccttgttccactttatttttgattaattcgtagttttctttttgactctggaaagcttctcgggcagtgactaatcttttataagattggtaaacgccataaaacgccgaagtcacgtttttctcgatgttcagttgggccagagcgtattgtatttttgctttctcaagattgaattccaaccttttcaattgcatttttgtcttgttgtaggtaaagatcggttgctccaaatttaagctgagattatttgaaaaagaagtacttttggctccgaaagattggttgtcatcatcctgccagttgaacgagttgctgagggtgactgttccgtcagtccactttatcggttgactgatcctaaagtccaaaccggaactcatggatttacgggtataccattgcgtgttgtactcgtcgaacgacgtgcttctggtatattgaaacgggctcaggttcaaactgaactgtgattttaacgaagctttttgctggatcagagccagctcactttgttccaagctcattttactttgaatgatggaagggctttgttgataagcaatttctaaagctttttccaacgtcaaaatttcttgagcaaacgttgatccggaacaaagcatgagtattcccgaaataatcaacgatattgacgcgatctttttcataatatgttgttgttatttttatttgttattgttcgtgtacacccatttcactgcatcggcaaagatgatttggtttgattccgatcccttgtcacttaaggtgatcttggcttctcctgccgagaaatagaaagatcctagtgtcatccatccctgtcgtccccgacccgtttcgactgaaatttcttcttctccgtcatcatgttttaccgtataatattgcatttttttctcttcacttcctctacggcgccatcccatcatggggagttcggacgtgtacacgaatacctcgtagaatcccggaatttgtatctgggtcgtccattccgtcttgttactaccacttccggattttttgtacaccgcactattgatatagtcaccataataatttaccccgatggtagctgtccatttactagggggcatccagaaattcaagtttttgtatttatcttcactttctttcttgaagaaagattgtagtttgttcttctgattggattcgataatcctgaatccgggatcttcattgtctaccgtgatctctttcgggttaaacgtgaaaagggcggcatttgagtcgaatatgcctgtaaccgtgtcggtcgtcgtggttgtcactttggcgaaattctgcatgatcgtgctaggtagattctgcgagatgttcgtgttaatcgtgagattactcggacgttcgtcacatagaatacgaatctctttgtatttccgcggttcgataatataatttttcgccggtttggattccatttgggctgctcgtcctcttcttccccgcggacctccggggaacataccgcctccttcttcaacattgacggagatcacgccttctacattcgtggggttgtacacttggaacttcacgatatatttcgtgtaatccccgatttccacttgatcggcatccacccccttcacgataaaacggggcgtgctgttgatcgtgtaccagttcgggataaaatccattagattgaaatggaatttacgtataaactcgctgtttaggcgggtgaaattaacttcttggaattggtatttcttcatgaactcagccatgaattccttgaattcgtttgatgaaagacgggagtttatatagttcctcaggtaaacgcccttcagtttcatcatttcgtaaaatacctctgtcgaaagcgtgttgtcaagtacggcttgttcaaaacttttcccgttcaagtaagcagctgcacgctggtcatcgcccatcccgttgaacatccggaagaaatgtctgccttgcgtgctttcctcctgtttgagcatcgtgttcatcacgatgtctatgatcggaaaattttgggagtagatagaccccgcgtaattgaagtacatagatgacaaatcgtacttgtttagtttagaggtaccggaccattctcccgagaacatattcacaaaagtatttccatcctcttggaacgtttcttccgagagaagaactcgtcgagcaaaatcccgtatgacgttcatctccacgtcaatctcttccatgccacctccacggggatcattgcgtccccagtcagctattctttctttagcgaatttgaaattactactgggtagggtggtggcaaattccggaaggaaaaccatttccggttgtgtttgctcgctgtttcctttccaattgcgcacatagcccgtgtaggaaatgggcgtttccgccatgatgaatttttggtacgggtatttacgcccttttctcagttcgtattcggatttcacatcttgaaggaatccggataacgtgtccgaaatgttaggaaaaacttcagaatagaaatcgtgacccttaaaattgtataattcgatctgcacagaatcgaccaagatactcttcttctcgtaatctccgatggctaaactgatgccgggtaattgctctttatttcggaatatcatcgtgtcccccgattgtgaaggttgtccctgtgaaagaatcgtccggtcattggaatgaatcacttttagcgtgtaatttgagaagttttttcggatattgtaaggagcctccgggtttaccggtggaaaggtcgaggggtaccacaagcattccggggtcagcagggtaaatttgtcctgcacgaaagcgtatcttttcccgaagcggagaatactgcttccggtttgcgtgtcgtaatattcttcgtccgtgatatctaggtaacaaatgttctcgtcgatggaaccgttgtacgtgatgtccagttcaaggctctcgtacgggtggagtttgtgttctactataataacttgtgcgtctcttttgtagggaatatcttctccttgccgggttaatttctcaatttgaagggaggggttcaggtagaacatgactttgtcgacctcctgatgattccggttctgaatttttatgtgtgaattgacggaaatctttttatcgttctgcgagaatacaatctcttggtcaatcaaatgaactttgtcaatgttattgtattttttgtatctttcagagtataatttgcgttgattatcaatgtgattgaaccggttgaaatagatgaagccacagctgatcccgatgatcaggatcatacatcccaaagcattcagcaagatatttttcttgggatgcaacggtaagcggttgaccatagcgatggtaaacgtgagtaatcccattcccaagaacaggaatgtcaaccgttgaacgagataggggaacaagttcgtgtgtcccagcacgtcggaaaacatattcggcaccgtgagggcgaagaagtcaaatgtcccgtgttcggcgtctccgagataagataatgtcaccccgataaatcctagcatgatgacgaacgtaaccgcctggttacgaatgaaactcatgatcacgaacgatagtcccagcacgaaaatcagtgacgggatcgataacgtgagtaggtagaagaaataggggaatagggtaaacggggattcactcgcgaacaagtgaatgaaaccagcgatgagtaaagcgataatatttaacgatacaaacactttcacgatcccccatgttttcccgatgatataatccgcgttactcatcgggcgtacgtaaattacttcggctgtatctaactttttatctcgttttaaaaagctccctgccaagaatatggcaatgacagattgtgcgatattgaaaaggtagatattgacaaacgggatggaggatggcatggcaaccatgacccattcgaaccatcccaggtttgactgtgtacccatgtgaaaaaatacgataactaaaagggatagaatagcgaatatacgaaatagccagcttctccgcaggagcttggtctcgtatctcgatattgtgctgatgttgtgaatattcatcgctggtttcttctatgatttacttgaacaattcgttttctttgatcgcttcgacttgcatgttcattttgtctttcaacaaatagtccatgtagtaaacgtaggcatgttcgaggttcggttcgatcgctttgtgcgagtagccgtcaatggcatcggccacgacttgaatctccataccgccatccgtcggaatggttgaaataatcgggtatttatctttgatttcttcgtattccatatcggttacgaagatttcccatacttttccgcgagccagatcgatcatctcgtccggtgaaccttcaaacttcaactctccgcggtttagcaaggccagtttcttacaggtacttgaaatgtctcccacgatatgagtggaaaggatgatgatggaatccttgtcgctgatgtctgacaggatgttacggaaccgaattctctcttccgggtccagtccggtagtcggctcgtccacgataatgactttcgggttcccgatgatggcttgggcgatcccgagtcttcgtttcatacctccggataatcggttggcccaacggtcacggacttcaaataaaccaactttgcgtagcatctcgtctaccacttcggcccggtgttgtttccccttgatcccggcaagcccggcaccgtaatcgaggaattcccaggtttttagtttctcgaagaaacggaaatcctgtggcaagtagcccaacagggagcgaattgccttccggtctttggcaatatcataattatcgaaatagatggttcctgacgtgcaactctgcaatagagtcatgattctcatgagagaggtttttcctgctccattcggtcctaacaggccgaacattcccggttcgatttccaaattcaagtcttttaaggcttttttacctcccgggtagactttattcagatttacaatttttatacgcataacgctggtattttaggttggtataaatctatgcataataagccggaacatatgttaataaaatgtgaaatatcctactttgagtaagacactttttgcttaaaaaggtttattattttaacaaaatattaacacaatcgatcattaagaaccttttgacagcctgttaagaaaatatctcccggatgacccggatgcttttggtattgaaatctaaatttagatggaacccgagaaagagcagggctatgtcgagtaaaatcttgcgtccttgttgattaagcggaatgtttttcaattcttgcagctgacatgtgcagagggcatggatggctttggcggaatgcgggccggtatggtagtttcccggagaactcgtggggtaaaaacaaccgtcattgatgttaaacacgtggtcggggtgatacgtgctgttgtctatgctaaatccgagtaatttgctcaaccggaacaggaatagtaggttgaaattggcaatatcatcctgcgtgatgttcaggtattccacggaggttttgatatactcgtatagatcgggattcgggtcggaatcccgtaacacgagatttaatatttctccccataatagggcgatattcatcttgtacacgtcgaaatagatggcagacgtgttcacaagcggggagaaagatttcagcttgtgcagtccgcccctttcattcgggatgaattcaatttccacgatttgcatacactgggcggaagcgttcgctttccgtttgaacagggccaacggggtaatcatttgcatgtagcctctttcctccgaataaacatgtagaatttgttgctgttcggaatgaggtatgcttttcaatatgatggcctttaccgtgtgcatgttttttacaagttgttcaagaaacggcataattcccggacggcttgtccccggtgactgatcccatttttctcgtgcaggggcatttcggcaaaactttcttgaaaaccttcggggcgaaaaatcggatcgtaaccgaatcccttctggccgtgtttgcttgtgagtatctccccgttgacaatgccttcaaacaggtattctttgtccccgagaattaaagcgataactgttctgaaacgggcttggcgttccggtatattttgcattttctgtaaaacttttttcatgttggcttccgagtcgtgggcgttgcccgcgtatcgtgcggaatagactccgggagcattgttcaaggcttttatttccaaacccgtatcatccgcgaaacagtccaagccatatttctcgtgaatataccgggctttttgaagggcattcccttcgagcgtgtcctgttcctcggggatgtcttcgtggcattgaatctctttcagggaaacgatctcgtgctgggagccgagcatttcttttatttcttccagtttgtgggcattgttggtagcaaaaactaatttcatggccaataataatttataggttacaaaggtaatgaaatcaggtgtagaaacgaaggtttatccctagaaatgccctggaaagtaggaaattcatgatctatagatgattacttccggatcactaccgtgtaaaacgctattaaaacgctattagaaccctattaaaacgctatacttagaatagcgttttataagcattctaaaagcataataaaagtgtgatttccgctagtgatccggaagtaatactaaattaatcatgtaataaggtttgacgtgggattgtcaagggttggacaatttacactgtactttcctgaaaatggttgactcggattaaacaaaaattttaacaaacaccctaacaatgtatcaa

SEQ ID NO: 10722 - DNA, 2422 bp, Unknown
  gut microbiota DNA sequence
ccttgtttttgatgctttcgaaattaaattcttgttccataaaaaaactgtgttagcaaaattaatcatttatttttttgctgacacagtttaaattacattctccgaaaggtcgttcaacgatccatcttttaggcaaaactggaaacttgtcagggtattcgtttggtcggagaacgatctccatggcccagctaaactttctagcaacccagtcccccaaagaaccttgatatccaccatcggcaagaatctttgtcagtctcggaagtttgtatttcatcttctcgataaccttcgatgcacccttgttatcatgaaggattacctcgtggaccgcaacagccaaaggaaggacaagagagtcaactacaatatgttctttactacctttgatctttgtatccccatcaatacctttgctggtaaggtccgtatgatgcgatgtctttgtgctcctaaaatcaatgatccccatgctcggactctccttgtgtccaacgagtttcctaacgagagcgtgcaaagtgtccatgatattctcaagcaatccctcaagtttccacttgcggaaataatagtaatctgtctgttaggggcgaagtctaatggaagtatgcttcattggcagctagtcttgttgacgtaaagaatcacgttcataagctctctgaggggggagaccatgctattcttattgttaatcttttattcttatcctgtcttttgatttaatgttgcttttgtaaattaactctacataatgcagttttaataaatcttttcttgttgtttccatgtttttgctatttttaatctgttaccaaaacatgggtatggatgagtgttttttatttgaatacaggagggaaggtgttatacctccccttacccataattcaattttctctccaaattgctaatacaggcactcactttcttgttgaccaccttggcatagtgtttttgtgtgacagccattgatgaatgtcccagcaatttactaaccacctccatgggcacatcattatagagcaatattgtggttgcaaatatctttctggctgtatgatgggtgagtttcttgttaatacccacaatttccacaatctctttaaagtaggaattaatcttctggttgctgatagctggtagcacatgagcctctctatccccaccattatcatacttcttgataatttgtatggcttgtggtaataaaggaacactgatagccttccctgttttctcccttttcatctcaatccataactttttatcaaatgccattataacatgctttttctgcaaagcaaatgcctcatgataagccaagcctgtatagacactgaacaagtataaatccctcacctttgccagtctttcctgtgcaaactggtaattttccagcttgtgaagttcttcaggagttaaaaatatcaactctttctccactttcaatggtgaatgatcaataaaaggatccattttaatgtaattacacctcatggcataggtggtgacttgctttaccctttgcatatttttattgatggtgacaggtttctgcctcctgacagagagaaggtagtcttccaatccagaaatgaacttgaaattgaccttgttcatggggatgtctgctgcatgatatgattctttgatgtatgccctcaccagttctaacacatctttaaacttgtccagtgtgcttttcttgaactttatcccctccatcttctttgcagccatgtacctctcttcaaacagggttatgaatgacctgctgacagttgtttttccaatgtacagggcatagaggtcttccacaatatcttcagatccttcaatgattaatcttgtttcaatctcaacaagtttattctttataacctccatctgtgtgttaattctctgtgccatttctgactttccagtggccatttgcttgttctggttccacttgtttcttgtaactttaaacccaatggagaaaatttttctcttgttctcatgccataacctgcaataaagaggtgcttcccctgtttctgtttccttggaatgatacctaaaaaatgaaatgtttactcttgttatcataatatattggctttaatagcctataaaacaatagtttatctcttgaaaaaaggtgaccactttttttgatgaaggtgaccactttggtgaccacttttattgatatttccccttgtaatccctttaatttttattgttggaacatacagtgattaatgatattttgtagttaatatattgatattcaatacttgaatcaaatatttgagcattaaaaaaagtcagtatctctactgactttcagcttgttggctcctcaggtaggacttgaacctacgacctacggattaacagtccgccgctctaaccaactgagcta

SEQ ID NO: 10723 - DNA, 50007 bp, Unknown
  gut microbiota DNA sequence
aaatatacagtgattaatgatattttgtagttaatatattgatatacaatacttgaatcaaatatttgagcattaaaaaaagtcagtatttctactgactttcagctcgttggctcctcaggtaggacttgaacctacgacctacggattaacagtccgccgctctaaccaactgagctactaaggaattttctcaaaagcgatgcaaatataggggttttcaggaaaactgcaaaatattttcaagaaaatttgaagaaaaatgttgatggtggctattaattcgtgaaaatggaagaacagcatgatgaaaaattgtagttttgtgcatcaattaaaaaatgacagttatggattacatgaaagaattgaacgtggccatcacggtttgcgataaagaaggtaagattcttcaaatgaatgataaatctcaaaaaacgaatcatggtgatcttgtcggacagaacgtgttggattgtcacccggagcctgcccggacgaagttggtgcggttgatggaggaacatgccacgaatgcttacacgatcgagaaaaacggtgtgaaaaaattgatttaccaaaccccctggtacgagaatggcgagtttatgggattggtggaattttccttagagattccttttgaaatgccacattacatccgtaaaccgaaaacggagtagaaatttttgattcgttagtaaaactttttaatgattaataaggtataatcgtgatatacataataacgaatataccttattaaccatggaaaagaaacaaaaacttaccactgaggccggggcgccggttggtgataatcaaaacattcagactgcaggacctcatgggccggctctcttgcaaaacgtttggctaatcgagaaattggctcattttaatcgtgaacggattccagaacgaatcgtgcatgccaagggaagtggggcgtttggcacgtttacggtgacgaatgatattacccgttacacgaaggcgagtatttttgcacgggtcggtaagaaaaccgacgtgttcatgcgtttttccacggtagcgggggaacgaggagctgccgatacggaacgggatgtccggggatttgccatgaaattttatactgacgagggaaactgggatctggttgggaataacacgcctgttttctttatccgggatccattgaagtttcccgattttattcacacgcaaaagcgggatccgaaaacaaatttgagaagtaacacggcaatgtgggacttttggagtttgtctccggagacgttacatcaggtcatgatcttgatgagtgatcggggtatccctcaagattttcgtcatatgcacggtttcggaagtcatacatttagtttttataacgagtataatgaacgttgctgggtgaaattccatttacgctgtatgcagggaattgctaacttcacgaacgaagaggcggaaaagatcgtggcaaaagaccgggaacattctcagcgggatttgttcgagagtatcgagaaaggagattttccgaaatggaaaatgtgtgtgcaaatcatgccggagaaagatgcggagacttatcgtttcaatcctttcgacctgacgaaagtatggagtcataaggattatccgttgattgaggtcggggtgatcgagttgaaccggaatccagagaattattttgctgacgtggaacaatcagcatttaatccggccaacgtggttccaggtatccatttctcaccggataagatgttgcaagggcggttgtttgcttatggtgatgctcatcgttaccgtttgggggttaatgccgattccattccagtaaatgcgcctcgttgcccgatgcataattatcaccgggatggagccatacgggtagacggtaacggtggtggtgcggtgaactacgagccgaacagttttggaggcccggtagataatcacgtttataatcaaccgcctttcgagattcgggggatgggtagtcattaccaacaggataaggattactatacgcaaccgggtgatttgtatcgtttggtaccggaagatgagaaaatgcggattcacacgaatgttgccacggctatggaaggtgtacccatgaatataaaagtgcgggtagctgctcgtttctatcaggctgatgaacgttgtggtaaggggattgccgaggcggcaggcttggatatgaatgaggttcttgctgaggtgaaacgccaacagcaagaagattaataattaatttttactgactgacggttggggaatacgttgtgtgttctggaataattcgtgatcggatttccccaactgtcagtttttattttgtcccgtgtaaacaagtgtgtgatgatttcggggaattacgtggggtattattgttgttatttatgttttttttgctttttcggtatggaataaaaacctttttttgcacagcggtgagtttgtttgaaataatacctattgtcttatgccagatgagttgatacttttcgaaaaaatgcaacgaggagatacttccgctttggagtacttttttcgagagtacacggatgtactgtattatcgtgcattgggctttgtaaaggacaatttggctgcagaagatatcgtgcaggaggtattcattcgtttctggcaattacggaaaaatctgaaaataacggattctgttcccggttatttgtgcaaggcagtggaccatcgttgccacaattatctagagcatttgaaagtgaaacatcgttacgaggaaagtcagaaatgggaagaggtgatggaggaggtttcggaggatgaagaggagttgaatatcatgcgggaacgattgaaaatgtttgttgattcgttgccggagaaatgccgggagatattcattttggcttgtattgaaggtttaaagtataaacaagtggctgaaaaattagatgtttctgttaatacagttaaaacacaattaaaaagtgcttatagtaaattgcgggccgagtttaatgaaaatgatttggaaatcattgtattactaatttttttaggatatatgtaaaaaaactcttcttttttcacccttttttccctgttccctgtcattagtgtgtttgaaggataataaaaatgtaaagacaggttttgcaaatggagaaagaagaactacataagaagctggataatttcttggagggtaataacgaagagagtatggatggggaattattttcgctattggtccgcatggatgagtgccggaaaaaagcttgtcctcccaacaaagaacgtatgtggaaacatgttcgcaacgcattgaagctttcccggaggagagaattaatgcgcaaatgggcggtagcagctgctattgtgatgcctcttgctgtcggtctctgtttttataattatcgttctgacgaggtggctccagtgccggagaatatggggaaacgtcatcaagtgtcgcttactttgaatgacgggagggtacttcaagtacaacaatggaataacgattcggtaattcaggaaagcggaaccgggattttggtcagtgtcgggcaacaaatgatttatcatgctgagaaagtacagttaaaagaagagatttttaatacgttgagtgttcctcgctccacggaatatcaggtgcaattgtcagatggtacacgagtgtggttgaattcggaatcggaattacgttatccggttgattttgtcagtacagaacgaaaagtttttcttagaggagaggcttattttcaggtggcgaaagacacgactaaacctttccgagttgtggtaaacgacatgatggtggaggctttgggcacgggcttcaatatcaacgcctatcaggatgacaattgtttgcgtactactttggtagagggaaaagttcgggtttcatattcggatactcgtcaggaatgtattcttgtgccgggcgagcaggctgttttgaaggaaggggtacttacatctggacaagtaaatgtggatgatattatcgcttggaaaaagggacgtttcgtgtttagtgatatgccgttggaaaccattgctaatcaattagagcgttggtatgatgtggagattcgttttgatgacacggtggcgaaatattatcgttttaccggagttatgaaacgttataatgaattagaacaggtgttaggcttaatagaagagacgaccaatgtcagattcaaagtggaagggcggcaggtgagagtatttcggaatttataataaaaaaacggtaaccgttgatgcgattaccgtaggtgtgttttaatcggccggacacaaattgcagtaggcgtccggtaattgttaaacccataactacaaatgtatgaattttttattgaaaacatggaggtttatgaaattaaccgtttttttaatcctctttggaattttgagattaaatgcgggcacttatgttcaggcagacagcattagtctcgatctaagtaatgtgacctgtaaagaggcgcttgatgcgataaaaaaacagactaatctggattttttttacaacaatcaggaaattaatgccatgggtaaagtttctgtgcgttgtcggaatgtttcattggaagcggctttgcgacaagttctgggaaagaatttcacgttccgaatcgttgataataccgttgttatccgtcccgagaaaatgaaaccagatcccgtgaaacaacaggtcgtcaaaggtgttgttgtggatgctcaaggattgcctctgccgggtgtgactgttttattgaaaggtacaactttgggaacgtcaacagatatggatggaaactttactctttctttcccccatacagcaggttcagttttacagttttcatttatcggtatgaaaacggctgaagttacattttccgggcaggcgaatctgaaaatcgtgttggaagaggaaacaacccagatggatgaggtggttgtgaccggaatcttcgagcgtaaatctgaaagttttaccggttctgcgacgacatataagaaggaggatttgaaaatgatgggatcgcaaaatatattacagagtctgagaactttggatccttcttttcatattaccccgaataatgagttcggttctgatccgaataaattacctgacattgatattcgtggtaaaacgagtattgttaatttgaaagaggattatgctgttgatcccaaccagcctttgtttattttagatggttttgaggtagatttgcagacgattgttgatttgaacatggaacgagtagcttctgttaccattttaaaagatgccgcatctacggcaatctatggttctcgtgctgctaatggtgtggtggtagttgaaactaagcgtcctgctccggggacattgcgattatcttataatggagacttcacggtgcagatgccagatctcagtgattacaatatgatgaatgccgctgaaaaattggaatttgagtggttgaccggatattacacgaaaacttcgaatgcagaatatttggttgatcggatgaatctttataaccaacggttgagaaatgtgcagagtggagtggatacttattggttaagtgaaccggttagaacggggttttctcataaacacaatatgtatgttgaagggggtgatgatgctatgttgtatggggtcggtctaagctataacggtactcaaggggtgatgaagcaatctggacgggatgttttgagtttcaatattgatttgcgctataggaagggtaaattcagttttgacaacaaatttactttggattatacagaaagtcagaatgctcctcaaagtttttccgtgtatgtgcagacaaatccttattacccgaaagattatgaaggttctgttccaaagtatttggaagaatcttctatagatggtggtttttgggtgaataaagtagaaaatcctttgtataatgctagtttaaattatttggatggttcaaaagaaatttcttttcggaataatttccaaatggaatggcgtccgatggatggtattatggcacgtggacgaatcagtttaacaaaagctaataacaagggagaaaagtttaaatctccattccatactgattttgacgagacggaaaagacagaacggggttcctattcgaaatcaacgacagatcgttgggggtatgacggggatgtaaccgtgacgtatggaaagttattggctgatatgcatcaggtaaatgccgtgctaggttggaatttctcgtctacacgcttgattaatgatgcgtttacggctatcggttttccggatgataatgtcccgaatcccgcttttgccaacgagtatgccacggaaagtaaaccatcatacagtgaatccacgacacgtagtacgagtttttatatgaatcttaattatgcttataataatcgatatttgttggatgtaaatttccgtaaagatggatcttccgtattcggaacgaacaaacgatttacagatagctggtcagtgggagttgcttggaatattcataatgaggcttttatgggagattgggtggattggtttaaattgcgtttttcagtcggtaatccgggaaatcagaatttctctgcttataaagcttatacaacttatgtgtataatacgaacttgcaaaatgctttcggaatgggagccaatgtttcgggattcgggaatcccgacctgaaatggcagaagacgatggattataacttgggattggatttgactgtgttgaataatcgtttgaaattcaatactgatgtttattggaaagataccgatccgatgctggtaaccacttccattgcttcttcaacaggacgtgattcttatattacgaatttgggagcgcagcgaacgaaaggggttagtttcaatgttgtggggactatttgggaaaacaccgaggatcgccttaattggtcattgtctttgaatggacggcatcaaaagcagaattaccgtaacatcgggtcaagcctggagttactgaatgacgagttgaagtctacttctttgacgagatatcgggacggtggaagtccgacagatatatgggcagttcgttctgctggtatagacccgatgacgggtaaggagatttacattaaaaaggatggaagttatactttcgattatgatattaacgacgagatggtggtaggcaataccgaacctttattggagggggtgtttgggacgaatctttattataaaggattttctttcagtgcttatttccgttatcggatagatgcagactatttcaatacagaattatataatcgcattgaaaatttgaaaacgacggaaatgactagttataatcaagataagcgtgcattgtacgatcgttggcagcaacctggagatcaagcccaatataaaaagattacagagactgtcagcgataatgaaacggctcccatgacttctcggtatgttcagaaagaaaatacacttagtggtgaatcgatatcattggcttatgaatttggggaacagaaatggttgaaaaaagtgtttttaaagaatatgactattcgtgccaatatgaatgacatttttcgttgttcgaccattaaggcggaaagaggtacttcttatccgttcgctagaactgtttctttttcagtgaatatgacattttaagaataagtaaaaaatgaaactatgagaaaagtgattattatattgacagctctggcgggaagcttattcttcaatagctgtaatagttggctggatgtaaagccttatgattctatggcagaagaacagctttattctacggagaatgggattcagcgggctttgaacggtttgtacctgagtcttgcatcgaatgacttgtatgcagagaatttaggagggggtgctattgatgtattgggacagcggtataaattgtccagcgaacattcttattatgatttaagcgaatataaatacacgaatgacggtccgaaagagacttttgaggcaatttggaaggctgcttacaagttgatcgcagattgtaatgaatttttggaacaagttcctaggcatcaggatttattgtcccagggaaattataaaatgatgatgggggaggctctggctatccgaacattattgcattttgatatgtttcggattttcggacccgtgtacacggaagcgaataagcaagaagcttctatcccttattatagtatggtgacagatgttacacaacctatcctgtcaacggaagaactagttgaacatttatttgcggatattgattcggcaatcgtgttgttgtcaaaagatgtgattttagcggacggggttgttaaaggtgaaggattttgggattatcgtaatttacgtttgaattactatgccgtatgggcattgaaggcacgtatgtgttggtatttgggaaatgcgtatgctgatgaggcttaccggattgcaactgctttgttggaggggaaagatcctaaaacaaatgaggtaaataattttaatacggtttttgaaccggtttctcaaaatgtggcggtgaccgatcgagttttctttagtgaagagttgtttgccttgcataatatgaagcgtactacggtttataaagagttatttagttctgatttggaagataataatatattgttgtctacagaggattatatgaataagctttttgatgaacccaacgattatcgttggcattcttgggaggtcgctaccgggcgtcaaacttccggattgatggtatttgtcaaatatgtagaacagacggaaaatagaaatgatccttacttgtatgaaatccaatccatgttgcggttgagtgaactctatttgattgctgcggcaacagctcccgatgatgcaacagttactgcttggcttgaaaaattgcgaatgatgagaggttatcagtctggaatggtaggttcggatgctcagaaagtattgcagcaggaatgggaaaaagaattttatggtgaaggacagtattattattttttgaaacgcaacggtaagacttctgtttctggaccgaatggatctaagaaaccgaattatgttattccattgcctgagagtgaaacaaataatagacgcgattaagaagaatggattatgaaaggaatattgatatttttaggagttgttttactttgctggagttgcgaagaggacaaattggatttgtacaaaggtgagggtagtgtttatttttgttacccgaaggttacttctgaagtgtccaacgtgtatatggatacaacaatcttttcttttgcgatgtataatgtgcaagatacggttgttaggctatcagtcaaggctttgggtgatatggttaatcatgaacggagatttaaagtacaagtagagagtacaacggctattgcggggacgaattatgatgagttgcaatccgaatacatactacctaaagacagtgtgtacggggagattccaattcatatttaccgggagggattgtcagataccacggtttccattgaattgcgtttagtggccaatgaatattttcaacaggaccttccccggaagattgtagataaagacacaattgatattactcgtcatgtgctgatgtttacaagtaaattgacgcgtccgtctatgtggatgacttctatgttagggtatttttccgaggtgaagtttaacttctttaatcaagagatgggatttgagcctggtgattggtttagcgctgataacgaaataaaaagtagtattggaaacaaaatgataatagcgaaggtctattttgccaattatttgaatgctatcattgaggctggtgatccgacaaaaatgccacaagatcctgaaaactcgaatgaagcggacaagggatacatgactttcccgggagtgacgataccggaagattggccaatggcttcagaattaaaaacaaacaattaaaggaaagacgatatgataagatatatcacgattggattgataactctattaacgggaatgttaaattcttgttatgaagataaaggtcattataaatatgattgggtgcaagaaattgatttaacagacgtgttgaaggacaccacagttggacgaggtaatgtgttgcatattgaagttgatttaaaaaagcggctattagattccgaaaatgagacggaagttgctaatccggatgattatactttcgaatggaaggctcttacgggggaggaaaatgtgatcttggggaccgataaagatttgactgatacaatttggttggcgagtgggaatagttatcaagtaaattacacggtaactgagaaaaagacgggggtatcttggatttctgattttaaattgaatgtagttgagggggtaaagggtggatttatttttatgacagaagatacggatcgtaaagtcgatattgaaatttatgcagatgatacggaaggaaataagattcatagaaccggtttgttgagtagttcgggattcccttatctttccggaggtgcgaattcaatcgcatatacaaatgttagggcttggggaggacgaaggttatgggtggcaaccggtgaggctagtggctggttggatatgcctgatttttcgtggaaagacaaaaatatgttgagaatgattatgttgactccccagccggttagttatacgatgaaatcgatgtattgtttgagtgatcaatttatgtattttttcacagcggagggaaatgtacatcttttgacttcccggggaattctttcagcagatattacttatgtgaataacaggaaattccaagcggctccttactatgggggtgataacagtcatgcggcaattttgttcgatagggataggaggcgttttgtttcctatgcgatgcaatccgggggaatggtaacagaatcttgttatgatatagatgataattccgctatcccgaattcggatttattgtgcatgcaacagttgtccagtatgaataccgtggcgattgtgaaagatgaggacggaatatatcagcgttgtcaatttagtatgattcggaattcgacgagtggttcgtatgaaggacatttggatcaaaaggaggagttgaaggggaatgcggcaatgattgaagatgctgaatatactgttattgataagctgaacggtttcttgtatttctccattggtaataaattatatacatatcggaaaggaattgatgaatgtgttgaagtgaatttacagggagtgaattttgacccgattgtttctttaaatgtgattgcgcataacgattataaagcaaatgtttttgttgctacatatagcgaaacgaataagggtaaagtttacagacttactccggagagtactgatagtcgtaatttgaccgtggaggaagtgatcgatacggaaggggctgtgaaatgtataacttattggtaattttgagttcgaggtatgaaaatgaaatttgtattattgataatatgcctgttttttgttcgtgtattacctgcccagaaaccggtgacgattgaatgtcgtataggagaagggataggaaaaattatgcagttgtccggggtgaataatggacagcaaaaaatattggcaagtgcttcttatgctcagaatggttattatggttttcgttttattccggaatatgaaggtttttatgttttgggtgacggtaagaatcatgaatatccgctttatttgaaagctggagatgccgtatctctttttatggataaagacacaatttacctaacaggtaagaataatactgctgagaataaagtgttgtacgactgggtgaatctttctaaacgagtttgtgagaaatcaatattttttactcgttctcgtagtacttatgaagattttttcccggaatttgaagttctactttcgaaaataaaaccattctgcaagaatattgaaacgaagaattctcgttttaatgagttaatgaaacattttattagctatgaattggatcgttttgcgttgaattttatttatactccacgttctaaacatccttctaaagagcaacgtattgcctattataattctattgttgataataataagtttcaagatgaggtgattttggaaatgcctgatgggataaaacttttgaaattgtatatgatgttttattgcctagaaaataaaaagaatgccagtgatttacaagagtctttggctgtcattccaaataaaaagttgcaggggacgttggttgttgaacaggcaaaagggttcggacgttcttatttcgagtatatggaatttatggagaaggctaaaaaatatgtggatgctgatcagttgaaaatattggaggataaggcttccgaactctacgaggcaaagaaaggtgagagagcgatagatttcacctgtccggatgccaatggtaaaatgcattctttgtcagattataaagggaaagtggtagtggtggatgtgtgggcaacgtggtgtggaccttgtcgggcagaattaccgcatttgaagaaattggagaaagcgatggaaggtaaggatgtcgtttttatcggggtatctgttgatgagaaaaagaattacgagaagtggaaaaaattcttggtagaagaacaattacccggagtacaattatttgctgatggatggagtaaaataacgaaagattataagataacggggattcctcgctttatggtttttgctaaggatggtagtatcgtggaatctcacgctcctcgtccttctgatccttctttacaggatatgattgagagtgaacttcgtaaataatagaaaaatgagactttataggtctcattttttattattattttcccttgttagatcccgtgagcgaaaactccgggaaattttcttttataaaactttttgggagcttcttgatgacttcccggtacgagtgttcaacgagttcttctatgaacttatcgggcagggagccgtgcatatttatcccgttccaatattttttgttgaaatggtaggccggggtgatttcagtgtatttttcccgtaattcgatggcccaatccgggtcgcattttacagcaatccattcgaacggcataatgtccgtgcaacaaaacattttattgaaaaccttgaagactaacgtggtttcgtcaaaaggaaattcttcggtcgtgtgaggaaaagagaggcataactctcgaagttctacaatgtccataaaattcatgttattaccacaaagataggtatttttgtttatttcattgggaggacttcatctttttgatatcttctgcaataagatttttgccttttcccttttgctttgtagcatcccaaagtttagacagtatagatataccagttgaaaatcgtttttgttttccatttactgcaattttacaataaataggtgcttctcccttcgtgttagttttgaaggtgtaaatgaaataataaatactaacttttactatcattcgatgtcgctttattagcacttaatcaggttgttatgaggggtgttggtatacttttgaaagagtaccaaaaatgacggaaatagtgcaccaaaaagtgcaccaaatatagcctgtttttgaagatatagaattgattgaaaaaagaaaaaccactgaaaatcagtggttatctcttgaaggggtggagtagcagggaatcgaaccctggtccaaacacggaatccatatgctttctacatgcttagctttttgttggttttcgaatatagcccggaaaaaggcacccaaactataccttagcttctgttatttcaccaacgtcacgaagcaaaacgttgactaacctcgtattgcctgcaccccgaatgctggttggcacaaggtgggaccgccagcgggatgtctcgtctccactaccttgagcggagattaagcctcaatctactatgattcgattaggcagcaagagcgtaatttctttcgccaattaaaattttgcgtccgggattaacgggccggcttcactacgcccgacatgcttacatacctattcatcatgctgtcaaatccacgtctaccccatagatatgtgaatacaaagatacaaatataattgaaaatgtataattgaaaattgaaaattattccatcagatgctcgatgaggatcttgatgccgatgccgatgagaatgatgcctccgaataattcaacgttgatacctttgattttaccgaagcgataaccgcagataactccaatcaaagagagggagaaagttacgaatccaatgataaaggcgggaaaataaatacttgttttaaggaatgccatgctgacacccacggctagagcgtcgatgctggtggctactcccaaggtgagcaaggtcttggtggaaaaagacgagatggtggtttcttcttccctgaaagattcgtagatcattttgccacctagaaaaccaagaaggataaaagcaatccaatgatcgaaggtggtaatgtatgaactgaaactgactcccatgagccagccgaataatgtcatccctccttgaaaaatccccatggtaaaggctaggcgtaaagattgtcgcatgcagaaaggacgcataacgattccgccgctaatacttacggcaagactatccatagctaagccaacggcgattaataatatggagatgattcccattcgtgaaatttttggcaaaagtataaaattgatagaggaaatgaatgtaaaaaatgtaactttgtaaagatagagtgattatttataataaatatagatatgaatttacagacgaagattactgttgcggctccggatttcttgatagattataattctagattgatgatgttgggttcgtgttttgccgaaaacatggggagtaagttttcatattataaatttgacgtggatgtgaatccctgtgggataatttataatccgttatccgtggcgaacgtgttacggctgatcgtggaagggaaacaattcgagaaaagcgatttgagacaagtcggtggcaaatgggtgagtttgtatcatcacggggctttttcttcgacagacccggatgaatgtctgcgccggataaacgatcgtttgacgaaagctacaggggaacttcgtacgttggatttattggtaatcacatggggaacggcttgggtgtatagatatacacgagagaatatagtcgtgtcgaactgtcataagattccttcacaggagtttgaacgtagtcggttgagcgtggaggatattgtgaaggagtacttggtgctgatcgggcgtttacgggagatcaatccgggacttcggattttattcacggtaagtcccattcggcattggaaagatggggctcacggaaatcagttgagcaaagcaactttattgttggctattgatcggttacgggaagaattgcaacacgtgtattattttccggcctatgaaattgtgttggatgaattgcgtgattaccgtttttatgcggatgatatgttacatatgtccggtttcacggtggattatatttgggaacgtttcctttatagttttattagtcccgaagtgttgggtttgatgaatcagatcgggagagtcaataagggggtggcacatcgaccttttgatccccagtcagaagaatatcaccgtttggtgaaaaaaatgttggcagaaatagccatgatttcccgttcatatcctatgattgatttctcggaggaaaagagaaagttgaatgaggttattgtagggtagactccttcatgggctttccttcctccgtaccaactcttgtatctgttcgttatctgttcgttatcctgtcgttaaatcgtccatttataggaacggaggcataacgaggagataacgacaaaatagcgtgtagatgtaagaacaagacaaaaggaggtatggaaatgtgatattcctgtaaattacgatagaggaactgccgggggagcgtttaccgtgtcttgctccacgacgggattcaattcgtgtaggtaaattgtcgtttttaccgggtaagcgcctgaatactttttgcggattcgttttagagcagggattgcctctatgcgagtacggaagttccctactcggattttgaaatcgggatcggtgtattgcaggtatgccggaatgtctgggaactcttcttcgaatcgtttggtataatttttcagcgtgtcgatgtttgtgccgtatgaactacgggataggatttggatgcggtacccttgaaagagctgttctttccggttcacggaaatatttagttttaatagttgttcgattttcggatcggcatgaatgatcactttaccactggtgatggagtctgtttccgagagtcgtttcacgaaatcaatctcttttttgaccgggggaatagaatctgtttgcgcccaagcgagggacgtgatgaaaagtgataatatgacgagtgttaatttcatgggtaaatgtctatcgtgagttcaactaattcgacttcaatcgacaaagatagtataatttgtctttttgtggtagaaaaatagataaataacactatttttgtagtcgcaaaaattttagcgttctacatgaaaaaggaagaataagatgaatcaagtaacagatcaacaaatcattgagatattgagaaaagaggccgttccggctttggggtgtaccgaaccggtagcctgtgctttggcgtgtgcaaagtgtaaagaagtattaggaagtgtgcccgagcgtttggatgtgctggttagtggaaatatttataagaacggcatgggggttggtattccgggaacgggaatggttggattgcctattgctgcggctttaggagctgtttgtggaaaatccgaatacgggttggaagtgctgaaggaggtgaacgtgggggataacctgcagcgtgcaaaagatatgttagggcaggtgacggtttcattgaaagaggatgcgccggataaattgtatgccgaggctttggccacgaaaggaaatgatacggtaaaagtgattatcgctcatacgcacaccaatatcgttttggtagagaaaaacggggaagagattttcaaaagagaattccgtttggatacttcaaaaccagaggataagggtccggagttaagtgttaaacgaatttgggatttcgtgcatgaggtggacgtgaaagatatcgagttcgtgttgcagggagccgagatgaacaaagctatttcagccgaggggttgaactcggaatatggcttgcagattggtaagacgttaaaagagaatatagataaaggcttgttggaagatgacttgctgaatcgcacgttaattcgtgctacggctgcatcggatgctcgtatggacggatgcccgaaaccggtgatgacgaattccggtagtggtaatcaaggtatcacggtgtatttgccggttgtggtggctgccgagaaattcggggcttcccgcgagcaattagcccgtgccttggcattgagtaacttgatcgccgtgcatattcaccattatatgggacacctttcagctctttgcggaattctgattgccggaacaggggctgcatctgcaattacctatttgatgggtggaacttacgataatatggtgaacacgatcaagacgatgtgttctaacttgacgggtatgatgtgtgacggggcaaaacagggatgtgccttgaaggtgtattccggtgtatcggctgccgtgcaagctgccttgttgtccatgagaggaatcaaaacgaataatgacgggatcgtggaggaagatattgagcgtactattcgtaacgtgggattgatcggaacgaaaggtatggaggagacggacaagacgatcttgaatatcatgtgcaataaaaaataatagaaggaattgaatccgtacgtgaatatacacacgcatcatgttggcgaaggaattaacattctggatgttggtgaaggaaaggcgtgggtggaaaaagaaaaaagacgggaattggtcgaggggcagaacgtgttttattccgtgggtgttcatcccatgaagttaaacgagctgggagagagtgttttcgtggggatagaagatacggtacggataaaaaaagtaatagcgataggagagtgcggtttggaccgtcgctctcctatttgcatgaaaacgcaggaagagatactggaagttcaagtccgtttggcggaagagctgtgtaagccattgattatccattgcgtgaaggcgtattcggaattgattgccgtgaggaaacgaacgaaatcatccgtgccttggattgttcatgggtataataataacgaacggatattgcgacagttgttggattgcgagttctatatttccgtgggtgcggcattgtcggattcacgttcgaatgcttttcagttattacggatgatcccggcggaaaggttgtttttggagaatgatgataaagaggttgagatttcggttatttacgagacggcatctgccattttaggagtggacgtggagacgatgaaggaaataacggggaataattataataaagtttttagaaaataatatggattggctgagtagaacggagttgcttctaggagaagaacgattgggtttgttgaagaatgctcacgtgttggtggcgggattgggaggcgtcggggcgtatgctgcagaacaattatgtcgggcagggatcggggaaatgacgatcatcgacggggattgcgtggatgtgacgaataagaatcgtcagcttccggcattggatagtaacatcggtaaagcgaaagccgaggtaatggcagcccggttccgggatataaacccggatattcaattacacgtcatcaatgattttatcaaagatgaccggatgattgatattttggaaatggcggagtatgattacgtggtggatgccattgatacgttggcacccaaaatatttctaatttatcatagtttgcagaaaggttaccgggtggtgagttgcatgggagccgggggaaagatggatcccgaacaaatccggatagccgatatttccaaatcttataattgtaatctggcccgcatgttaagaaaaagattgcataagttaggggtttataaaggagtaaaagtagtgttttcgcccgaagaagttgatccggaggcggttgttttgagcgagagcgagaataagaaatcgaatgtcggtacgatttcttatatgccccctcttttcggatgtttctgtgcctcggtagttatccgggatataaccggcaagtaattcgggtgaacggtgttgtttaggtggcttctgcttagtacaggaataaaaaatgtttttttagcaaattcccgatttgtttttgtaattgttctgcctgaatcggtttggacgtgtaagcgttgaacccactattcagaatgtgttgttcatcttcggcataagcaaaggctgttattgccataacgggtacatcgggggatatttcccgtattttttgagtagcttcatacccgtccatcttcggcatatttatatccattaatacaaggtgtgggttgtgttgtttgaataattgtacggcttcctctccatcccaggcatgaattaatgtgtaattttttttcagtatggtttcaaataacttgtaattgctttcattgtcctcggctattaagatgacgagtttatcttttttgtccacgagacgaggggtttcgggtgctttggcgatattatctcctgcttgatctgcttgatgatagggaagagtaaaccaaaatgtacttccttcaccttcttttgattttactccgattttgccccccatgcttgtgatgatggtttggcaaatgggtaaccccaggcctgtaccttgtgcaaaattgttgagtttaacaaaacgttcaaaaacacggtttacttgactttcggggataccgcatcccgtgtcactcacgtagaaatataatgaatcttcgttttgaaggttgtagccgaactcgatgctacctcgttgcgtgaatttcatcgcattgttaatcatgttcgtgatgacttgagtcaagcggtttttatcggtactgatgtaacatgacggtaaagtccgtttgtatagaatacagacgtttttgttttggttcctcattttagtggactcttctatgtccatgaacaattcgtcgacattaatgttgttgtacgagaattccagtacgcctgcttctatttttgaaaggtctagaatatcgttgattaattggaggagtaggttgttgttgttttcgatgatttgtatgtattcctgtttttcttcatcaatatccgagttcatcgatgccagaataccagagaaaccgacaatggcgttcaggggagttcgaatttcgtggctcatgtttgctaggaaggcggatttcaatttgtttgactcttcggctttctctttggcttttatcaagtcattttccatggcttttctttgagtgataatcaaagaagaaccgactagcgttttcgcttttcccgcttggttgtattcatcgatggtggcttgaacttccacccattcgtaatggacggaatagcctttgttggaaataacccggaactcttcttttattctcggaactttcccctctatcaaactttggtaagcatttcttacccgatcaatatcttgtttgcaaatattggaaaaataggatgaatccggaacggataattgttgttcttcggcaggggagttattgccactgatttcaatgggacggtttacatcacatagaatcgtatgtttttccaaatcccatttccatggagtgatattggcgacatcgagtgccgtcgataacttgtggttggttgagcgtaatatttgttgaacttgtgccagttccgtgttgtccacgcagaaaacatctaagaagccttttttgggggaacaggtaatgataaccgttaggtaaatatgtttagcttcccaatagtattgaaaggatagttcctttttgttctgcaatgaattgtaaagatctatacatctggtgtgttgtccgcttgtttcgctgtatttctttcctagaatattgctttttgcagtaatatatttttcaaaagtggggttgacttccttgaatataaagtctattactcgtccttccttgttatatatcaattcttcttttatatatataatgggcatatttttgaacagactgttgtattcttccatggcatttagtcgggcattcctttcttttgcaagtttttttagccaaatgatatacaggcaaatggcaagaaaggctatagggataatgtaaaaccaatttttttccaaaaatgtgggaggtgtgttgtagaagtaagtattgggaggacataaatttatatccaattcccaattctctagatccggataatttagtatcggggtcacgggaggtatttctatggtttgaatgccttgagaatggggattttttaactcttgttcgatagtctctaggagtttgccttttaaaatatcttctctttgataacatcctccaagaatcccgttggttattgctacgttattattatttagggtgaaaatgggaacttttgagtaattactcagtactttagaaatgtcagaagaaagaattaggttcccttgctggttagtttggctgtaccaagaagagaataaaatgcaggatggggaatccaggtattttaatgaatcaatcaaatcatcatttgtgatttctcctgccactagatgtttgacttgaacatcggggaattgtgtcctcatgacttcatcaacttcatgacggtattgagcattaataaaacgtccgtcagataaaaagacgagtttgtgcatttttgggtacagagttttcatcaattcaagggtttccttaacgtaacagggaacttggaaaatggttaggggaatatcaccttgataagaatttaagggtattctctcgttttgcgggataaaagactttttcaagtaagcttccttggagcctatgtatcttttttcacaacagatgatggttggaatgtctttccattttttctcaatatcttcctttaacaatacccaagccgaggttcccagcaggataattaattggggtttgagtttggcgtattttctggcaaatcggagcttgtattgctttagggcttcatcattgttgatggtgagcatgttcatgtgttcggtgtaaatgttgacattgttattgtgtgccgtgtatttcaagtaaatgggggcaataaggttatcactccattgcgtaatagacgtgtaggaatttatgattaggatattgctgggcgggatattttgggattgggctgagcaaaaagagtgagagattgccaataagaaaataactggcaataatattttcttgataattgaagttaccatttgaatttacatttttattaaattatgtgcaaatgtaattttaattgtttgattttttattaatgaaaggaaaaaataatagaagattgtgatgctaaaaaggggttgcccggcaaataaatgtaggcacccccctcgtgaattttaatacataatattttatggataatttccaatatagattttatgcccttaatttttgtgctgttaatcgatccattttggtttcagcgtattctttggtaattgtgattgattcacaattttgagaagggatctcgaacatcagatccgtcataatggcttcgcagatggaacgtaacccgcgggcacccagtttgaattccacggccttgtccacgatgtactcgaaaacgtcctcgttgaaattcagcgtaatattatccagctcaaatagtttcacgtattggcggataatagcgttcttgggttccgtgagaatgttgcgcagggcttgacgatcaagtggcgctagataggttaataccgggagacgaccgatgatttcgggaattaacccgaaggattttaaatcttgtggtgcgatatattgcaacatattatcccgatcaagaacggctgtttctttgcttgccgtgaaaccaacaacctgcgtgttcattcgttgggcgattttcttttcgatcccgtcgaatgctcccccgcagatgaacaagatgtttttcgtgttcacggggatcatcttttggtcgggatgtttacgtccgccttgagggggaacgttcacgatagaaccttccagtagtttcaataatccttgttgcaccccttcaccgctcacgtcacgagtgatggacgggttgtctcctttgcgggcaatcttgtcgatctcgtcaatgaaaacgatccctttttcggcagcatccacgtcatagtcggcagcttgtaataaacgggtcaaaatggattctatgtcctcgcccacgtagccggcttccgtcaacacggttgcatcgacaatggtgaaaggtacgtgcagcatcttggcaatggttcgggccaatagggttttcccggttcccgtgcgtcctaccatgatgatgtttgacttttcgatctccacgtcgtcattggaatgtttttgtgtcaatcgtttataatggttgtaaacagccacggcgagatgctttttcgcctcgtcttgtccgattacgtattgatccatgaattgtttgatctcgatcggtttttttacctcgatgtgatccatatcaagaggggtagagtgacctctttgttcttcctgtacgatgtcatatgcttgttgtgcacacatatcacagataaaaccgtctaccccagaaatcagaagatcaacctcgctacgtgatcttccgcaaaatgaacatttgtcttgcattatttgtgttctcgaattaataccgtgtcaatcatcccgtattctttggcttcagttgcagtcatccagtaatcgcggtcagagtctttttctactttcttgatcgagtttccggaatgatcggcgatgatttggtaaagttctttttttagtttcatgatctcgcgggccgtgatttcaatatcagaggcttgtccttgggctccacccataggttggtggatcatgatacgcgaatgttgtaaggcggaacgcttgcctttcgtgccggcggtcatcagcacggcacccatggatgcggccattccggtacagatggttgccacgtcacattgtatgtattgcattgtgtcgtaaatacctaatccggcgtaaaccgagccacctggagtgttgaaataaatttgaatatccttgctcgggtcagccgactccaagaataataattgtgccatgataatgttggcaacatcgtcatcaatgggtactccgaggaaaataatccgatccatcattaaccgggaaaatacgtccatactcgccacgtttaactggcgttcctctataattgtcggatttatatagctggagaccgtagattcaaaccggtgaaggttcaaactgctgatccctttatgcttggttgcatattttttaaattcgtcctgtgaaaacatagtcatatatgtattttggttatacgggtgctaagttacgaaaaaaggaggggaaaataaagttttttgtggttcccccagctgttagtagtagatttttccctttttttgttttttcacaagatattttttgactaaaatgttgtttatctctgtcttttttgagtcggcatttgagggggtaaggtctttttcgtgactagtttccagaatgtctataattttcgcttttctttttagttttgggaagacgagagaaataagaatattctttctattgcatcccctaacgattaatagacgatccatggggagatctccgtcgtatctgcgaaccatgtaaacatccccgtttttcttgtcaacgagttgataaccgtaaccgtaagttacccattgcgagtcaaaatagatcggttgtacgaaagtgactatagtttcatgacgacgcttctctatactatataaacgcggcatgatgggttcgtatttttcacaaggaggggcgaaatggatgtccttactttgtaaaacataaccttcgttgaacatttcccggtcactctttttgttttgagccgagactgttatcccgcaaactaacaggataagcatcatgaataaatatttaccgtccttcatcatttcttttttagtgcttgttaaacttacgggcaaggtgcaaaaaatatcctaatatagcaaggtttaatgctatgtgctggtaatttatttccaaataatttccacgatatggtctatgtctgtggggacttcgttcaattgaaggaggattccttctttggttttcttgtattttactggagtttgatccttgaaacatacaatactctttatttttctgtccgtggtgggaagaagtagttccgttttgttcaagtttagaatgtggatgtagagtttattccctttttgggttgtgacaccccagtcttgttgagggataatcccggcacgggtgccttggatggtttcaccgtaagtgcgcatccattcgccgatttctttcaagtgtcttaccgatccttcggggaaatctcctcccggacggggacccacgtttaatagtaaatttgcattattcccggcggctcctaccagcgtgtggatgagttgtttcgtggatttgaaatttcggtcattgatattatatccccacgtgttgttcatggtttcacaactttccaacggcaaggcgctgatttccgcatcggcagaatacccggctttgttttgtcccggtagatcccgttcgaacatctggaaatcttctccctcaaaaggtgctttgtgatgattattcccgatcagacatcccggttgaagacggtgaatcagggtgtattgcctttccagttgccagtccgcatcgggtttatcccaccaaccgtcgaaccagataccaccgatcgggccgtaattggtaagtaattcggtcaactgggcatccatgaattttaaataatcttcccacgtgccggaaggagtacgtcccgtgttccgtcccgtgcgcccccacgggtaataatccggtcggtgccagtcgatatgggaatagtagaagaataatttaagtccgtgtttttggcaggcttcggccaattccttgatgacatctcgtttgaaaggagttgctttgacaatgttgtaatccgattgtttcgtgtcgaacatcgagaacccgtcgtgatggcgggaggtgaaacagatgtatttcatcccggcatccttggcgatgcgtacccactcgtccgcattgaatttggagggatagaatccgtctgccagtttttggtactccgcctcgttcaggcttttgttggtcagcacccattcgccgtcagccagcatactgtatatcccccagtggataaacataccgaatttggcatcccggaaccattcccggttggtaagattctcctgtgagggaacgtatttttcttgagcagaacagaatacaacagttaaaaataaaagcgtggtaatgaatatatttttcatgttaaggattagattaaattttcacgaaagtaataaatgtaaagaaaatgatcaaatgtttaataaataaaacggggaaaactgctgaaataaaaaaggtgccccaaaagttttttcatgatgtgtttggttaattctttttctggttgatgttctggtgtgaaagctaattggaagaggggtttaagctgaaaaatgtaacgtgaaatttagtctgtttgataaataatttgaaataaattttcaaaaacgcttgtatgttcgaaataaagcgtatctttgtcccagattgagttgaattatttgtatttaaatcactttcctatcaatgtatttgtatcgttaagtagacttttttccaatgagaccattctcaatcgcttttattaattaatcaaaaattgtacttgatgaacatttacatttcaaatttaagttatggcgttgatgacgcagatttaaacacgttgtttgcagaatatggtgaagttacttctgcaaaagttattatggatcgggaaactggtagatcaagaggattcggttttgttgagattgctgatgaggcaatgggacaaaaagcaatcgatgaattgaacggtgctgaatatgatggtaaagtaattaccgtgaatgtggctaaaccgagagaagatagatcaaacggtggaggtcgcggaggatataacagaggtggcggaagtcgcggaggttataattcaaacagaaggtattaagatgttatatattctgaagaaaagaggcttggaaacgagcctcttttcttgtttttaaatatttaataaccagagtaacaaaccggcaggaaggtagtctgccaattcttgacggagttttttcaaggctatttcgatgtgtttttctaccgtgcggggagagatttccaactcttcggcgatttgagtgatacttttgtcattgaaacgattcatgatgaaaatcttttgacattgagggggaagctgacggattgccttttcaatatgttcctgaagttctgattccacgtaatattcccacgtgagtaatccggtaatatcccctttttgtaaaatttgttcttggtattttcaggtttatccaacgaaattagtcgggggtggagaagattggttgcgtgtgacttattgtatgccttggacaagtactccaattgaaggaattgaagggagtaacccgatttggtgtcaggtgaaatcaattacttcggaaggcggggatgctgctaaattagccgcttacatttctgtccgagggaatggtgtcctatccgttccggtggataatgacgttcctcgaggaaggtatagtatatctttaaacttttggaatgaaggctggtcaaaggatgtgaatgattgttttacgattattgtgagatagtaactacacgagaatggcataataaatgttgttggacataattccttctactttgattatgtcattctcgtggttttacttgttactttttttgttattacgtaatctgcctctcgatattccgggtcttgtttcgaagtttataccgatttagaacaactgttgggaatccgtttcaaatggttaagcgtgatgttctacttcgatttgttggcatgtgatgtgcggaatatttttgtcgtccatgaaaacctagcgagaacgagccgaaaataggaagaagatgggcacgagcaatacgaagtcttcggagaatgacgatatgtaattcccgagtaaatggaattttattttgtagacttttcttggatttatatactttctgtatttagtttctcttcagtaaaagttcaatttaatttttcccgagaagaaatattttggggagattattttacttttgctgtagaattaaacacataaaattagagaagaaatgacagcaaattggtttgaagcgaaggtaaaatacgtgaaagtgggtgaggatggaaaagaaaaaaagatgtccgagttgtatttgttagatgcgatgtcttatacagaggctgaaagtcggattaccgagaatttgagagaaatgatccaaggggatttttatatcgtgggattgaagaaatcgaatatcacggagttggtggagtcgaatgatgggaatgacgataagtggttcaaggccaaagtggctattattgatgccgatcagatcagtggcaaggagaaaaaatcgaaccaatattacttggttgcgggagcggatattgacagtgcgttggctaatttgcataaaagtctgtcaacttacgtggtgcctttcgagatcagttccttggcggatacaaatattatggacgtgttcccttatttctcggatgatgccgatcagaagattccttctaacttgaagcctttagacagtatagaagcggatttgtaaggttcgtgaagtccataagtttataaagtccaaagtatatatggtttgtgtctctgaagtgtttataggctttatggctttggactttataggcatttgcagactcgttactttctttttcggaaacgtttgtaaaaaagcattgcgtcgagctttattttgttaaagtatactgtattttattgatatccagcgatgtgattcccatgaagaagagtcgtgattttttgattaaaatttggctttatactattaactttttacctttgccggattaattttcttcgggtcgtttgttatgaacaagagacattttgttattgtttttgacgatcgggtgaaacttgaaagaaattcaaacgtatttggaaataattaatctatagagttatgaaaacaagaatagaacatgatttactcggcaataaagaagtgccgatggatgcatattatggcgttcaaactttgagagctatcgagaactttgctggaatcagcggatatacgatcggaatgttcccgaactacgtgaaggctttggccatggtaaaatgggctgctgcaaaagcgaattttgaattgggattgattcctgccgatatcacaaacgcaattacagctgcttgcgaagagattatcgatggtaagttggcagatcaattcccggtagatatggttcaaggtggtgcaggaacttctacgaatatgaatatcaatgaggtggttgccaatcgtgctttggagctgttgggacaccaaaaaggtgaatatgaattttgccacccgaataatcatgtgaatctttctcaatcaacaaatgatgcttatcctacttcattccacttggcaatcattttaaccaataaggaagtagttgctgaaattaaattgttggttgattctttcagaagaaaagcaaaagaattcgagcatgtattgaaaatggggcgtacccaacttcaagatgcggtacctatgacgttagggcaggaattcgaagcctatgctgtaactttggaagaaaatatcgaacgtttgaatgctgctgcaaagttgtttttggtagaaaacatgggagcaacggcaattggtacgggtattaactcagaaccggaatatgctgaaatttgtgcccgtgaattacgtattatcagtggagaagagttcgttttggctccgaatttaattgcagcaactcctgacacgggtgcttgcgtgtcttattcttcggaattgaaacgtttctgcgttcagttgtctaaggtatgtaatgacttacgtttattgtccagtggtccgagatgtggtttgaacgaaattaacttacctcctatgcaaccgggatcttctatcatgccgggtaaggtgaatccggttattccggaagtggttaaccaggtttgtttccgtgtgatcggtaatgacacgaccgtgatgatggctgccgaagctggtcagttggaattgaacgtgatggagccggtaatcgtttacgctttgttcaactctatgcagatgttgaccaaggtgatggatcgtttgagaattttgtgtattgacggaattactgctaacgtagaccgttgtaaagatatggtgatgaacagtatcggtatcgttactgctttgaacccgactttaggttacgaaaattcatctcgtattgccaagagagctttaacggaaaacagaagtgtttacgatttagttttggaagagaaattattgacgaaagaagagttggataacgtgctccgtccggaattaatgattgctccgaaaaaattctataagaaaaaataacaaaaggagctttagtttcgtaacaaaaagtgttatcttcgtaaaactaattaaatttaaagcataggttatgaaaaaaggttttaatcaaatgattgcaattgtgatgatcgcagtatcatcagtggctttcacggggtgttacggttctttctctttgacttccaagttacataactggaatggacaagtatctaatgctaagttcgtgaacgagttggtattcttgggattatgtattcttccggcatacgagttgtgctgcttgggtgatgcattaatttttaactcaattgagttctggggtgggcaaaatccggtagctatgaaagctggagacgtggaagaaggtcaggttatgtatgccggacatccttaccatgtaaccaaatctttgaacaagatggttgttgcaagtgaagagactgatgctgtcgctgaattccaatatttcccagaagaagaatcttggtatttaatggatggtcagaataaggctaagttgatgaaaaacacgaaaaagatgatgaaagctgttgtggctatcaactaattttttcgggctataataaaagaggacgctttcgggcgtcctttttttgtggagttaactgatgtatcgccagttgattttcgttttgaaaaggcgttttacctgggtggcaaaagtttggttctcttctttttgcaggagaggatcgtcttctaggataagtgtggctgcttgggcagcctcgttcagtacacgtccgtctttaccaagattggcaactctcaggttgcatgtcagtccactttgttgagtcccttcgatgtctcccgggccgcgaagttttaaatcgacttcggcaatttcgaagccgtcattcgtggaggtcatggtttcgattcttttgcgggattcgttggatagtttgtaggaggtcatcaaaatacagtacgattgttcggcaccccgtccgacccgtccgcgcagttggtgtaattgggacagtccgaaacgttcggcactttcaatgaccatgatggaggcattgggaacatttaccccgacttcaatcacggtggttgccactagaatgcgggtttctccggaaacgaaacgtctcatgtgttcttctttctcaggcggtttgagttttccatgaacgatgtctgccgtgtatcctagaggggcgaaataactcatcacgtgttcatagccttcttccaaattccggtaatccatcttttccgattcggagatcatggggtacacgatgtaggcttgcctgccgagttccagttctttctggatgaatttgtagacttgtaggcgtcttgcttcgaaggcatgatacgtggtgatgggttttcggccagggggaagttggtcgatcaccgatacatccagatctccgtagagggtcatggcgagggttcggggaatgggggttgctgtcatgactagcatatgtgggggaatcgtgttcttttgccataatttggctcgctgggcgacaccgaaacgatgttgctcgtcgataacaacaagtcccacgtttttaaaattcaccacgttttccaacaaggcgtgtgtaccgattaggacttgcaggcgaccgtcggacagggcttcatgaatgatctcacgctcttttttcttggtggaacccgtcagtagaccaacactgatcgaggtgttctttagaagttcggatatagtttcgtaatgttgggtggcgagaatctctgtcggggccatgatggcggcttgatagccgttgtcgagggcgatcagcatacacattacggcaacaagggttttgccgctacccacatctccttgcaacaaacggttcatctgcttgccggaaccgcaatcagaacgaatctctttaataacccgtttctgggcatcggttaggggaaagggcagatgattgtggtagaaatcgttgaaataatctccgacagtggtaaaaaggtgtccttggaaggcagctttacggttgaatttcagtttcaagatgttgagctggatgtagaatagctcctcaaatttaagccggtattgtgccttgcggagcatatccgggttttccgggaaatggatgttgtacaaggcttcgtgcaggtagatcaaattgtatttcttgatgaaccatgccgggagggtttcttgaatcctgccattgatggctttgaaaatattcgcttgtattttgttgatcaaccgggaggtcaggtagctttttttcatcttctccgtggttgggtagatggcttggaagcctacgagctgcttgacactcgtttcgtacaggtccatttccggatggacgatgttcattttatgattgaagatggtcggtttgccgaaaatcaagtattccttgtcggggttgatctgactggcgaggtatttgtggcccgtgaaccaaacgagctccagttccccggtcccgtcataagctgttgcgaccatgcgcatttgtttgcctactccgatggacgagaggtttgtaattttggcttttacctgaatatagggaaggtctgaggtgagttcccgaatcgtgtaaacacgggttcggtcgatgtatttgtaagggatgtaatagagcatatcctcgtagctttggatgcccatttcctgctccagcaacgaggctcttttctctccaacacccggtacgaattttatgttcagtcctgccagttccaaaatgtaaattttcgatggttcatttctcgaacgaaagtaaaaaaaatagatgactttagttgagcatatcgggaataaattttaatttcgtggaataaataatttggacagacagattactgggagatgtataattatttaaaacaacgatttaaacatgccattcgttttcgacataaaagagggtacggggtgcattctccctttgtttttgatttgatcacgagtgtaataaaggaaaaagcggtttattacgatttcgagcggattgaggcgatggggaacattcgggagaaagagcggaaattgtatcgtttgcttttccggttggcagaatacttttcttaccggaatgtgttgtgtgttggggtgcggtctccgtgggtttccatgtatctggcggctgtttcgaaacagatggtgttgctgaacgggggatgtgcatatttgggggccgagtacacggaacaggtgaaaccgggagatttgaaaggtcgtaagatcgatatggttttcttggggagagcgttcgaggaggattgggatgaagcttgggaggaggttttgcgagtgcgcaaacgaggcccgttgtgtatcgtgattaaagatatttacaaagggcgttttaattctttggtatggcgacagttgaggcaggaggggacggtttcgatcgacatgatgtggtacgggatcgtattctttgacacgaggttgcagaagggaaggtataatatgataatttagaatttaaaatttagaatgggaaggggtgatttcatgggaggaaatttaaaatctaaaatttaaaataagcatgaaggtatatacgaaaacaggagataaggggacgactgctttgatcgggggaacccgggttgcaaagaataacgtgagattagaggcttacgggggtgttgacgagttgaacagtcatttggggatgattcggtcatacccgattgatggggagagtgtgaaacagttgatcgagattcaaaacgtgctgttcgtggtcggggcaaacttggcgacggacacgactgtgagtaatatgcagaagaaattgccttgcacggatgaggacgtggcttttttggagagggcgatagataagatggacgaggaattgccgccactgcaatatttcgtgttgccgggtggacggccggaggtatcggcttgtcatattgcccgtacgatttgccgtcgggtggaacggcggattattgatatgagtgaagaaatcgaggtggaggatgttatcgtgcggtatgtgaatcgtttgtccgattacctgttcgtgctagggcgtaagctggcaaaggattgcggtttggaagaggtgaaatgggtgccggggagttgaaaattgaaaatggagaattgaaaatgaaagaacctgtaacttgtgatttttcaatggcggaagtgtttcgctttttgaaagagttgaaggagaataataaccgggagtggtttaatgcgcataaagagtggtatctggccgtgaaagcgaggcatgaggatttcatcaaccaggtgattccggcattagcggtgacagagccggatatggacgggttgacagcgaaagattgtattttcagaatttatcgagatgtccggttttcacccaataaagagccttataagacgcatatcggggcgtacatggtgaagggcggtaagcagagtcctcgggcggggtattatgtgcatatcgaaccgggaaattgcatgatcgggggcgggatttggtgtccggaaccttcgttgctaaaggctttgcggaaagacgtgtatgacaatatcgacgagttcacggggattctcagggatgcgaaattccagaagtattatgtgttggagggggagaagttgaaaaaggtgcctgctcctttcccggctgattttccggaaggggatttgttgaaatacaaatcttacacggtgtcgaattatgttcccgattcgtttttcgagagggaggacgtggttgagcggtgtgtggaacgacttttattgatgcaaccttttaatcgctttttgaattacacggtggaggaaacgtggaggtgatcgcttgcggcagttgctggttaaaagaggggaatttgtgactgaattgctttgataataaggggaaaagtcgtatatttgtaatatggaaaaaataaaagaaaagatgccgcagcttgtgaaaaacgccacggttagggaagagattttgcaaggaatgataacctcatttcaactggaggggataaaaatttcccaagaaactgcttatactattttggaacgggtggatttgaagcttaaaatgtgtaagcgataatccgctccattctggagtagtcttttcgtgctacttgctgaacagcgattatatattcattaaaatcaatccttttaaagtttaaaccgggataaccctgttttcgagccatgaggttggcgaggatgcggaaggttctaccattgccttcccggaaggggtggatgaaaagtaattcgccgtgtaccttggcgatgtcttttatcagagcctgccggctggtgtaatggtcggggagctgggaaagagtttcttcttcgaaaatgcgcatactatctggaatgaatcttccggcggggaagacaaaaccacctttggagatatttacggagcggaatcgtccggcaaaagagtagagttcttttaatgctgtacgatggatgtcgcagatgtatttgactgaaaattttgttttttgggttagcttttccgtgaacaagatttccgccatcaagaatccttcgaattctgcgttgtgaagagtctcttcatccgtgattccgagtaaattcgggagaatctctccctcttcgccattggtggtgtatctgttcatggctttgatttttaacaaagttatagaaatccgtcaattactccaaatttatttatgatttatgatttatgatttatgctaaagacttatctttgtgttttcggcaaggccgagttacaagttgacaggttgtatgttacaggttcttgggaataataacgcacctgccgatgaacgtgtcgggattcaacttgtaacctgtaacttgtaaacttgtaactaaaaaaggatgaaagtattattattgggtagcggtggacgcgaacatgcgttggcgtggaaaataaatcagagtgaaagattaacaaagttatatgttgctccgggaaatgccggaacggcagagatagctgaaaatgtaaatatcaaggtaacggatttcgaggcgttagcgactttcgtggaatataatgctatcgatatgctggttgtcgggccggaagatcctctagtggagggtattcgggattattttgaggcagacgctcgttttgcccgactgatgatcgtgggaccgggaagagcgggtgctattctggaaggaagtaaggattttgcgaaagaattcatgttccgccaccatattccgacagctgattatctgacggtgacgaaggataacctagaggaaggggttgcttttctggaaacccaaaaaccgccttacgtgttgaaagcggatgggttggcagctggaaaaggtgtgttgattctggatgatttggaagaggccaagagggagttggagctgatgttgggaggaaagttcgggaaggccggaaatcaagtagtgatcgaggcgtgtttgaaaggaatagagctttcagtgtttgcgttaacggacgggaagagttataaaatattgggttcggcgaaggattacaagcgtatcggagagggtgatacgggattgaacacgggtggtatgggggccgtttccccggtgccgtttgccaatgaagagttcaaccggaaagtggaagagcgggtggtgcgccccacgatcgagggattacaaaaagacgggattgactacaaaggattcgtctttttcgggctaatgaatgttggtggtgatccttacgtgatcgaatataatgtgcgtatgggagatccggagacggaagtggtgatgccgagattaaaaacggatgttttgtctcttttcgaggcgatggccaagggtgagctggaacaggcggcgttcgaactggatgatcgtttctgtacgactgtgatgcttgtttcccaagggtatcccggggattacgagaaaggaaaggagatcacgggtgttccggacgtgaaggggagtatcgtgttccatgcgggtacgaagctggcagagggaaaagtcgtgacgaacgggggacgtgtgattgctgttagctcgttcgggaagacaatgcgggaggcgttggctcaatcttacaagaatgtggctaaaattcatttcgatgggatgaatttcagaagagatataggttttgatttataagagggttggatgatgggatttaacgccattttaaaaaccaagagggtttatatgttgtatttgctgccatttattttggcagcaattgcctttttgcgttttactttcggaccggaagatttttccgtttgtttggatttgggcgttatttcaattccggattttcaagaacaaggcgggttgtggtggaaggaaattggtgtgttggctttgctgtgtttgtcatttctggtattttttgttgcggacagatataagtttttgtcccatatcacggttctcccggcggtgatttatgctttactatgcattggcgtgatttgtcgttacgggatgagtaattatctggtggcggccttgtgcgtcgtgttggccgtggctcgtttgcagtcggccatcgtgaacacgcaatctaacgctccggtatttggtttcgggcttttttccacgctggcggttttgctttgcccgaaattgatcatgctgatcgtttgggcaatcatcgtcctgcctttttcgggaagggcggcgttgaaggatttggtggcgctgtttatcgggatcttttctgcattatttttcacgggatgttattacttcctgacggatcggttggcaacattaccggatgtattcgtgcaggcattgacaagcgggcaagtgttctggaaaataatgcctgagaaggtggtagcttttgttgtgatcggcgtgctgatcgtcgtgtctttgtataatgtcgtggtgaactacccgatggcgatcgtggcgcagaggcggggtatgttgtcgatgttgtcgatgttgcttttcgtggggagttcgttgttttttatcccgtttaattgtcacgggatcaccttgattacagcgatcccgttatcttatatgtttactcaatactttatttcacaccggacccgttggttgggaaacgtgttgttcctgttgttcatagtggcctgtgtacttcttgttttgtagattaatagaatgtcagcatttccccgcgaatgtcaccattgatcttgccgtgatcgtacacgatttgcccgttcactaacgtcatgcttacccggtaggtaaaagacatttcttcgagaggtgaccaaccgcatttgtaaagtaagttttctttcttcacagtccatgggtgtttttcgaagatggcgatgtctgccttataaccttcccgcagatagcctctttcttcgacatggaaaatgtcggcaggggcatgacacattttatccacgatattttcaagcgtgatctgacctttctccatgagttccagcataacgattagcgagtgctgcaccattgggccaccgctggctgattgggtatatactccggctttttctcccggaagatgaggagcgtgatccgtggcgatgatgtccaagcgattgtcattcaaggcttgcaacagggcttgacggtcctcttcggttttgatggcaggattccacttgacgaggtttcctttggtgtgatacgcctgatcattgaaccaaagatggtgaatgcatacttccccggtgatgtgtttttgggtacgaggaccttgatccagtaattccaattcttctttcgtgcttaaatgaagtatgtgcaggcggctgttgtgtttacgtgccagctcggctgccagcgaagagctggtgtagcaacactcccgactgcggatcaaaggatggcagaaaggaggaatgtcttccccgtactgttgcttgtagagttccaagttacggtttatcgtgggcgaatcctcgcaatgcgtagcgatgagaataggggattctgcaaatatcttttccaaggcttcccgactatccaccagcatattacccgtggaggaacccatgaaaactttaatgccgcaagtcgtgtgcggatcaatctttttaatctcgtcgatattgtcaacggtggcaccgaggtagaacgagtagttgacagccgaattctccttggcaatctgttgtttttcccggagtaactcgttggttatggtgggaggtttcacgttaggcatatccatgaaagaggtcacgcccccggctgctgccgcccggctaccttcccggatgtctcctttgtgtgtgaggccgggttcgcggaagtgtacttgatcgtcaatcactcccggtatgatgtatttccccgtggcatcgataattttgaggtctccggggactgaatccaatttgccttctatgattttttcgatacgatcattgtgaatcaagagatcacctttgaagattctcccttcatttatgatggttccgctttgaagtaatatacgcatattaattttagattttaaattttagattcccactgcacgaagctgacgctttaactaccccccatgttaattttagattctaattaatttcttgatttatgatttcctctccccaactaccgttcttttaatcataaatcgtaattcataaatcgtaaatggattaatttttaattgccttacgttttcccaagctcctgagtttcatcgtgatgacaccccaaaaagcctcgttgaagatgccgccgctcattttggatgtgccgagggtacggtcggtgaaaataatgggtacttctttcagcttgaatcctagggtccacgctgtgaatttcatttcgatctggaaagcgtagcctttgaaacgaatgttgtcgaggtcgatggattctaagactttccgggtgtaacaaacgaatccggctgtggcatcatgtactttcatgcccgtgatgaatcttacatatttggaggcaaaataggacatgagaactcgtcccatgggccagttcacgacgttaacgcctgtgacgtaacgggaaccgatcgccatatcgccttccccgctttcgcaggcgtgatacaatttaaccagatcatcgggattatgggagaaatccgcatccatctcgaaaatgtagttgtacccgtgttccagtgaccatttgaatccggtgatataagccgtgccgagtcctagctttcctttacgttcgatcatgtgaagttgtggaaactcggattgcagacgttttacaatctgggccgtgccgtcgggagagttgtcctctataacgagcacatcaaacttcggttccagtttaaaaacataacggagaatgttttcgatattctctttttcgttataggtcggtatgatgacaactctgtcgttcatggtctgttgttttataagtattctgtaatcctttccagtttatttccccgtgaaccttttatcaggataaaagcgtggagaatctcgttcgctttgagatactcgatcagcgtgtccgtgtcggggaagtaatgcgtaaaggtatagttatttgcgatggattcaaaactcgcccccacgaggaatacccggggaaaattgtttttcttcatgagttctacgatgtttttgtgggactcttcggaaatggctcccagttcacgcatttccccgataatcagtaatttgttgtctactttcatttccccgaaattggaaatggcgacttgcatactgctcgggttagcgttgtaggcatccaggatgatcgtgttgcgttccgttttcagtagttgcgagcgaaggttagagggggtgtaagcttcgatggcggcctgtatttgtaaaggatcgatattgaaatatgttcctaccgtggtggctgccatggcgttgtcaaagttatatcccccgatgagtttcgtccggatgtatagttgtccgtgttgggttttcaaggcatacacgaggtaaggggtggtctgaacgatttccccgttcgtgaaatgcccattgatgccataggtgtaccttttctggtcttcagataattggcacaacaatttatcttccccgttcacgaataaaattcccgctttctccttcacggactcgtaaagggcttttttggtttggatgatattttcgtagtttccgaatccttccaagtgggcatacccgatgttcgtgatgataccgtagtctggttcaacaattttgcatagttcttttatttcccccgggtggttggcccccatttccacgataccgaattccgtggaggagtccatgcttaacagggtgaggggtacaccgatatggttgtttaaattgcctttcgtggcaacggtattatattttttggaaagaacggcgtgacataattctttcgtggtggttttgccgtttgtcccggtgattcccaagatgggaatgttcaatttccggcggtggtagttggctaattgttgcaggaattgcaaggtgtcgggaacgagtacgcattgaggagccgtgttgtaggcggcctcatcaatgacgacgtgcttcgctccttgggccacggctttctctgcaaaggtattaccgttgtgattttcaccctttaaagcgatgaatatatctccatctttcacctctctggagtctgttgtaatccggctgcctgccagaaaagaattatatatagattcaatctctttcatcttttcataatatccgatcagggtgacaaatttataaaaataaatgaaccatgaacggttttttcattaatattgcaggataataatattattacaatgaaaataaaaacaggtatagggatcgatgttcatcggctggagccgggactggacttttggttaggaggaattaaactggaacatgaaaaagggtgcgtggcccattcggatggggatgtgttgattcatgcgatatgtgatgcacttttgggggctaccgggctggatgatattggggtatatttcccggatacggaccccgcttacaagggtattgatagtaaaattctgttgaagaaggtgatcgatatgattgagaacaaggggtttgctatcggtaatattgattgtgtgatatgcctgcaaaggccgaaaattaaaatgcggaccttggagatgcgggagtgcttgtctgaaattatgggaattgatgtagatgagataaccatcaaggcaaccacgacggaaaaactgggctttgaggggagagaagagggggtttcggcttatgtgacagtgctgattattaagttataaaaaagggactcacgagagtcccttttttataactacttcttttcatgtagtttcagtacttttccgtcggggagggttagttctgcctctttccctttgcccatcaagcttacttgatcgtttttgtacatgaaaccggaagccatgcgttgctgtggtaattcgtatgtttggtcgtcaaattttacgactgccagttcttctgcgggatagaaggttacttctacctggtatagcattttagttttaccgtcaccgccttggaataccacgttaatcacgctttcaggagtttcggtgtacaatgtttcaccgcgttgttcaatgatccattgtccgttgatctgtcttacgttataggtgtcgtcgtcttccacgttccatgcgtaaccacctttcggtagttcgcgtctgttcaggagcgggtggttttccatgttgggaataaatacttcagccaacgtggaatcgggggagaacacgatgaaggtggaaagcgtggcttgcggatcgttaaccggattcatgcgaacaccggattcgaacaggcgaatacagtcttttctagcttcagaccatgtgtagcctgccgcaccgttacatccgtgggcgtcgtttgcgacaccaattactttctcttctgttttaggcacgaaaacaagagtttgtttccggtctttatccgttaatttcaattctttgttttcaatgctgtacgaggtcatggcagccaaagtctggatgtattcatgctcgaattggagatccggacaagccatcatggtacttccacccggttctaacttgatggtgttaccttctatggtgtatcttccgaaaaatcgattacatccggagaatccgtacatcgtgttggtgtcggtcagcatgagggtgggtactcgttgcggaagagtggttttcccatttgtggttgtcatctctttcagttgccattcgttggcagtcagttgagctttgtctccgctgttacttttacagccggagaagccaagtgtcacggcgatcatcattaaaatagttgtttttctcatatgtgtgtgaattttttacaaagatacgggttaaaacaggaaaaagtttataatatattataaactttttcttgctttgtcggcgagggattcattatctgaatcttatccttgattcatttttagtaattcgtcgatgtgcgtgcggtcgttccataactgtggcactttattctgtccgccgagttttcctttttctttcagccagtcattgaaaaggttcggacgggcagcatggagaatcagacgttgaagagacatatctttgtagcgtttggcctcgtagtcggaatttatttttttcagttctgtatcaaggatattggcaaagttttccgaatctgcagggggagttccgaattcgataatccattcgtgagccccttttttaccgtcttccatgaataccggggcggccgtgaatgccatcactgtggctccagtcttttcgcaagtctgttttagggcttcgatggcgttgtcgataattaattcttctccaaaagcgttgataaataactttgtgcgtcccgtgattttgaatttgtaaggacgggtagaggtgaacataatagtgtctccgatcatgtagcgccataatccaccattcgtggagatgacaagggcgtagttcaccccgttttccacctcttccaatagaagagcccggggatgtggtttcgtcagttcgctgatcggaacaaattcatagtaaacgccatagtccagcattaacagcatggacgagtcgctgggatcatcctgtaatccgaagaaaccttccgatgcgttgtaggtttccatgtatttcattttcgggtcgggcagcaggcgtttgtattgttcccggtagggggtgaagtttatgccgccgtgaataaatagttctaggttgggccatacttcgtgaaggttgttccttcccgtgcgttccagaatccggttgatgagcgtgaggaaccaagagggtacccccgcaagactgcgtacatcttctttgatcgtggtgtcgcatatcttttcaatcttttcttcccattcgctcatgagcatgatcgattggtcgggagtcttcatcatgttggcccagaacggggtgttggagattaatatggcggacaagtctccgtaacgacagttgttgtttgtcttggatatttcgctacttcctcctagagccaaggtcttcccgttaaatacttgtgcatccgggtatagtttattgaaaatggagataacatccttaccgcctcggaaatgacagctttccaaagattctttgctgaccgggataaacttgctttttgccgctgttgtgcctgacgatttggcaaaccacgtgatggggtccggccataacaggttttgctcgccgttcattaatcgctcggaatagggagccagctcttcgtagtgaatgatgggtaggcgctcccggtattgttctgccgtcaaaatagagtcgaaatcatatttcagtccatactccgtgtcagcggctctgcgaagtaattcaaccaacgtgtctcgttgcacctgaatcgggttttctttgaagaaatcgatttgtgccaaccttttggtcgagaacatggatatgatggaattgattacgggcatagaattaagttaaaagttataagttaaaaactaaaagttaacctctattgaggagtagcaactatcgtaccatttgttatttttagtgatcgaaatctagttttagttgcgggtcgagcaacgtgaaactttgtcgatggtaaggggtaacaccgtgaagtaaaatgccttcccgatgttttttagtcgggtaacctttgttgctgttccagtcgtaaacagggtactcttcatgtaattttttcatgtactcgtcccggtgtgttttggctagaatagaggcagctgcgatagccatgtatttcccgtccccttttacgatgcaatggtgttcaatgtttcggtagggtttgaagcggttgccatcaatcagaatgtgttccggagtaatacttaattgtgccagagcccggtgcatcccttcgatagaggcgttgaggatgttgatcttgtcaatctcgttattgttcacgctggccactgcccatgctaaggcttcccgttcaatgatcacgcgtaactcatcccgtttcttttcggagagttgtttcgagtcgttaagcatctcgttggaaaagtcttcaggaagtattactgctgccgcgaaaaccggtcctgccagacatcctctgccggcttcatcacatccggcttcgattttattttgataatattttaatgtcagcataattaatgggttcgtaaagtttataaagtccatgaaattcataaggtctaaaatgacgtgtgtccttcggacaatgtttaacggcaatttgggctgccgtggacaaaacatcctgcttgtgtccgactttatggatcttatgaatcttaaactttatcacttctgcaaatatatgaaatactttgcaatttttcgtatatttgcggggttgtccctgcatactaattttaatttatcaaaggtgttcacgaaagaagaggcaaaagagattcgggtgaaattctgggaaggtttcaagcgttattgtaagcggaaacatatttaccggaaatgggtgctcacgggggtgaagatacgatccacgcaattaaaattttatgcggatcgggagaaggctctcgtgttattccaaattgatcataaaaatgagttgcgtcggttcgaggtctacgagtgcatgttatcctatcagacgttatttcgggcggagtgcggtgacgagttaaagtgggaagaggagtataccgggatcgaggggcaggagatcagtgcgatttatttcgagttacggggtgtgaacctttaccgggtggaggatcacgagcggatatacactttctttgccgagaaaatgcctttgctggaagatctctattacgagtacagggatttaattaacgaacgattgaaacagaacgataattaaaacgctggattgcgatgaaaataaataagagtggggccgctctttcccgtatcgtgcaaatcggggagacgctgaaagaactttcccagaagagtgggaaagagtatttacccttgaaccggggtgtgaatcaagtggtaaatatcgacttgacagaagtcgtgaaatcgataaactttaattctccggagatacaggtgtatccgcatggagccgggcgtccggacttacgggcggcaattaacgaggagttttttgccggaaagtcttcaccggataatatattgattacggcagggggaatgcatgcccttgatctcgtggcgcagaccgtgaatatcggaaagttattcctgccctcgtattattggggatgttatttcaaaatgcttaagattcgttccgtggaaagcgaaggatatgacagtcaatcggatttactccctatgatcgatcgtttgcagggaaatgccgtgttgatcagtgatccgagtaacccgctgggagacaaacatgatgacgaggaacagttgaatattattcgggcgttgaatgatgctggggtggtgattttttatgattgtccctatcgtcggttgtttatggatgcttcagatgattactatacgcatctgatgaacttggataacgtgattatcacggagagctttagcaagtcggtcgggttaagcggccagcggcttggatttatccatacgtgtaacaaggagttgcatgatgagttggaggtgagagtgatgtataacacgaacgggattaacggtttcgcgcaagaactcgtgttacgcttgttgacaacgccggaagggaaaaaggccgtgacggcatttaaagagcgtactacccgagatatagctttgaatatcgagtatttgcgggcgagaggcttgctggcagaagaattttatcatggaaccacgccacggggtatttttgtgattgtgaaccgtagtgaggaggagctattgaaacattacattggtgcggtatcgctttctttcttcactaaaactcggcaggagtatgcgaaggattattcccgtatctgtgtttccgtgcctcatgaaagattggttaaatactttgaaatgatttgatgattgggaaatgaggggatggcaaaacttgtttttcaaataaacacctttggttatctcctctataaacagagagggtaccggtgactgttttttattagcataactggtgccggtaataacttgagaaacctttgtctaaaggtcttccagcatggcatgaatcgaggggtgaaacttttcatccttattttttacacaaccttgaatttccggaggggagggaaaagaaagtaaatccatttcaggataaaactgtttatgaatggtgtgagatatagactcaattcattggagatggaaactaaatgaagtttgcgtaaatgcttgattttatgtatgaaatgtttgatgaaccttgtttttgcaactatatttttgcagataatactggaatcgatatatttgtgagatttaagagagtcgcaatggaatacaggcaatttctagatggggttaatcgtaaagaggataaggcttgggtagagctatatgattatttttatgctccactatgttgctatgctgcaaaaattgtaggaaataaccagatggtggaagatgtggtgcagggatgtttcgtgaaattatggctttctgatcagaaaagaagtaaaaaggcccatgaagtgtggatggggcaagttgtctgtgatgaatgtgatgctgtggagatggctttggaggaagaagcgattacccgcttttacaccgtgattacccgtttacccgagcaacaacgggatattttgttgcggagtatgaaaggagaaaaagtgagggatatggcagagaagttggggatttctgaaaacacggtgaaaacacaaaaaaagagggcttatgcctttgtacgtgagcaactgggagatatttggatggtaattgtcgggttatttttcgtgtagaattactgaattttttttatttcttgtcacccgtttttttcatatcggtgtctgttgtgaaagtaaatacaggaatgatatgaaatgggacgagatacatgatcaatcacgcgtggctgttgataaagcgataggacgcttgttgacaggggagaatgacttgggaaaggaggaggatgatattttgaaaaagttgcaggatgcggagtacgtgtgtgagaaattagaaaaacggaagtgttattcaggaagggatgcttttttgcgactaaaacgtcaagtgaaaagaaaaaaacgtttgcgggtggcgatgtggttggcaagtgcggcgtgtgtggctattgtttatataatattgttgcagtgggaacaaatagaagtgttgttgccggaaacgagcacgatcgtaaaacaagaaaatattttcccagtggggatgaaagcaatattagtaaaagcggacggggaacaagtcgtgttaggaaaagagcatcgtgatttggaagaggctgggaatgtgttgctcgctgcagattcgacagggttggaatacaatcttttgaaacaaactactgcggatacagtcgtttttaaccagttgatagttccccggggtggtttgtacttgttgatattgtcggatggaactcgggtgtggatgaattctgattcacgtttgaaatacccggtaatattttccggtaacaagcgggaggtgattttaagcggtgaagcgttttttgacgtggtaaaagatgaatcggtcccttttatcgtgaaaacggaaacagggaatatagaagtgttagggactgagttcaatataaaatgttacccggatgaggcctctttagttacacctttagtaaatggtaaagtgagatttgatgatggaacaaatccgtccgtgattct

SEQ ID NO: 10724 - DNA, 96542 bp, Unknown
  gut microbiota DNA sequence
cagctgttcctccggtttcaaaatcacagacggatttattccatcatcaaatttcactttaccatttaccaaggttgtaaccagagctgtctcatccgaataacattttatattaaactccgttcctaacacttctatatttcctgattccgttctcacgataaaaggggctgatttatcttttaccacgtcaaaatacgcttcaccgcttaaaatcacctcccgcttaccaccggcaaacattaccggatatttcaaatgtgaatcagaattcatccatacccgtgtaccatctgccaataccaacaaatacaaaccaccccggggaactattaattgattaaaaacgaccgtatctgtattagtttgtttcaaacgattatattccaatcctgtcgagtctgcagcaatcaatacattcccgatctcttcccaattacgatactcttttcctaacacaacttgttccccgtccgctctcaccaatattgctttcatctccgccggaaaaatattttcctgctttacaatcgtactcgttttcggcaacaacacttctatttgtttccactgcaacaagattacacaaacaacagccacacacgctgcacttgccatccacattgccactcgcaaacgttttctcctttccatttgatgttttagccgcaaaaaagcatcttttcctgaataacgtttccgtttttctaatttcttgcccacgtactctacatcccgtaatttctccactatatcattctccttcttctctacctccttcccctcggctaataagttttctatcgctttgtctacaaccacacgtgattgatcatgtatctcatcccatttcatatcatttctgtatttattttcacaacagacactcgatacaaaaaaacgggtgacaagaaattaaaaaaaattcaataattctacacgaaaaacaacccgacaattaccatccaaacatcccctaattgctcacgtacaaaagcataggccctctttttttgtgttttcaccgtattttcagatatacccaacttctctgccatatcccttactctttctcctttcatacttcgtaataaaatatcccgttgttgctcgggtaaacgtgtgatcacggtataaaaacgagtaatagcctcttcctccaaggccatctctacagcatcactttcatcactaacgacttgtcccatccacacctcatgggcctttttacttcttttctggtcacgaacaaaattaagtgcggcattgtacacggcacggtataaataagctgtaattacttttatatcttcaaaacagacagttgaaagccacaatttcacgaaacatccctgcaccacatcttccaccatttggtcattccccataatttttgccgcatagcaacatagtggagcataaaaataatcatatagctcaacccaagctttatcctctttacgattaaccccatctaaaaattgcctatattccatcacaactctcttaaatctcacaaatatatcgattccaatattatctgcaaaaatatagttgtaaaaatcaaagttcgtaaaaccctccatgcattaggccagacgtttgtgccacctctctttagaacccatctttcaatgaatacattatcattccatattaaaaaaatggaatacatacatctcacactattcgcaaattaaggaactattaaacacaagaaaaaaacactaagctatcacaacacaaagacgtatcaaagacgttcgtgaacgcctttgatacgtctttgtagcgaagttaatacgtctttaatccctaagtacatcgaatatgcaacggataaacaacgtgtattaccttgaaaaaagtttactgtaaaccaatttcaggaaattacattccccgttctcccagtcattgtaccggaatataaatttcagtaatcagattttccggctcggtatgatccggaaggttcagatacttctcgaaaccgggagtatctcccaacttataacctttttccggaatccacttggcataaattgtatcatacacggcacgtaagttttcatacggtccttgataacgaaataccgcatattttcccccgggaacttcttttacaccaacctcccctttcggctttccgacacggggaagtacaagacacacatctgtccgcaatttatcctgctccgtcaccttcggatcatcatggtaaacacagatatgctccacttccggggcaaaaagattttcttccctcacgtaattccataatctttgccatgccgcacaataatccaactgattatatgcacccattagccaaatgtaaatcactcgtttcggggccaacactcgttcttcaaactctaacttcaaatcgggtctcatttctactggtttcataatcgtgcaatttttattattacgatattcattcggtgaaatatcatagaattgcttgaaacttttcgacaaagaagaaggcacatcatacccaacccgataagcaatgtcctgcacggacaaatcggaatagcgtaacaagcgagctgcagtctcgacacgtacccgggtgatgaaagcccccacaggttctcccagaaaggcacgcacgatccggtggaaatgccaaggagaaaaaccggacatctcggctaacatcccgagatcaatattctcatccagatgattattgatatattccacgatcacgttgatccttttcaaatactcttctttcgttgtcaatttctgttccatattcttttgtatttcgagacaaaagtaagtccctgaattgggagagacttttccgatcttgctaaattagttcgcttacacctcccccttcacaaattgaaagtccagccagtaagttgcccgctttgcagtgaatttcaaaacacaataagtcgggtcattcacacctccgggaaaatgctcgataaaccaatcctgccacaaggctttcttttctgcctcgtcggtaataatctcgatgtacccggtcagcacgacactgttaatctccttctggaaacacactcccgctttaggattcacccgaaagtgttccgttttctcggaatacgttccggtagcaaaccagattgtagttatcccctccgctttcacctttgacatcggtacaggacggggaaaaccgttttcgtcaatagaagtcagtaccacactttcgcattgctccagtaataattccgcttttcgtttcaattcttccatatatccattttatttaattataaatacaaaagtagagttccgagaaaagaatcttttgtaaaaaatcgacttttattcccctaaataagtgatcggagtatctgccggtaaggacgtgaaaaccatcggggaactacccgataatttcttgaactccttcaccaagtgagaagaatcataatacccgcaatcgaccgccacggaaaagaggttattcccggaaacctgacgaagtacatccattgcccgacgaaatttcacgacccggctatactcttttggcgtgtaacccgtggcatgtttaaaacgacgttcaaaatggcgttgacagatgcatacccgactcattaactcccgaataggcaacaatcccccggcctgacggatcaccccggttgtccacacaatttgcctgtcaacttcctccgcatatttcaaccgagacatcaaaaaagcttcaattacttgcaatctttctaccaacgtgtttttctccctcaaaaaagaagcgaactcttcatgaaaaagaaatcccacgtccctcaaatgaagtctctgcccactcaactcccctaaaggcttttttgtgaaaacagtcagcccgcagggagtgaatctgaccccgatcacgtgtagagatccggcacaaaccgacaactccgagtaagtcttcatcgctcccacgaaataaccgtgtaaaggatcaataccaaaccgatttttatcctccaggttacgcacatcatccaagttaaaaatgaaatcggtacaaccatcaggcaaaattatcatcttctcacccatttccggtgagcctttcacttcccaatatttgtctatataaggagataacaccggatgaggggaatattcttggtacatggattcaattattggtatcaaggcaaagctactaaaaaaatccgggacgaccataccatctccaacacaggcatcattttgagaaaagtctcttctacaggtaatttggggagaaattccacaactggggcaaaattttccacaatcgtaaaattcaagcaaacacacgtacaaactgtttttcaatacgttatcattttaccacacgaatggcacgggcattgcctttgtttaggcatagaataaaacatcaaaacaaaaaactatgagaacgtttatttttttagcagtcagtttgttttccatcgccttcctcggaagttgcgtggaaagttcacaaaaatataaagctttgcaggcaaaagtagattctttacaagccgttagcaacggacaaagtgacgaaatggataaacttttagcagatctgaatgacatttccgccggaatgcaatctatccgcgaggcagaacacattctagccatcgaatcacagagtgacacgaaaaacagcaagagtaaaagccagattaccgctttaaaaaatgatgtgcaagcactttctgacgctatcgccggttacaaagaaaaaattgcgaaactggaagggactaacaaaagacaatccgctgaattcaagaaattaatcgccggattaaacgaagagttagccatcagagatcaaaagatcaacgaaatcaaccagattttggctgccaaagaaaaggaactaggtatcaagactcaacaaatagcagaacttaaccaaaacgtgagcaatttacaagaggaatcaacttcccagaaagaaacgatttccaatcaagacaaatcgctcaacacgatccactacctgttaggttccagaaaagggctaaaagaagctaatgtgatctcaagacaaggaatcttctgtccgccaatcgtttcttctcaagctcaaaatgcaaaattcgtggatgccgatatgcgtgaattgacatccatcccgttaaacactaaaaaagccaaaatcctttccgttcacccaagcgaatcatacgcattggaaaccggggatgacggtatgcagactttgaagattagcaacccgagtgcattctggaaacaaacaaagtacttggtagtgatgatcaacgaataaggaaagattcacacactcatatacacacaacacacacaggtaaggtgttcggggtcctcccgaatgccttttttcatgcccatttgttttttcccttattttactgttatttgtaataattacagcgaaacctatcgtgcctatccaaacatattagatttttggaaaaatctcgaaacagggtataatctatttatcaaggatttaaaggagttaaatatctccgtggacaaactcggtaactatcaattttcaaaataacggaataacctgtctctaaaaacactaccttagtgccttattacaaaaggagacagcaatatgctattcaataaaaacgaaaacaaaccggcatcctccatcgaggaaaaaatcaaactctatcgtcgtcagggtcacattgttcccccccgaaagattatcaagaacgcggaacagattgaaggcatccgcgaaagtgcaaaaatcaacacggccgtgttggatcacgtggcggctaacatccgggaaggaatgtcaaccgaggatattaacacgctggtatacgatttcaccgtggcacacggggctatccccgcaccattgaattacgagggttttcccaaaagtgtatgtacttccattaacgaagaagtatgtcacgggataccggacaagaatattattttaagaagtggtgacattatcaatgttgacgtttccactatatacaacggttacttttcagatgcatcccgtatgttcatgatcggggaagtcgcggaagatcgccaaaaactggtacgtgtcacgaaagaatgtttggaaaaaggcattgaggccgcacaaccctggcgttttctcggagacgtgggcgccgtgatccaggaacatgccgaaagtaacgggtactcggttgtccgggaattctgcggacacggggtcggcttaaaattccacgagattccggaagtggaacacgtgggaagacgaggtacgggaatgctgctcgttccgggcatgatcttcacaatagaaccgatgattaacatgggagagcgtgacatattcatcgatgaagataacgactggacggttatcacggaagacgaacaaccttctgctcaatgggaaaataccatattaattacggaaaccgggaacgaaatattaacctggtaacccatttaacatggccagcgaacaaataccttcccctttggttgatctcctgcggcaatacaaactgttgcaagaggaattcgagtttgaaaaagagacattctaccaacaaacacaacgtgcaggaatccctaaacggattcagcaaggtgtttgctggtatcccgtgtcagcaaataaaaattattacaactcgttaaaccaactcatcatcgagatcaaacgagatgagaatgacgacacggatcataatttcgaatacggtcgtccggtttgttttttccgttttgaccaaacggggaatctgcgttatttcagtttcgcggcaactatcagttacgttcacgaaaacacgatgctcgtcgtgttacccaactccaacagccttctggatattcaaggatgcccggatctgggcgtacaactctactttgacgggacctcctataaaaccatgttttccgccctaacagaagtcatggaagccaagaacaaccgcctcgcccacttacgggaagttatactgggaaacgagatggcagaacaacggaaacttcaaccaattcacttgacgtggctgaatcgttcacaagaacaagcggtaaaccgggtattggcaaccaaagaggttgcagttgttcacggccctcccggaaccggaaaaacgaccacgctcgtcgaggccgtctacgaaacactacgacgagagaatcaagtaatggtttgcgcccaaagcaacacagccgtggactggattgccgaaaagttactggaccggggagtcaatgtactacgaatcgggaaccccacacgggtaaacgacaagatgctgtcattcacgtacgaacgcaaattcgaatctcatcccgcctaccccacgttacgagccgcaagaacatctatccgggaactctccgggcgtctgaaacgtttgaaaggagccaaacgggaatccgcccgccggaagctgcatgatttacgggaccaagccattaaattggaaatcaagattgatgcccaactcttcggggaggcccgcgtgattgcctgtacgttggtcggttccgccaataaacaattaaacgggaaaatattctccaccctttttatcgatgaggccgcgcaagctttagaagccgcctgctggattgccatatccaaggcttaccgggtaatactcgccggggaccactgccagttacctcccaccatcaaatgttacgaagcagcgaaaggtgggttggatcgcacgctactccaaaagattatccaacgtaaacccgaaactgtttccatgctcgaaactcagtaccggatgcacgaagacatcatgtacttcccctcgcaacagttctacaaaggccgtttgcaagcatctccggaagtacgccaccgtaacattctcgaatacgacactcccatcgaatggttcgacacggccctctgcgagttctctgaagattgtgtcaacgaaacatacgggcgcatcaacaaaccggaagccgaattactagtaaaacaattacaggaatatatcgagaaaatcggtatcgaacgagtactggatgaaagaatcgatttcgggttgatatccccttatcgggtgcaagtacaatatatccgacaaatcatcaaacgaaaccgcttttttatccccttgcgaaaactcatcacgattcacaccgtggacggattccaaggccaagaacgggatgttatcctaatcagtctcgtacgggccaacagcgagggaaacatcggatttctgaatgacctgcgccgcatgaacgtggccatcacccgagcccgcatgaaactcattattctgggagacgctaccacgctcacttcccatccgttttacaaggccttgtacgaatatatccgggagaaagggaagatcatcgaaattcaaccggaaacacccgacaccttcccatcctaacaaataaatatgccaggatcttctcctggcataaaatcaaaaacaacaactagactcaacagatcacttgctttaaaccactaatccaagcatctattctcttatcagtctgatcagattcattggattcatccaagggaagtcccacgaactgaccatccacacaagcctcggaagagtcgtaactatacccgtcggtatctaccgaaccggcaaactgacatccacttccttgtagctcgttataaattattccgatagcatcgcagaatgacccaccaaaagaggcagaatccccgcatccgaagattgccacggtcttacccgacaaattcttcgctttcagcttatccaagaaatcgttccaatcatcctgcaactctccgattccccatgtagaactacccagtaacaaaacatcgtacttgtcgacctcgtccacttttgtagttcccacgttatgtatatcttcacttgcaacacccaaacgagccgcaatcgtttcagcaaccccttcggttgctcccgtcgtggagccataaaatattccaactttcttcatcttgatgtattattttattttgtacatgacaaagatagcgcacccgacaataccggtaaatccctatatatgattaaatttaaccccgtcaacccctattcatggggatgtgattaaagcagtaacaaaccattatcccggatcgcctgcatctctttactataccagaaaggcaggaagtcatcgttaaacaggatctcgtaattccgactaaagtcttccagcagataaggattcacggcatccactcccacttgcatcagcgactcgtggataaaatgagcccagtcacccctcattttgatcgccagctcccggttgttcgtatgtagcaataacacgatcgaatattttccttttttcacgctctccggccccaactccacccgacctcctaaccagcataggcgccgggaatgtaatttttccacgggttcctgttcttccgccatatgtgcgacaaagcgaggcggaatcgtggttgccggaatcttgcagtcaaaccacttttgtaaaggcaaatcaaaccccactccccgcatataattatatagtgaacgacttaatccatcccccagttcgtcatgatcaccaccttgtaaatcctcgaacgccacatcattccgggcaaagccaccgaaaggcggttccgttacccgggttccgaatcgttcgggacacaaacccaccggactatgcgccgtcatggcaaaacgatgccaaaaaccggaatggatatatcccaactcgaataactggcgtaccacttcaagcgaatcgacagtttcctgagttgtctctgtcgggaaaccatacatcaggtaagcgtgaaccatgattcccgtccccgtgaaatgattggccgaacgggtcaactgctccagagtgactcctttatttatcaaacccaacacccggtcagacgccacctccaccccgcccgaaacggcaatacagccggatgccttcagtaaacggcacaaatcccgtgtataagcccgttcaaaacggatatttccccaccagacaaccgtcagttgtcgtcgcaatatttccagtgccagctctttcaataaagtgggaggtgcagcctcatcaacaaaatggaaaccaccttcccccgtctgtgccatcacttgttccatacggtcaacaatcgttttcacctcgttcggttcataacgccggatataatccaagctcccgtcacagaaactacactttccccagtaacacccgtgagccaacgtcagtttattccatcgtccgtcactccacaatttatgcatcgggttcacgatctcgatcaccgaaatgtacctgtctaataacaagtcggaataatcaggcacaccgatctccttttgcgggataatccctgcagactcatcattcaaaaactcgaccttcccgtctcgtaaacaaaatgtgcgtaccaaatcggaatccccgatctgccccgtcacgtgttcaagcaaacgcactaacggcaactcaccgtcatccaacaacaagtaatcggtaaagtggaagaaacgcacgtctgtcaacgatcgcaattccgtgttggcaaatcccccacccatcgctaccgtgacttccgggtaattaaccttgatccactccccacaacgcaaagcactataaagattcccggggaacgggacagtgatagccaccacttccggacgatattctttcatccggcccgcaagtagccgtatcaggtaatgatccgtgaaagtcaaaggctttgccagctccgcgttcaactcatcaaaagaagaggccgaacgccccagatgctccgcgtagcgactaaacccgaaatgctcatccaccgtctcttgcaagaaatcggacaaatcttccaagtacaaggtggaaaggtaacgggctttatcctccaaccccatcaccccgaaggcccattccgtatcttcctcttgctcgaaacgacttgcccggggcaggaaataggattcgcaaatcgagtaagccagcgtccggttccttccttgcaggaaagccatgaccgcatcaatcgtacgctcgtattcctcttgtaaggcaaaaatacgccgggcgttgcccgacaaacggatttcccgggctgccacttgttgaaaaagctcatgcagcccccgggatgaaaatatttccagaatcacttccaagctcaaatcaacctgcacggaatcaactcctttcgtgttcaaaaaacctttcaaatacatcatcgccgggtaaggtgtattcaactgcgtaaacggtggtgtcaccagcaacaccttaggggaaacattcattatcttgaatttatgattaaacaaatatacacttttttaattccaagacaaaatttaggatatgccacttttatttcttaatttagcgaatcgtaaaactactaacatttagctattatgagtagaaaggaaaaaagcattgaattattaaacaaagcagttgctgacgaattgcttgccgtacaccagtacatgtattttcatttccgttgtgacgatatgggctacgacctgttgtctgggttattcaaacgtaccgccatccaagagatgatgcacgtggaacagctttcagaacgtatcttgttcttgaaaggagaagtggaaatgaaaacgtccggagatgttcagaaaatccatgaaccgaaagaaatgctggaattggccacggccatggaagaaggtagtgtaaacgactataacgcttgggcccaagaatgtgctgccaacgcggacgccgtatccaagaaactattcgaaacgcttgttgccgaagaagaagttcaccaagatcagtatgaaacagaactggacaacttggagaaattcggagccaattacttggccctgcaatctgttgaacgcagtaaaagcgtggccgtgggaaccgctcccgcgggagaataaatgattaggaaagcgactcgcaagggtcgcttttctttatctcagactttaaatgactgatcacagattacataactccatactatggatctcatgaacaagaggaggtgtcaggatttttgggcacctcctcttaactatacacataacacttgattagaaccggtaagaaataccaattgatggcgaaaacgccgtagatttatattttccctcaaacatttcatccactcccgtgaccacattcttgtacgggtacttcccatgctggctaaacccttgaatgtaaaggaatgccacgtcaaattgcaagcctttgtaaggttcgaacgtcaatccggcagaaagccctaatttgtccattcccggggtttccgggttgtacaacttcttacgaatcgggctttggtcataatatactccggcacgtaacaccaaacgatcggttgtcttgtaacttgccccgatacggtaagtcattgaatttttataatctttctccgctttaatcggtgcgattcccaattccgcctcgttaaaatacacgttcaaagaatcgtaagcattccatcccacgtattgtaaatccagtgccaattcccaacgatccgtgggacgatagctcacgcccaacgtcgtgttagaaggcaggggcagctctgcgtgaaaagatccctcgtcatacctgggaatagagatattcggaatcatcactcccggcatctggttcaacataggaccatactttgcaagcaactcttccatattggcaaacaaatcctctatacgacggttggcataatttaacgaagcttccccttcttttacccgcattttgatcttggaacgataagacaaaccgacagtcaccttatcacacacatcatacatgattcccacgttaaaacccactctcatgtgtgcattcccttccaaccgggcataggcaggcggaacctctgtatttttcattaacgtaaccatctcttgcattagctgtttatccgcatctggaattacattcgagggaacaccagccaataaaggcaataaactctcgaacttcgttcctatcccctgcaaatcactcgctcccatcaaagccctagaaagattcacgtttccccaagccagttgcaaaccgacaccgatactcaaacgatccgtgatcttgtaagaaagcgtcggttgaatcacgtatgatttcaggctaatatcttgaatcaaccctgcgcccgcccagttcttcggccacttcaaggagttcccgtaaggagtggtcaggctgattccggcagccagattatcgtaaatcttaaacccggcgtaagcgtataacggtgttcctaccggattatccgtcttggccgaatacccgtcataactatatttagccttggccatgatagcagatatacccagcgaaaaatccatattcgtacgcaaaaacaccagccctgccgggttaaaatgcatactctccgcacccaatttcatcccggtccccacgtgtcccattccggtctgtttcgtgcttaacaaattgacttggtatccttcggcaaaaaccgtcatgctcaaaatagaagccaatactacaatgactaatctcttcatagaatcttttttacattattacttaacgatcaaatcattaaaacaatctaatcattattttctaaattttaaggcgcaaaaataacattcaactccttaagttgtttctactttacggtatgcaacaaaaattggttacctttgcgtccaaaatacagacaccatgatcacgtttgaaatagacaccgaatacattgaattaatcaagctgctaaaggccacccgcatcgctgacagcggtgccatggccaagattctcgtggaaaatggagaggttacccgcaatggagaacccgaattccgcaaacgggctaaaatcaccaaaggagaaatcatcaccgctttgggacaaagcgtgcaggtagtataagtgttttttcatcaaaacttatacatcagccccacgttaaaaccgtcaaatttgtattcaatgcggaatcccaagtcgtgataaaaacatcccccaccaaaagacaaatcatgaccttccgtgtagaaggatgccgaaacaaacggcacccacacactcttttttacaatcataacccgttcccgcacgggagtataagcataagcaagatgttgcaattcattgtactgcacggaaagctctacagctaatcttccggattcattatcgaacaaggtctttttatattctcggatcaaattccaatcctctatcgtaccttttatcgtttcctcccgatccacggccgggacatcccgataaaccgtatccgttttgtacttgtacttataacgtacttctccggacaggcgaaccgtgtccggaataaagcacgttatagtatctcgaatcgtctctcccttcatgtaaattgtccttttcccctccttcatcgtgtacctcccgacaaagaaccccaacaacaaacaaatcacgccgcatataatcagagtcttcatatcaatccaatcttttacacattctccggtttttgactcatcggttttattttacctgaataatttttccaagccattttatatgcttccacggactcatccgggacatagatattgaaatcagtatatatataacccaaatcgctcactaatgcaggaggtgttattggtttacatataaaatttttcaaattattacatccatgtacgacactccccccgatggttgtaatggtggaaggaaaaataatagtcgtcaataacctacatccagaacataacgaattcggaacaaccgaaagaccttcttccaattccatggtaagtaatctcaaattatcttgccattgttgagaataatccatatccaaaagtaaggtatttggaataaaaacatgaacaaaccgacagtctctaaatataccaaatcccaaagttgttaaacaagataaatctataccattttcatccaaagaagtatgaccaaatatagctattgctgacgtatctatcttttcactaggtaaacttattgtctttaatccggtacaattttcaaatgttctttgcttaaacaaattaacattcacaaaattatttgcaaaatcagacaggtctgttatttccttattatccttaaaataatcattaggaaaatctgtcacggctgccaactgtttacgagtcacacccaccccgtccgtactccatctcttcactaccaaccggtggaattccgggtctttaaaccggacgtaataatttcctgtaatattcaacaccaacctattaaatttactccgtaaagcattgatcgaatcctcgtaagcatctgcgtgaatattcaatgttccgtccagcaccggaaccgggtcttccccggcaattccttcactgctcagtccctcgtaacttccatcaaccaagatagccaatttatcaagtatatccgaactatcgtacgtctcattaaatcccacgacccgcacccgtttcaaagcgtgttccgtcccctgttctttctgggcctccatcacctctaccagcaacttcaccgggtgaagtaacggacaatcctccacgaaaaaatccgtgatgatatgcttacattgatccatcctgactccctccgtcgggagcaacgggtagttcgacagtgacaggtactgattgcggggactaaactcgatcacccgcatactaccacccgtcggaagtttcatctgcgaaagggaggttccgtcagcatacacctcttgcaagtgcgtgcaggaagtcaagttcaacgtaccactcaacgtggcaatattcgacaacacgagtttctgcaacgacgtgcaattcgaaattgtcaacgacgtgatcgagatcacgatatgccccgtcttgctccccaagcgaatttcccggagcatccgtccctgtatcaccatggacccttgcacattcttgtcataccaatccccgatgtcttgcaaataagaggcaccctgtatcgcgttctgttggtcgcccgttccggaaagttcaatcaccatggaacaagtctcccctgcccgggtccgttcgccccgaataatcgacgtaccgttggcaattgccgggtacatatccatcgccggggtcagatcgtacgtgatcgtgtttccggcggcacgtaccgtaatcgtgtccgttcccgcagccgagaacaaaccgaaactatactttgacatcatatacaggatacgtttcgtgatccatcgctgctccgcttgatagtggtcgccaagcgactgcgtgatcgggtccgtgtcgttcgaataaattccggcacgataagccaacttgccgttttcgtaacaatacctggcatcggcattgtatgaatttgccgggaaatactcctgtgcctcatcaaagaaatacttctggtaaaaagcatatatcttttccagatcattccccgacttcagcccgcccagcgactgcatggccgtcatcatccctcgcatactggccaccttctcctccgggaaagccaactccatcaagttaaagaagttattcgtctccccgttccagatcgaggccccggtttcatccgtgtcatgcgtttccacgctatactccttgttcggcaatccccggttcgtcgtgtcaaaccgggtgtccgcgtcgtccacccgccagcggaaacggctcgtctccgtcccgaacgagtaaggatacgtgttcttcgcccgctcatccgttcccgcgttaaactccacgttattcatgaaaaacaacgtgtcatccacgtcccagtacaacggagcctccgccctgaacttggcaatccgggcattcacaaataacgtgttcaactcgtcattcgtctttcccgccagatttgcagccgacagcccgtaccctttatccaccaattgcgtgaccagattcatcacccccttccccgtgtccgagggaataaaacgattcaacgacgcctcgaaataatacacgtcaaatcggctcccgtctcccgccttggcaatccagaattcgcatggccgagttctcatcgcggcggcctgctcgttcaactcttccgggggcccgtcaaaaggcaacaaacggggagaacattcatacacgatattatatgccgggataaacctcgatatactctccaccttaccctctccggcatcccagctattcgccccgttatactggaaagcctcttcatcattattatacaacacgttattattccaaggtacccggaacagcgtacataatggcgagttatccgatccctcgatactgatcaggttcgggaacaaatccgtgtcgaaaccgaacgtgtacttgtctcccttgtcgggcccgaacgtgtacaatccccggaacgtgtacaccgtacgcccctcctcgttcaccgacttctcgaaacacacgaaaggcaactggtacaccgccacacgggcatccgcataagactccgtttccatcgcctcgttccgcaatcccacttcccggtacaaatcgttataaccattcaccgacccgatcttgtgcgattgcatcgaagaagcgaaattcttcttcgcagtgaacttctgccctgccggaatccacggcaccatctgccacttcttcgtgcttgtcatcccgtcggcatgagtaatcaccgagttcgctttatccagttgatagcgggtattccatatccagtacttcatcgatgacgttccctgtcctttcgccataacctcggaaatcgaaacattccattccgggtgatccgtaaacaatacttccagattacccacccgtgctgtctggtcggccatcgagggaatcgtgttgtcaaacacgaggcaattcaactgatccttcgtgttgtcaaaatccacctccgaaccgttcccgtccagaatatcgttatacaaccggacacgagccttttctgccgaatcggataaccagttgatataattcgtcaacacaccctgcgatgtcaggccggaatcgtattcccggattccgtatatatccacatccgcgcagtccgagccgatcacgatgccccctctctgggcaaaataatcattatcctcgtaagcgaactcccggttcttaaccccgttgatatacaggatacagagattaaaatccggattcccgtacgccatcgggagaatcgtcagcgtgaaccgggtccgctttccctcgaacgtgtggaggctctgcacgctgtcctcccggagcgactgcgagtgcatcacgatctgatccgcgtaaatgttcagccccgtgaacgacaccccgtcgggcgtggaaatcgtcacgatcggtttcgagtaatccgtcacgtgatccacccggtaatcaatctccagcgtcttcccgacccgggcgcattcccttgcgaatggataataagccatcgtcaacgaagaacccgccatcagtcgcaacacccggttcccgtccgcatccggtacccacccgtcatttccccaattcatattcttccactcggcagcaatcgccgtaccatccatctcgttcaccacctcccggtaattttcctgccgattattgcgggttcgcgggttgacatacaaggtcgccccggcaacggcggaatatcccagcgagttgttcacggggaaaacgagtggtgacgtcagtgcaaccgactcgtcaagcacctccacttggatggaaaactcgctgttgtccaacgtgtctatttccaagggaagagagaacgtgtgcttggtcgacacggcaatactgttttcattcgaggaaaacacttgttgcccctctttcatgatcacgaaccgggcaaacgtactcacgctatccccgtcgtacatggcgtaatcgaacaacgtgttctccacccagttcgtggccttctccaacgcattattaatggcaatcaatttcacccgctccccggcaacagcacaaataatgttgaaagcaaccgtcttcgtcttgatactctcgtccgaattcgccacgtacgccgacactcggaacacccccgtcttccccgggtgaggaatcgtgtaattataggccgtctcgatatacacgttcgtcccgatcgccacctcgtacgactcgttatagtcctttcccgacatcgaaacgtgcaacgtctttgctatattccccccgatattcaacggtaaaataatcgcccccgagtaggccgtccaccaccggaaattatcggcaaaaatggacaacgccgtcagttgaacggtgtaaacgaaagcgggtgtcgtgacttccgtaacctcccccgtcaccttgatcatcacgttattggctcccgaactcaagaactcggccacgtcaaaagctaccggggaagcactattcacgtacacctgtttcacgaccaagtaatccgaatgatccccgttcctcaccgatatttgcagtagtccccgctccccggtgtcctcgtacggctcggaatccgcgtaccgttcttgacttacgaaggtgaaattcaaccagcaaggctctcccttgctggccgaaatattcttgctatccaaattattcacgatccggacattacgttgtaccccggtccccccacccccgccgccgatttccgacaggcgtttcagtgtccacgtcccacttcctttcgcccgcatcaacaccacgtcctcgcttccggcatgatccgcctcctcgtccacgttatccaaacttcccagcgtgcctcccaccgtcaagggcaacgagccgatatatgtccttaccagtttcccgtcttcctcgatagcatacaatgtcccttctttctttttcccgatagcatcatattcggcttgagtcaacaactcgtaatccagtgataaggccttgaccaacggggtaataaccttctctttcatatccttcaacgtcatgctccccgccacaaacccgttcttcgcatccgtcatcaaaaaagtatcctcatccgacacgctatgagccggaaaattctttatatctattgttcccatacctataacacgtattgtttataattatacacgaattcctcttccgtacctttgccttgcggggtattgtaaaaccgtttccagtaccccgcccatcccgtcaggtccgagggaatcttttcccgaacccgggcgtagtgcatccgggccatgctgattgccagtgccagattatattccaagtattcacttttcaaattaatcacgccggatacgatcagcactttccggcacaaatccggccgatacgacaaatagttccgcacgatgtcatcaaaagtctccggttccatctgaaaaatccctaaggccggaccgttccccaactgacggatatattcacccaatgccgactcttgggctgccgtccccatcagcaagttttccgcctcctccgagtaccccccgatcccgatcagtactcgtcgaatcaagttcctaagttgccttttgtccatcatccagttcttttatctttttcaacaactcctcggcactcttcgccgtcgtgcaattgataatatcccggatcgctgccggtaacttcgccacgtttccctttttcgcccgctcgttctcccacacgctccgtccctcgatcagcacgatcgccgccgtcacgatcatcgaggcataaggatattcataccacgggatacaactcccgatcacgtcaaaaatcaacgccatcacctgtatccgccaataatcccccagtttcccaatcgtccgccggaacccacccgagtttatcacttctcccctagccctggcactattcacccccgcccacaagtccatgcaaaccgccatcaccatcaccacccacatggctaggatgatatacacccgcaactgtatccgggagaattctcccgttaccaaataatcaatcatctcattcctgtttattcacgttctccatctcgttataagcctcatcaaccacgtcccgcatcaccccgcactcttcatcaacactcattccctcccggtaacgttcctcaaactttcccttgttcagttcgaacaacaaggcatctgccggtaacccgttgatcttctccccgccaaccaacgaaagcaacacgctctcctctgccgacgtgatttcgatttctccctccgactcccggatgcgctgcaataaactcctcgtgatggacgaggaaggaagagaggcataaatagcattcataaagcccttactcatatccacgagcaagtatttttcccggtacgagtcggtaaaaacccgtgtttgttttaaatttatctttttcatgtcgattcttatttaaactaatcatttccaaattttacccctgcaacatccatcgtattcatcacccaacaatacgcaccatttacatagccaataaatgttatcatcgctaacacagttaccccgccacttttatcattaattaatccccaattataattactacctctataatacattttatgatttccttgaggaattataccaaccattccactccctaattgttttacccaaatagcttttccttccttgggtgcagtcggaagttttaaatctattttactactatttgtgcaaacaatatactcatcgtcatctcctatctggtatccactcaatgaactcgtgtactttaatacataacgaccgcctttaaccactccgttccccaactttacatctccattaagaatatcaatagcaatattttcattggcaccagacacatctatttctactccataattagttaaagttcgattataatccttattaataaatcgagcaacccctttcaatccggtagagagcggataaacattactaccgatcattgatagcctgttagcttctttaaattttataaactcctcgtacaaagacattcctgcagtcggattgtctctatctgtagatttacctatacatgaattagtaatattaaagttaccaatcttatttacactcccaagttgaaaaacaggcttatcctcgttaccatcaataactcctttcaatccccaatcatccgtatccttgtaattcatcgtcacgtaattcttagcatctttccgaacaaggacagttccaccgaaaaaagcatctcccgtttgagcatcaatggaaaaggttaaatcaccattcttcattccgaataatcccgtctgcatcactccattaacctctatcatatcccggccaaacatcaccccggtaaatttgccactactctcttttttcccggcaaccatccggggagaaatgattaattctctcccgacatcggttttgttcccgttccactcctcaatccaatccaacagattcgcatcaatcccatccttcccgtccacaatcaccggcacccgttcccggtccagcaccgtgctaccctcgtagagcgtgaattcgatccaagtggcactgcccacgcttaccgcacccgtgtagtccgtcaggctaccatccgacaactgatacttcaacgttttctccgtggtgacgtacggggcggaattgccgatctgtttcaacttctcgcaactgattgaggcggggataaatgttcccgttttatccttgacaatcacgtcagcggaaggtcgcacgctgtaaaccacggcgggttccccgttcgctcccggataggctttcgacaggctgtacacggccgtcaacgaggcgtacccccttttcgtcgccgttaccgtcaccgatccgctatccgatgtcaacccggtcaccgtgatcgcccccgtggaggcatttaccgatcccgtacaaccggaaaaactgcccgaaaaactccaggccccgtccaacgtggtccccacgtacactttagctgtcgatcccggaatactccccgtcacgaccccctccgcgttacaagtcaccgtggcattctcgttcgtcaggtccatgtacaccgcatccgatcccccgtacaatctcgtcagggtaaacaacttcaagaagacctctcttccctcgcaattcacctcgatctccacagtggccttgtccaccatgatcttcgtgatcgtcaacacgccatccgcaaaaacatactcgcaccccttcggtgtcaacgccaccgcatacacacccgttccgggcgtctccgcgtaagtcaatgccccggccttatacgcctgaatccgggtctgaatcttgaaccgggaaaccaccaccgtatcattccccgccttcaccagctcctccccatccaccacgttcacgatgtcataaagcgacgaatcaatcttcccctcgctgtccaccgccaccaccgcatcgtaagtcgtcaacaacaccgtgtaaccgttctcccctttcaactcctcccgttgcccgtccatgaactccaagtgccctttcatgtaaatattattcaggtaggccgagtacccttccatcgaaacgcccccgacgtgcagttccgacaaatccccgaactgcatggcaatgttccgttcgggatcgacctcccacgtggccacctccgtcaggtagcgcttgtacgtccttgtcgaataggccgaagcccgccgggtcttgtccgtaaaattcccgtacacggcaaacttcatcgccgggcagggatgcatgctcgtgccgggtttcaactcgtagcggaacttcccattctccatgatctccgtcggtgtgaaataaaccgtcgaaaacccggccatcgtcaggaacccgcaaccgtccacccggttcccgtcggcattccccgtgaggttatggaatattccccggcaaatatcattcacgtgcagccccgcctgttccccttcttccagtttcaaggtcaccacccggtttgccgtgtccacgctctccaccgtgccgtaggcgatggagttccacaactctccgctgaccacatccacccggttaaaccgcaattccggcacttcaaggaactcccgcaacgtcaatcccgtcatctcggcgtacccgttctcgtccatcctcgccccgctgccgccgaccatcccggacatgaacgtcccgacttccaggttcttgaacaccacatcgctctccgtcttcacggcctgatccatgtaatcgtcgaatgcatgcgagtcccattttgcggcatcaggcacctgagctaccgtcttgatctgccaaccgtccgcatcccacacgatggcctccccgtcggtcatctcgtcggccaaccgtccgaaattacgggttgtccattcccgcgtggcgttaacggcattcaacacctcgctccggtccagttctatactgctcttcacctcttggatcttcgccgtcaaggcatcctctaggctcacctccaggtaattcgacacctcgcacgtcagcttacccgtgtgcaactgctttttcaccgaggtcagccgcaatcgctgcaccgtctccatcccgggaacgacaatccccacgacatcccccgggttgaacacgatccccttctcccgcacgtaacggtaatctacatctaggttatacttcacccgcaaactcgaatgcgcccgcatccacttgcgtcctttctccgccagcaacgcctccgccgtgcggacatacgcctccggcaacgtgatccccgtgaacgtgaacttgtcgcccacctgtacccgccacgtggcgttggggatcgtcggtcgttccccgccggggccatctcgtcttcctgcgggatcagcttcaacgtccgcaccaacccaccgtcacacgtgaaagagaacgccttccccgtcaggtcgcccgacaggaagttcacccgtccctccttgccgatgaccacctctttcaagctgaaatcaatggcattacaggtcaacgtcaacccgtcctccccgatcgtgtccacgctccccgtgaacgagggtttcacgtcgtcgaaatagacctcccgttccaccagtttcgggtactcctcccggttctcgaaataagggatatatttatccgaatcccgttcccggggacagagacgctccaccagtcctttacggtagccgaccggtagattctccgtgctaccgtaaacgtatgcccgggtcaccgtgttgtcggtatccacgttctgccgttgcaacgtgtaaagccctttcccccgtccctgctcgaacacgaggctcgtggcgttttccacccgttcgtagaacgcgatcgtccggtcacgaaccacgtattccaccccgaactcgtccgccaagcggttcagcacatcccggcacgtcgtgttgtcgaaactgagattcttccgctccgtcaccaccgtcaccgggtgatcgcccttgtccgtggcccacgtccaccccgggtcgaaatcgtcccggttaatattcatcaacaaaagctccacgaaatcattcaacgtccccgacaacgagaagcggctcagtccctgcacgtccgagatataaatcttgtccagcaaattgtacaggggactttccagcaccaagtcataccggaactccaccgccgaggccttcacgaggtcgggcgtccggttgatcatgtaactactaccctccaagtgggcataatcgcccacccggagatcgagcggctcgctcacggtcacgctcaacgtcacctcgtccgcccccatcaacgttttttccaacgtggcgttgtcatccggaacactcgccacgagcgtctcttccttattgatcttccgataaatttcgatcatattctatcacgtttaaagtaaatttcaccaccccgtcactcacgatactcacgccaaaaccgtccttcacgaacacgcctcgctcccgtccgtccgccagacgcaacacccgacccccgggcagtcgccacaaggcatggaactgcctcatcctcgccccaacttccttcaaattccccgcccgcatcacgcactccagcgaaagcaccgggttctcccggaaagccgtgttcaagtaaggggccgtcgtacttacctcaatccgtttcgggactttcaggtcgcctttcaccgccgtcaccgtcaccccgaaatcccgggccagattaaagtcgtccacccggatgcgcccgcccccgctccccacgagggtcaactcctcgaactccacgtgcggctcccggaacttcagatcgagtttcagcaacttgtcgtccacccgttccacgccaacctcatccgccatcaccacgtcgaaattccccaactccgtccccaatcgccgacaagccactgccgcctcccggaaacgctccatgttcaccgcatccgccatcacgaacttcaacccgatcgtccgcccgtcatattccaagtccttcccgtcaagataaggttccaccccgtcaccccagttccgctcgatctcccccttgcgcttcgggaaatcgaacaacccgctcaccgccacgccgccatcaccccgcaagggcaacacgccgtaagcggtcacatcgatcgtatcaaacttataaatcatacgtttccttgtttttatgtaccaccttcgcgtaaccgtccccgtccgccaccgccgtggcccaggcgtacaggttcaccaccactttcgactcgccctcgcaatgcacctctaccgccgcatcatccagcgcatccaccatcacgaaagcatgatccctcgcccaaatcaccacccgcgaatcatgcttcacgtacaagcggctcaccgcgtacttctccacaccgcactccgcctcacacgctcccagcaacacggcatttccccccgcaatctccacccgttcgtcaatataaattcctctctcgtgtaacatcccgtcaaaatgctccttcaaatactcctttgtcgggaaattcttcgccagacaaaaatctatccggtcccaatagcactgcaacatctcctccttatcccccgccgccgccagttgcgccatcccgtcagcacatccctgtaccaacccggctcccaccaacaattcttcctttaaagacaccatattaattttagattttagattttaaattgaatgatctattcattctaaatttccttcaacttttagtttttagcttttatcttttagtttccatcatctccccctccccacgtaccccctcgtgttccggtctatcgcctccaatcgctgactcacacgtccgagttcgtgcatcatggcagtcgtgctttgggcggttacccgggtattcaccgcaatctcgttctgcaactcgatcatttgcgtcatgttaaagggagactccggcacggtcaccgtccctgtcaacaaccaatcccggatggcccgcacgtccgaagccgtcatgttccaaagtcccacaagctgactcgccgtaccttccgtcatggccgcctgcaattgcccggtcacctcctgcacccgactcgacatatccttgttcaccaccagtcccatatcggtcatcatctgtacccactctttgctctgggcactgatcgaggacatactcgactctaaaaatcccttgatttgccggatctccccggtactgaaattaactccttcctccgattcctcggctgtaaactgctccgccgcatcgaacacaggttgtaacgatttttgaattaacttcatcgacaattgttttgcaagcatattcttaatcaaggtatcaaccttgccctgcatgatagcgtcaataccctcggtcccctgcgagaaggcatccaccagagttgaacccaactgggaagcgaatgacttcaaatcagtcgtcatcaattcatcgataatattttgttttgaatccgcaatctgattctccaagctagtgatcgcctttttatattcttccagcttccccttatcttttttcttcctcttcttactatcctccgcccttaactgcccctcgacttcaattttctgcttttccaaattagcaatctgatccaccttcgtttcgtactcttccgtacccaatgcttgacttgcagcccgagccaacccatcatattccgtctttaatttcttcaggttctccacatgctttttgatctctttatccgctttcttcgttttgaaatcgaacaatttcgtagcactcgtgatcatccccacacccccgctaatgacactagaaatatctcctgacgccaaccctttcgccatattccccatcccggaaaccatcccgctaacctgatcgaaagttgcctgcgcctccttactcatcccaaaagcccctcctatttgactaataccagataaagcttgagtagcaatggcggagcattcgccaagggattctcccaagtccttccaatcctttttagccattttagctccagtccccatactcttaaaaagaaacgacattgaatcttttaatttctcgaaaggtcctttatctgtatcttgatctgcatctaatagcttcaacaaatcctttttagcttttgctgttaactttccttccaaaaccaacttttcgacctcatttgtcacagcagccatcaagtcattcgtactatctactgtcaaccgaccaataatcaaccaaataaactcccattcctgcggtaatttcaacattttatcccgtaaagcctcaatactggccgtctcttcattccggacaacagtcattgcttttcgaatacttgtaatttcaccctccgctgacgctcgaagttgagcggcttgcaattccataatctcccggttcgccttatcatgaatcgccttcaaatcatccgcaaacttttggtagataccccgaagacgttccaactcttttttactatcttcaatatctcctaacggcataagcgaaacacgttcctcctcagaagaatttgtggtggttactcctaacgccaagttcatggcactttctttgtctataattcccatattattccattgttatcgttattcttttctattaaaatatgagatacaccattttttctcatattttcaaaaagaaatgcaaatcttttaactgcattactacaacaaatcgacaatattactattttgcattattatcaatttattatttcataattacacatatcaaattaaaatattcactacctttgtataaataaaacaaaagggacataacatgaaatcactttttatatttctaattttattctcggttacatccttgaagtctgaagctcaactagcaaagaataaagctgtatataaatatatcgtacgggattgttatattgaacgtgaagaggctgacgatttagactatgaagataaggatatcaaattcgaaatcattccagatcattattccatttggacaatttccattgaaaacaagacaaaaaatgatatgattgtttactggcgagattgttcgttcgtagcttgtaaaataagtggaagtattctatttgtcaataaaaaagatctttctcttaaatattatccaccttacaaagaaaaaattgctcccgaatcaatatttagtgaaacatattttgctcataataaagtaacaagcctcattaactctaaaatcataaaaataacaggtgaagattattacatccgtttaatcatcccgattgaagtcaatggtgaactaaaaaaatacgatttcaaatacaggatatatcttgccaacgctgagaaacaacaaaaatacaaggaaaaaatacaaaagaaattcaagaaagaaatgaagaaaaaaattgagaaggttataaagcaacatcaagaataacaactctattccccaacacgtgcaatttcaccctccgccgatgtccgaagttgagcagcttgcaattccataatctcccggtttgccttatcttgaatcgcctttagatcatcagcaaactttagataaataacccgaagacgttccaactcttttttattgtcttctatacctcctaatgacataagcaaaacgctttcttcatcagaaggatttgttgtagatacacccaatgccaagttcatggcactttctttgtctataattcccataagattctatatttagcattattcttttctattaaaatatgagatcctccattttttctcatttttccaaagagaaatgcaaatattttagttacaggattacaacaaatcaacaatatcactattttgcaatataatcaatttattattccataattatagacatcaaattgaaatattaactacctttgttataataaaaagagaagtaatatgaaatcaattcttttatttttagtcttctttatattcacatttacaagatcagaggcacagcctataaaggatcaaaaagcaatatacatgacttatgggtgctgcattaaacgtgaaaatgcagaaaattttaattatgaagacaataacataaaatttaatatacgaccagagttaacatggtgtgaaattaaaatagaaaataagactcatcaagaaatgacaattttatgggataaagctttatttgtcgttaacgagcaaagtgcaagctttatgtattatcttaatttagattgcatatctttcttgtcttcagaagaaatcatcgcaccacattcctatattgagaaagaatgtactaacacgacattaagaggacgctttattcttgataatcgcatcatcaaaaaaacaggagaggattattatatccgcttaataattccgattgaagtgaatggtgaagtgaaaaaatacgactttaaatatagagtatccctcatcaacgcaaagaaacagcaaaaatacaaggagaaaaggcaaaagaaaatcaagaaagaacttgaaaaagtcataaagcaacatcaaggaatagtaattcttatccggaacggtagtatccaaaattttgcaaataataaatcagaaatatggtcataatcaacctttaatggtacattctaaaaaataaagatttaaattttattgattttcaactcgcttggacaaatgccatcagtttctgtgggtattatttcactaacctgaatttgatttagctaaatgtccaacaaaccatctattcgattttcgtaatttgttgtcttctctataaactcatcaagattgataacaagagaatcaagcttacagaataaagtatgcttattcattattactttatatccatcattgaattcagatattacaacacttcctttatacttaaaaccttcaacaaaaaaacaaatataggactctttgatacaaatgtttgatagtccccacgaggccactattatgttttggtttaataatgtcaatagtgcttgacgaattgaattacttaatttcatgtttgctatatttaataattttcgatatcaaaattactaaataaaataattcataccaaactttatcttacatttaatatattgcaaattaaaaattagtatttctagcaatataattattaactttgtatcctaattcactaaaaaatggatttgagattaaaggaaatacttgcccaaagaggaattacactaaaagagttcgctcaaagttctggtattagccagtcaaatttgagcaattatctcaatggaaatatctcaccgactttagacactctaaagaaaatcgccacgaatttgaacgtggatgtggttgaactttttcgtgaaaaggatgaagttgagatttatgcaaagtatgatgggattttatatccaatcaacaaaagtgatattttagacataatttcaaaaaagagtaaataatgagcgtcaatcatatagacttaagcctaaaggaaatccggcattatttagaagggtctaatataaacgtattcggttttttagacaatacgaaagcaagtgaattctatattcgtacacaatttattcaagatgatgatttttcttggacaacaattgtgccatatatttatagaaggactggactcgagttaaagaacgaaaaggatattgcagattatttgaagtctgtcaaaaaatactttacaaaggattggatggattcttgggtaaaagaagaaaaaaaagagtgtcttgcagacatagaagctaaaaaaaagcaaaatgcagacaaagaagcacgtgggaaaaaagcgagtgagatagtaaccccgtacgtgttgcttcctctttttagcttgaaggaatgtaataataaaacagagttgcctccaaaccctaatctgcaaaggagattgcaatctttgaaggatagtggttacaccatagctatcgtacagtatggtagagaaaaaacaacaagtactttgttgcctttccctaaatataaagaaatggggtatgaaacctttaccaaacagtttaaggcaagagttattcgtctattaaaacaaagaaatgcttttgaagcaagagaaacatcagcaaaatccttaataccagaccataaattttcagaagtaagatgggacaaagaaaccaaagctgaaaattctatggaaatgacagatgcgcaaataatagaaaaattccaactcttggacaatcaaagaaatcaacaaaaacgtgaggtctgtagaaattgtttccagaaaggtataagaggtaccatatatggtataaattatttttatgaaggaacagaacgatgggatccccaaataccgactgtaggtaaagctgctgaaaaaggttgtaaaggttgtccttggtatgatattgaattatggcgtaaaatgattaataagaaagtgtaagtatgcccatacataattttggaagtgtttgttctggtattgaagctgcaagttttactcttacacctttaggagtaaatcccttgtggctatctgaaatagcagaatacccgaagagatttttagagctacaatacccggaacatccaaatcttggagatatgaccaatatccccgagatgattcaaaatgcccaaatcccgactccggacttattggtaggcggaaccccttgtcaagccttttctcttgctggatggcggaatggggtcaatgacgaaagaggtcaacttactcttaaatacattgatataattgatgctatagatgaaaaacgagaggaatgtggagaaggacgtgccgtctttttctgggaaaacgtggaaggtgcattaacggataaaaccaacgcatttggatgctttttagccggattggcaggccttgacgagcctgtaaaagtgtcaaaatttaaatcatcaggcattcttcatggtcctattagaaatatagcttggagagttcttgatgccaagtattttggcgtaccacaacaacgtaaaagggtttatgtattaggtggcggtcttgactttcatcccgaaaatgtcctattcgaaataggacatcaatttcaagacccttacaaattgcgagaacctcgccaacaagtagtaatgaatttatttggcgaacaagaaccagagataaatcaggatgtaattcgtgaacttcgtagagaaataaatggtcatgacattgaagttttcagatgttactctgactgcttatatgcagcatacggtacaaaatggaatggcaatgcggctgccttcaatggctctttgtttatttctcaaaatggtcgactaagacgccttactcctattgagtgtgaaagacttatgggttttcctgatgattatacagccattgctagccctcgtttaaccaatagatatcaagcaacaggaaattcttgggctgtacctgtaatcagatggataatgaacagattactggcagaggtaaatgataataaccatatagctcatattgaattaccaactccaagtattataaatgaaaattacactctatacttgcttgacgaattcacatatgttggaggacaatatctaaatgcatctacttcgtgctatgattttgttctaaccaatatgcttgacattgtagatactaacccagatgaaaaactttatatttcccaagctggatgtgcaggcattctaagaaggaaacgtgaacataatgcaggaatgaatccaagattagaagtcgtattaaagaactgctctcaataaagattacaaactatgagcaagaacgtctcaacggcaaattgaagaaataatacaaccgaatgatgataataaaatttcattcggctgtaaaaaaaagttgtgtaacttcgcaacaaatctttatattctgtacatttaaatagttatattcggcttttcgcatccatatatttcctgtaacgtcgaggttccccagtagtgaaatccacaagttccacccacttgtatccctcatcttcatcttcgtccccgtatagaatccggttacgctcgttacacatataagtatattcctgtaacatacccatgatcaaggcataactactgtttaatgtctgctcgtgcgtgtaaccgaaagcttccctcacgttcacgagaaacatgaaactacttactggattatccagctttttagattttttcgggcggctatgatctccgcctcgttcaacgggctcatgttctttagtgtcatgatagatttgtaaaaagggttgtagccgacccgaaacagaacggcattcaacaagatacgggtgtcctcccacgtgcaattatccttcagcacttcccggaaccacgcaggaggatcgcttttcttattgtgcaacccgatacaaatgacggaaagaataagctcatcatattttcccataacttccggcaccctcggatcaaacgtcccatccccgtttcccacgatcacctccaaatcctccggatcaatagccaacaacaaaggtttcaaccggaaccacgaacgcacggtaagcggcgtaatcgtgatatatttgtccacccgctttccttccggcacggaatcgagacacgcgaactcgaaaggaatacgaattgtactctcactaacggtgtcgctctctaacgcgataatctgttttatgcccatgtactaattttagatcttaaattttaaattcaagattttagattaaaaaagcgttggccttgcgcggccggaatctcctaatctaaaatcacgaatcgtgaattaaaaagggatgccccggtatcgctacttttggcatcccttttaccggtttaggcttgtggggtcacggtcttcacctcacggataaaggacggtttcaagcttccatcagcggcaatggccgattgacgggtcactttcaccaacaacagatcggtttgttcgctgcccggtgcctgactgatcttggccgaaacagccccgttgacaatggtgtactccacgtatttcccctcgtaaggctgggtggcgatacagaatgctttattgatcgtctcgacactgttgggagcctcccatttatcaccgttttttgtcccgccacaaaaagtgaccagctcgtcagtagtcggtgaaggaatagaaaactcgatactatcggcatcccccttgcggttgatgatcgctaggggatcttctcgcccttccacctcgatcttcacttgattcgcatcggcaaaattaaacgccacggaacctttgtaaatatctcgcaaccgggtgtatgatgccggtaccaccccgttaaccgcctccccgtaaccgatggaagcaactccaattgcaatacttctttctgacataatttttaaaattaatggttattaaaaatgtttactaaaaatcgttccgatttatctatcccctgtcagtgaataattcaccggttcgctttccattaaaatgccggattaccaaaatattctcacattttcatggctttttttaattcttgccgaacgagatcgagcactctctccagtattcgataacgcgtagctatagattccggtccctcccaatcctttacaggacagcactccatgtaataaaatatgaaaagttgccgataattcgaaggtatatccaaccgattcagaaggtcaatgacccaatcatggaaatcctgcaattgttgacttaaagacttttcttgcggatcataactcatgcaatcgacgggcaaagactcgcaaagcacaaatccaatctttttacgagaagacttcagctggtgaaaagtctgccattgaagcactttatattttatggcaccaagaacataaaagtcaagcgtcgttccattctttttcttttcgtgcatgaaatcaatcaaccgggaatcatttttcttttctaaaagttcacaaatgactttatataaaatatcctcggcctcatcttcaatatgatattgcttacttttgtagatagcatattccaaccaatggaaatacctaccatcaataaaatttaataattcattaccttccatgatattcatttagattgtcccttttatctaaaatataaaacggctcagcttttatcacgaaatagaatattaaacgatatttttaaaaataattaacataaaatacaacaaacaaccttcttcccttccgaaaattgctacttttcctcccggcacatacattttcaattcatcagagagcatcctgtagcgcttaataaccacaataacatatctaacattcacgaacaccttaattaccatcaatcaaaaatatctacacgttagaaagttttaattactatacacacacaagtaccccgattcatgtaaatcgatggcgtagatacaggcatcttacagtataatcgtgccgtagtctcaagggtaggtcaacgataggttaacgaaaggtcaacgaaaggttaacgatacggtgtgagaattttttgcagatttcacattataatagaaaggacttctccacgagtcaccaaagagagtataaggaaagagtaaccggagatcactgagactaatttacagaaattaaaaacaaaaacatgaaaacttcagcaattgaaaacaaaagagaaaaatggcatactaacggactcacgttctattaccaagcaggcaaattatgccagtgccgtagcaagcgcccccgtttacgaaatggcaagaaaaaagacgggaccccgttacaaccaagtccggagcaaataaaagccagaaaggtttttaaaaatattatcgcactcaaacattattattttaagcaaatcaaagatctcccgatctgggacctggctcccagggaagcaggacaaacacggctgtctaaatttcataaggtaaactcggaagcttgtgacgaacggggcgtggcgaattacgcggctttcaaattcagtatcggccagttgtttcgccccgtcaatgtccgggcaacacggaagggatgggaaatcacgatgacatgggaaaaccgggaaaaccgcaaactatcactgccatcagactggttacgggtaggatatttctacggctcctatccattttcaccgaggttactacccgacgtggtagccaaacgggaagattgccaagcaacgttcagtattcctaatcccggtctggaaatttcagaacctatccatttgtatttgtttttttccagacaggatcggattgctttttcgacaagttaccacgttcaactttaagaaattcgacatcaaacattcataaacttataaataccaacgttttattcaagatttcaaccaatcgtaattgttaattattcacaaatctgaagaatgtatgggaattttcccacgctcttatattttactaacacagggagcgactctcgatgagtgttcgagaaatctcccttgattaataaccttaaaacccaaaatcatgagtaaagaactagagccggcagcaaccggcaaaagcgggagacgtggaaacgaaattttctggacccatcccacgaagtccggtatcatcgttgccagagccgtcagtgcccggacgataaaactcgatgcggaacgtaaaccccacgccgtcgcattcggaagtatcggacatctcagccgaaaaatgattaaagctatccggctgggattcccgcccaacattatccgtgagaaaggggcaaccctttttatccggatcaatttaaaaaacggagttgccgaaggcattcaaaacgatccggacgcaccagtaagtaagaacaaaaaagcatccgaagaattccacgcagagattcatttcgatcgtctgctcgttgcaaacggggaactagaagggccggacgtgacggttgccatcgataaggaatctcgaatactcacgttcacgcaaacggagaacttcctagaaggaagcaaaaacgaagagaatgatcgtatttatgccgtgatttatgaaactaaaatcgaagcgtgcattattcgtgaacttcgccaacggaaagaaaacgggatgaccagtgtttctctaccggagagatacgatcttgaccagctagcaatctacacgtttgccacgagccggagaggagatcaggcatctaattcccaatgtctccaaacaccaaaaaacaagggagaataaatcgcaagaaggagtatctcgaaagggattctccttccctccgcaactattttcggattataacaaatgattcagtgattctacattaccttatctaaaatcactgaatcataaatcaaaaattacaacgtcttatcccaatttctcagccttaaacccggcctcttttaccagctcgattacccggtcatctgacaaatcggaagtaatcgtcaacacccggtcgggagtggagagatcgatattccattggtcacgagcgactactttatccagcgtttcaccgatcttggcaacgcatccgccacatttagcggtggttttgaatttacttgttttcatatccttcttgtttttaattacgattccacccgtgaagaacactcggcacataaccccttcaacacgtagtttatactttctaacgtaaaatcgccgggcaaggccaccgtgggcacgtgaatttttcttaaacaaaaagtcttgtggcaattccggcaatagaaatgagcgtgaagatcatcgatagaacaggtacattcattactgcataccgaatatttcaacgaaccggaaccgtcatcaatcacgtgaatcaagtgatgatccaaaaacagattaatcgtccggaatatcgtcgatttatccacggtatccaattccgtctctagatccagtaggctaaacgcccgggtaaaacgagtcatcgccttcagaatcaacagccgcatggccgtcggcttgatctcccgcttttccagtttttccaaatataccttctcgtccataacactctatcttgctcgtttctgtattcttatcgcgttcaaaattgccaacaaggctacccctacatcggcaaacacggcctcccacatggtggcgagtcccccggcacccagtaccaacacgatcagtttcaccccgaaagccagcgtgatgttctgccagatgatccggcgggtctctttcccgatccggatcgccatggccaaccgaccgggctgatccgtctggagaaccacatccgcaatctcaatcgcagcgtcacttcccaagccccccatggcaactcccacgtcgctcagggcaagcaccggggcatcattaatcccgtcacccacgaaagcaacacgccttcccggatcgctcttcaatgcctccacgtgcgccaccttgtcctcgggcaacaaatccccgtaggcctcgtccacgcctaaataccctgctaatttagaaacaattgtttgtttatctcccgataatatctgaatattatcaatatttaatttttttaatgctgcaacggcttctttagcatcttctttcacggtgtccgccagcaacaagtgaccgatgtacacgccatttaccgcacacacgacaagcgtttcgggaaccccggtcagctcggacgggaacgagatcccgtacttctccaacaaacgagtatttcccaccagtacctcctgcccgtcaacaagcgtcttcaatccgtagcctgccagctcgaagacctccacgtcccgccggatggagatttgccgggatttagcatattgcccgaccgccttggctatcgggtgattgctccggctctcgacagaggcaattgtccgcacaacctcctcttcggtaaaaccctcccggacgtgtacttgctgcacctcgaacactcccttcgtcaacgtcccggtcttatcgaatacaaccgtgttaatcttcgtgattgcatccaagtagtttccccctttaaagagaattccctgccgggatgccgccccgattcccccgaaataccccagcgggatactgaccaccagcgcgcacgggcaggatattaccagaaacacgagcgcccggtacaaccaatcattcagcacgaaagagaagtccggttgtacccacgacacgatccaaggaaccagcacgatcaacacggccaaccccgtgaccacgggcgtgtagatccgggcaaacttccggataaaaagttccgcgggagctttacgctcggaggcgttctgtaccatttccagaatccgggccaaagcactctgatcatagggtttcgtcaccttcacccgcacaacccggtcggtcacgatcatccccgccagcacatcctctcctgtacggatgttccgaggcacgctctccccggtcaaagccgccgtgttaaaagccgccacgtcacccagcatgatcccgtccaagggtacccgttcccccaccttgatctcgatgatctccccgacacgaacttgttccggtttctcgatcttttcttgcccgtcacgaataaccgtcgcctgctccggacgtacatcaagtaaagcccggatattcgaccgggcccggctcaccgcactatcttggaatttctcaccgatggaataaaataacatcacggccacgccttccgggtactctccaatataaaaggccccgatggctgccagtgacatcaacatgaattcgttaaagtattccttttccctcaagcactccacggcctctttcaacacgggaaaccctaccggaataaaagcgaccaaataccatacaaatcgcacgatttccgcctgaaaccaagcgacattcccccaagataaaccgattccgcaaaccagcaacccgaaggaaatcaattctgcactatattttttcatcattctactgttttaattttccgtaaaattacgattcatttcgtgcaactaaattgcaaaaaacagaacgcacatgaacatgatcccagatcatcccacatgcgttcctccgagctgacactccatagttgattatttggccatcacttcccgatgtttcatgatttcacccatgtgttccaatgcccaatccaccagcatttgcactcgcggcatcaagctttcgcccaactccgtgagccgatattccacccgtggcggaacctcggcatatacctttctcgaaattagcccatcggcctccaacgtccgcagggtgaccgtcagcatacgctgggatatgtcggcaatcgctttatgaacatcacagaatcgcatggttccgttcgcattcaacgtcacgagaacgagcattgaccatttgtcacccaagcgactcaaaacatcacgaatgggacaattatcgttcgtgtaaaaattttccatttttttcttccctatatatggtttagtatcaacaatagttatctccgtgtaactatcttatttataagttcgttcttgtttatgcaaatcaaatagcttacatttgctaaacaaaagtaataaacttactttaaagaactattgtttaactaaaaaaattatacttatggcaaaaaaagtagccgtattggcagttaacccggtaaacgggttcggtttgttccagtatctggaaacgtttttcgaaaatggcatttcctataaagtatttgcagtggcagaaacgaaagagatcaagacgaattccggcatcgccctcgtggcagatgatgtgattgctcacttgaaaggacacgaagacgagttcgacgctcttgtattcggctgtggtgacgctgtacctaaattcggggaaaacgccggaaagccttacaaccaggatatgttggccgtgatcaaagctttcggggacaagggtaaaatcatgatcggccactgcgccgctgccatgatgttcgactccgtgggcatcgccaccggaaaggaagtagccgttcatcctcttgccaaaccagctatccaacatgcaaaagccaccgacgagaaatccgagatcgacggcaatttctacaccgctcaaacggaaaacacgatctggacaatgatgccggaagtgattgcaacgttgaaaaaataaggggtttataacccctctctttccctctctcccaaataggcctcgattatccggaagggagcatccttcaacaaaacccgtttctctcgatccaacaaatagaatgtcgggatcgcccgtaaatcatagagacgttccttcgtgatcacttgaccgtcatcataagtacacatccattctttcggttgttccggcaacattcgccgccatacctccaattccgggtcggggaaaacagataagaacaccagtttcttccggttatcctgtactttgacattcaacaagctcttcaccaacccggatgcctccacctcggccttaatggcccggcaggcattacaatcgggattattgaagaagagaatcgtgtaatccgcgtttatgcccgacaatttccctttctttccggaaggtaatgtataggtgaaatcggttgccggattccccacccgattctttaatgccatctccagccgaaaagcgggacgcattttatccacttctccaacccgttcggaattcacgatatatttcaacacgggaatataaaattcctcgttcaacatcggggaattcggatcataaagatatttatcatacaattccgtgaaataagcaaacatcaacgtgtcggccaacaacgccttatccagcatcccggaaatctctttctcgacatcggcatacgggacataaggtaatacctgcaagaagtccacgaaagcttgttcggagacttccggcacgtgaatcagggatgtatcggcaaaattgaatttatcccagtaatgagccaccatatacttggctcgttcccgctggtcggtataaacaggtggaatttccggaagctggaacgatttactttctgtacttttagattcctcttttccctgtttcttatgggaagaagaacaagcggaaattactagcgataaacacgccgcaactatccaaacccgaacgatcctactcttactcataattcaatctttcatttttctacacaaagatacatttttatccgaaaaacgaggaacaaaaaagaatccgggagtcaccccggattccatcctaaaatttacacgttcacactataacgcgtctactactttcttttgctcattaaaaaacatcatccgttgtatctcaccactttgcgagatcagagtggaatgcctcttcaacgaatgaatccattttttttggtaatcgcatattttactgtctcgtgaatccatcgaattgatcgaataaactcgcaaaaagcatatctggaatctggccttttccacgtaactatatgtcgcttcaaaattcacgttagaaagataaaccgacaagctgtttccattgtgatatgatcctttttcagacaatatttccagctcgcgtaaaagctggtataactccttcttcatgtcctgcacgtctgtcgtcgaaaccagtcccaattcagagaaatacttgatctccttaacgaacgaactgaagagattttcatccaggacaaaacaagtcttcttgacaagtcttaaatcttcaattaattctttctgaatttttactaatttttccggaagaacgatatcggacaaggacgtgggagttctcaaacgttcgttctgatataaccacctgccaatccggaactttgacaaatgttcgtaaggggcgtaaaatgtataaggaatcgtgttcgatgcggtcacgacctccgtcgtcggatccactttcacgtaacggaaaagtctctgataacgcaccagaatttcgcaataggtatccatgggatccgccaaattaagcacgttcaaatcgaacatcgccccactggacatactgttaccgattatcttatccaacgatatgcccaactggccggcgatgatcgctacctcgctaaacgtaaaagccacctccccccttaatctccggtaaatcgcctccttactcatgcacaatatatccataaggatattagcaagattaccctctttaggggtaacctcgcgcatcgtgctgattaattcatttaccacggctttcttcataggggtattattccttaatcaaaaaagtatttacctatagaaaacttaactactttcttagccggaatcaccatgttttccttgctattcgggttataaccgttgcgttccttacgttctctgatggcgaaagaccccagttccaacaaggatattttttcaccttttttcaacgtttcagccatggccccgatcacagcgtttacagctttagccgcttcaaccttactggttccgtttttttcagctactttttcaattaattctcgtttgttcattgtaaatggttttaaattaataaatagagtttattgccacatatcacgaaaccgcacccggtgaataatcactagatgcggctcgaattctaattgtatttttgtcccattgattcgcacgtttaaaattcatactatacaagtggcatctcgctcactcaacagtacaaatatgaagtatattcttcacaattctgtgctacattcagggtatcaactatatactaactttctaatatcgtactatgttttacattttaatttattttgtgcaacaaacaattctaattcccgaccattatttcactaatcgaaacgataacaaaaatacattttcaaaaattgcaccagcttaaatacacaatccctcgacgatttctcgttgcgttttaaagaacttaatacgttgcatctctccactctgggatattaacgtggaaaacttcttcaacgaatgaatccattctttcacactattaaaaacttgctcgtcacgcgttgcaaaagaattgatcgcaaaaacccgtaccaaactgatatggtaagcagaagaggcgatataactataggtggcctcgaagtttatattagatatatatatacaaacctcccgtcccgttttgaacgtccctctcgtggcaatctcttccagctcattaagtaactggagcaattcctttttcaatttctgaacatattcttgagagatcaggtgtacgctggcaaaatacttgatgtcattgatcaggtaaatgaacaatttattatcccatatatattccgtgtgctggaactcctgagactctcgcacgaactcccgctgtttttccagcaatttgtccacgatttcgatgtcctcgaaatgcttctctatatcaatcttttcaaactgatatatccacttgaacattctgaatttagacaagagctcatactttaaataaaaagtctggggaatcatgttcgaggaagtacaaagttccgatgacggatcatggttcaaatccctgaaaatcttcacgtaattgtccacgatagaataataggtctccaatggatcggtctgacgtataatgttcagatcaaatatagcatttgaatacacattcgtcccggccagtttgtccagcgatactcccattttttgggagatcatggcagcctctgccaacgtgaagggcacttcccctcgtaatctacgatacacggcttctttccctaaatataacatatctattagcgtattcgccaaattagtaccatttggtaatttttcattcatagctttgattaactcgctattgtaattataagttgtcatgatttgaattttgattaatacaactatttgatttattatacgagtctttatttatttctgttgcgaaatacgaaataaatatctcacaaatttaataaaaatctcggaaaacaagtcaaaacaaaaatgtaattccttcattagaaaagatttactccgaaaatacacctttatggtcaccaatccaaacgtttcatctgatacttttgtaataacaaaaaaacaaagcaagcagggatatgatgaggaaagtaataatcgtagcaggtctgattctatttatggtgattggcaggtctcacggacaagaaaaagagttttacaacgcacctctactaggaatgaaaaccaacactctttactggttgacaaccacgattaacatcggggcagaaatcggactgggtaaaaacacaacgatagatttactaggaacttataacccctggagttttggagataacaaaaaaataaagcattggttggtacaaccggagtttcgctactggacctgcgaacgcttcaatggccatttctggggattacacgctttttacggcgagtttaacatgggcgggatcaagatgcttggattaagaaaataccgttacgaggggaccctttacggggccggtatcgcatacgggcaccaatggattatcgggaagcgatggaacctggaaaccacgatcggggtaggctatgcacgaatcgaatatgacaaatatgaataccaaacccgtggaccgtatattaaaaaggggacgaaagattatatcggccccacgaaagtagggatcaattttatatatattataaagtaagtaaggtgatgaaaagagcgtttatatataccatattcttgttgacagccggagtgttcttcacggaactcaaagctcaggaagtatatttgggagaggtgaaaattatacaaaatcgtttcgagcagcggggagacagcgtttatatcgaaatgaacatgaatttgaacggtttacctgtacataaaaaccagtctttcatcctgaccccggtggttgaaaccgaaaaagcatccgaggaactcccgtcaatcgtgattaacgggaaaagacgggaaaaagcctatcaacggtcattggctttcaatcacgggcgtcctcctttcccgatctacacgacggtcatcgttaaccaatggagccgggaaagaatcgcctataacgtggtcattccttacgaaacgtggatgaaagacgcaaaactgaatttacgggaaaacttctgtgaatgtggcggggaaaaacgtttgatttccatcaagatgctagcacaaaccatcaagttggaaaaccaagaggatacgatcgtagagatggtttcgatcaagaaagaagaagacgaaaaaaacacatactacaaagaaggttcagcatacctggattttccactaaaccaaactcatattctcccggatttcagaggaaatcagaaggaactggacaaaataaggggaattcttgattccatcacgagcaatcccgactacgagatcacgggaatttacctcaccggctacgcatcaccagagggatcttacgcacagaacgaggtgttatccagagatcgcacaagagcgctaagagattacttgcgctgcaggtattcattcccggcaaacctttatcacgtggattggcgaggagaagactggatcgggttaaagagattgattctcctgtacggaatgccaaatgaagagcaagtactatcgattatggacaactataacgtgtttgaaggaagagaaaaacgcctcatggatttgaacaacgggaaaccctacaggtacatgatgaaacatttcttcccggaattgagacgagtggattacaaaatcacatacaagataattaaataaaagctataactaaaccaagctaaaaataattcctgaatgccccccggtataacaaacgccgatccccacatacacctcttaccgggggcattcttctaaaaaattaaagggctatccttgaatgccccccggttgtaacaaacgccgatcctcacatacaccttcttaaccaagggtattcatttacaagggctgatcattgatcagcccttttttcattcattccaaactttaaacctcccctatttccagcacacaaggacaatgatccgagtgatacacctccggcaagatataagcatctttcaatcgagacttgaggctctcactcgccatacaataatcaatacgccatcccttgttatttgcccgggcgttaaaccggtaactccaccaggaatatttcccggcctcctcggggtggaagtaacggaacgtatcaataaaaccagtatcgataaatcccccaatccattcccgttcttccggtaagaagccgctattcgtggcattccgcaccggatcgtgaatatctatcggtcggtgacatatgttgtagtccccgcacaagatcagattcggccgtacctttttcaactccccaatataatattgaaaatcctccaaccatttcatcttaaatgcttgccgagcgtcgccggtagtcccggacggatggtacacactcaccacagaaagatcaccgtaatcggcacggataaaacgcccctcgtcgtcataagccggaatacccatcccgtactccacgtgatcgggttccacacgagttaagatggcaaccccgctatacccctttttcttggcagaaaagaagtatgatctgtagcctaacgcctcgaattccagtgtaggtatttgatctggctgagctttcgtttcctgtaaacacacaacatccggttgttcttcctccaaccattgtgtaaaaccttttgacaaggcagccctcaacccattcacgttataagttataattttcataccgattcgttttacaatttgcctcaaacttacaaaaaagaagtgaaccccaaaagccagaaataacttttagggttcacttcacacgtggaaatctattccaaatattcacgagacaggggatgtaattgctcatccaactcgtacaactgggggattcccgtcggtatctccagtttgacaatctcctcgtcactgatgtcatccagatacttgattaacgcccgcagactattcccgtgggccgttaccaagacggtcttccccgaaagcaatgaaggtgcgatataatcctgccaaaacgggagaactcgcgtgatcgtcaatgccaacgattcccccaaaggaagaacggccggatcaacatccctgtacttatcctcgaaaacggcacaacgagaatcatccggctccaacaatggtggtgtcacatcaaaactccttcgccaaatatgcacctgctcctccccgtatttctttgccgtctccgctttatttaatccctgtaatgccccgtaatgtcgctcgttcaaacgccagtgatgaacttcgggtacccacacccgatcggcaacttctgccaaaatatgctgcgtacgaatcgcacgtttcaacacggaagagtaagctacatcaaagaaaagatcatgtttcttaatcagctctcccgcccgacgtgcttcctgttcgccccgttcactcaagtcgacatccgtccacccggtaaacctgttttccttgttccaaacactctccccatgccgtaccaatattaacttgtacataacgcttttattatttaattgttaatagagtatacgaaaacgggaagaaaaagttggaaaagcgtgggcttgtgagtggaaatctaaaatttaaaatctaaaatcagtaaggactttatgaacttagtagtaatttctcaaaatcggcttgatacaaatgcccactcgcaccatcgacacgtaacgatcatactccagaagattctccgcatacccgttataatactgcaaaaagaaatactcgttagccttcggtaaaggcttgaaattgatctccaacgtcgtgttcatattgataaacttccgacggggattaatcacggcagaacaccataaacgctcatcagcactttggtagttaaacgcaataaatccgtatcctttatactccaacaaatcgggatttccttccttatcaacccatcccgcccacaatttcaactgggtagaaaaacgataatcaataaaccacgatcccgaaagagaaatgtaattccaactacgagaagccagcgaatcccgaccgttcgactcatgttcaaaggaaagaaccgccactcccatcaactgattacggtaaatcaacgctttactcaaactgatacccgggttaaaattattatccagaaatggactggacttcccgtaaatgtcccaaaacgaacgttgcgtgtaagtcaaatacaagaaggttctgaaaggtaaaatacttttcgtcagacgttgccggatactgatctgaaatttggcatccgcactatgtttatcaatcttccgattcgtgggcaccccggtaacaaaatagttatcccggaaaataccaaaactcggcgtgttatcaaataactccaatgcggtctgcttatcaacaatcacggaatcgccttttctctgcttgcttatctcctcccgttcctgcaatatctttttctcttcttctgtctgtgcctgcaacaacagaggcgtaaacatacaaaagaataaaagaataaaagctttccaaaccttctttttcatacgtttatgactttcttttactgaacaacgaaacaatcgccagtaaaacaatcgctcccacggtcgccgtgatcaaactcccgacaacacctgccgtccatattcccataaggccaaaaagccaacctcccaacactccaccaataatacccacaatcaggtttaccaacaatcccattcctcctccccggacaatctttcctgccaaatacccggcaagaataccgatcaaaatataccatataaacatcataacttataaaatttaggttaatctatctatttaaacttaatagaacctccaaaagttataataccgtgcataaaaaattcataaagtttataagaaccatgtatcctataaactttatgaactttatataccttataaactttattctggtaatgccaagaataatcccatcacccagtaaacaagaccggacatcacgatggttgctggaatcgtaaaaatccaggcggccacaatattcgtggcagtagcccatcgaacagaagcaacccctttcgtgattccaaccccgataatagagccggtaatcgtgtgagtcgtactcacgggaatccccagtacggctgttcccatcaatgtcaaagctccggaagtctcggcacagaatccctgcacgggtttcaatcgggccaacccgtcccccaaagtcttgatcaccttcttacccccgataatcgtacctaaagcgatcaccgagtaacaagtaacaatcaaccaagcgggaacatgaaactcccctgtattctcgtacaggtaatcactcacgaaagtattacttccagcaacactatataacaggatagcaatgatacccatcgttttctgcgcatcgtttgcaccatgtcccaaactgaatatagcggaagaaaacaactgcaatcccttaaacagcccttccactttcatcgggtgttttttatgaaacacaagcattgtgagacacatcatgaagaatcccaatatcataccgatcaaaggggacagcacaataaagatggcaattttgaatatcccggaagcaaccaaagcgtcacccccgaacgtgaaccataccggaccgatcaatcccccgatcaaagcgtgggacacactgatcggcataccgaaatgagtacacaaccaaacccagatcaccgaaccgattaaagctgccagaataagatattcattgattttcgagggatccacgattccttcgcccatcgtgtgagccacgctcaccccaaaaataaagatagcggcaaagttccagaatgctgcccagcaaacagccatcgtaggagaaaatacacgtgtcgccacgatcgtagcgatcgaattggccgcatcattcattccgttcaaaaagtcgaaaagaagagcgatcacaatagctaaaagaacaattgttaacatagcgatcaggcaaatttaataataatacctctcacaatatcacccacgtcctttgcccggtcggtagcatcttccaacacctgaccgatattcttcagtttcacgagttcgatagcgtctttctcgttcgcaaaaacatcactcataaattgttcatacaaatcatccacgtcatgttcgatctttttgatacgaacacatttctcgttaatctcttgaggtttcttctgaatatactccagcccattcataatatccttcaagatacgagcatcttccacgatacattgccccatcgcaatcaacaactggttcacactcttcggacgatacatcaacattcgttttgcagcatcatgaataaaatcaagaaacgtgtccatacggccactcaacagattaatatcctcacgatcgaagggtgtaacaaacgtcttgttcaattcctcgtacaacttagccgtgatcatatctccactatgctcgtactccttgatgtccttgtacaacgctttctgtttttcagggtcttgctcttgtaataactccaccaaaagcttggctgcagcctcgatattagcggcttgctcgatatacaaagggtaaaactttttttcctttaccacaaataattgaagaaatcggtctattttcatattttttattgattagcacacaaatgtagtatccctatgcggatatgtatgttaaaaatcaaaaaatatacaatctttttttccacatatttaaactcgggcaatagaaaggaaacacgtgaaaagtaccaatgtagtccctaaccaaaggcgttctgccaatacaggagagattccacccaaatgatactccaaggcatcatgaccgcaccccgcaagacaatctccacacaaagtacagttgattgccggacgccctttcagcacgtctactttcgacagagccccgtaccgacacacccgcgtacaagccatgcaatgtcggcaacgatcgttcagacgcaatcgccacggagacacttgtttcaaatacataaccaaagtccccgccggacaataggaagagcaatgtatggcaacatgacaccttttagacatgaacccaattatcatgattcccacgatcccggcaaaagccgcaatccccgtggaataaatcaccggaatcccgaaacctctcaacgcagaagcgacacctataaatacaaacaataccgtccaacgcattcgggtcctcattttagaagaaagagcctcccgttttccattctttcccgcagccagactatcccacgccccgaaataacagagctggctgcaccacgcacctccggacaatagaatcgttacgagaaacaaaaacggcatgaatgatacctctccccggtaaaatacccccgccgggatcagtccgggtatggggaaatggagttttcctgacatcagaaacatactatccacgaaaatccccaagaataactggctaaagaacacgatcgagaagagcagccaaatacgtctccgccacattccccgtcgtttccggtcgaacatctgcaaatatagccatccaccgaaaagagcagccagcacaatttgaatccatcctccgcccggcaacaatctctcccccaacagcaacggtggtttcacgacaacctgtaccacggaaagcaacattcccgcaacaatcgttgtgagtatcgcccccaacacggcccctttttgaatgttgattttttttctcatatccacacaaagataattgatatttattcatccaaatcaaaaatcattaactttgctcctgcaaaaataaacatcatgtcagacattcctgtcctaatatccgatttggcgattatcttattttccgccggattgataaccattctctttaaatggctaaaacaacctgtcgtgctgggctatatcgtggcaggtattatcgcaggcccctacacatttggcggccccatgatcacggatgccgagaatattcatatctgggctgacatcggggtcattttcctcctgtttgccttgggacttgattttagtttcaagaaactcatgaacatcgggggaacagccatgatcagcgcccttaccatcgtgggtgccatgatgatgctgggctacattaccgggctgtcactcggatgggggcacatgaatagccttttccttggaggaatgctctcgatgtcatccaccaccatcattttcaaggcgtttgacgacatgggtctccgcaatcagcgtttcgcaggagtcgtcttcggaattcttgtcgtggaagacctcttcgccgtagtcctcatggtattactttccacgttagccgtcagcaaacactttgaaggtatggaaatggtcgatagcatccttaaacttatcgccttcctcgttttctggtctattaccgggatattcctaattccaacctttctgaaaaaaacgaaacaatggctcaacggggaaactttattagtcgtatcactcggactctgtctcggcatggttctacttgccgtgaaagccggattctcctccgctttgggagctttcgtcatgggatccatcctggcggaaaccatcgaggccgagaacatcgaacacctcattaaacccgtgaaagatctcttcggggccatctttttcgtatcggtcgggatgatgatcgatcccaccatgctcgtcgagtactggttcccgatattactaatcaccgtggtcgttatggccggacaaatcacgtttgccgcttccggtattctcctgtccggacaaagcctccgaattgccatccaatcgggattctcgttagcacagatcggcgaattcgcctttatcatcgcaagtctcggtatgaccctgcacgtgacggataaatttctctaccccatcgtggtcaccgtctccgtcatcaccacctttttcacgccctacatgatccgcctggctgaccccgcctaccagttcgtgaccaaacacctgcccactccctggattcatttccttgacaggtatagcacggggacgaacaccatccgccataaaagcacgtggcaccggctgctgaaagcattatgccgcatagtgatcacctacaccatcctgtctgtcttcaccatagctcttttcctgcaatatctgaccccgttaatccgtaaggaacttcccagcatacaaggtagccttgtcagcgccgttgccatcctgctgctgatctctcccttcctacgggctatcatgatgaaaaagaaccattcggaagaattccaacaattatggagtgatagtaaatacaaccggggaccactcgtatccctcatcgttctacgggtagcactctgcatcgggattgtgatgttcgtcatatccagcctcgtgaacgtcgctgccggcctcctgctcgtgatcgccaccgcggtcattctgttcttcatctattccaaacggttaaaaaaatactccatacaactggaacgccgttttctgcgcaacttcacggcccgacaacaggaacaagaacgcaagtctcccatcaagcaacgttttgtcaaacatttacttgaccgggatctccacctcgccgactttgaagtatcgcaatcctctcccagcgtcggcaaaacgctaaaggagttgaatttccgccagacctgtggggtcagcgtggtaacaatcatccggggagaagaacgaataaacatccctggtggggaagaacgcctgtatcctttcgatcacatcattgtggccgccacggacaaagaaatcaacgtcttccgtgagtttgtcgaaaaccgcgtagaaaaacggaaacatgaacttgaacaacagcgtcccccggaagtcagcttggaacaattcaccattgaggctaacacgccactcgtgggacgcaccatccagaaatccggcatccgtgataaagcagcctgtctcgtcatcggcatcgaacgcaacggcacctccatcatgaaccctaccccggacaccaccttcgaggccggcgacgtagtttggatcgtcggtgaaaaagacaaattgctccatctcgctgcgggagaaacaatttaacaattgaaaatggaaaatggagaattgaaaatgaagaaaagtttatagtttagaatttaaaatgaaatcaaaaagacatctcccccgccccgtgtgactggaaatttaaaatctaaaatctaaaatttaaaattattttattctatctccaacccaaacaaagctttcaactcactcacagcaggattaatctggacaaaatgatcgaatttatccttagccgtaaaaagccgtcttttttcctcgccattttccggttccatgtaaacttgaacattcaaggtaataaaaccattattcagccttttagcaagaaacgagagcaagtaaggatgtatatccgtcaccttagataacaaaaagtcattatcaacctcaagcgtgatgacaaacccttgcacttttggggagtgagaagtcaaggcaatctttacggccgtatcctcctgcgaagttgcaacataagtttccaacgcagaagtcacatccgccaccgtaaattcactttgcgcctttacccggttatcctcaacttttgcccctccctcttcccgctggatctgcaggttctcccgagtctccgccatggccattttcaatttaaaggaatgtggcggttctaccttataagtattcgtttttccggcagggacagaaggcttttccccagcaaccggagccgttgttccaccacccgattgctggaatttcccgttaaaatcagcaatcttcaatagcccggtaaactcctctatgctaaggcttttttttttagttcattaatttggcataacttgatcaaggtaagttccacgcataaacgtttctccacacgcattttatactgcatctcgcattgctcgatcaccttcaaagcatcaaatatgaattcggaagttacagttttcgcctgttttaaataacgttccttgatggatgcactcacttccaataattgcaccgtaacctcttctttagcaaccaataaatcacggaaatgacgccccaacccggaaaccaaattacctgcatcaaaacctttctccataatctcgttaaaaagcaagaatgtttcggctactttaccatcgtggaataaatctgtcaacttaaaatagtaatcataatccaacacgttcagattctcgatcaccttatcataggtcaaatccttcccgcagaaacttacgacttgatcaaagatcgacaaagcgtcacgcatggccccgtcagctttctgcgcaatcacgttcaacgcctcttcctctgcctgtacaccttctttagctgcaattcgtttcagatgctcgatcgtgtcgggtacttttatccggttaaaatcgtaaatctgacaacgtgacaagatcgtcggtaatattttatgcttctcggttgttgccagaataaaaatagcatgggcaggcggctcttccaatgttttcaagaaagcgttgaaagccgaggcactcaacatatgcacctcatcaataatatacacgctgtatttccccacctgcggcaatatccgcacctgatcaaccaaacctcgaatatcatccacgctattgttagaggcagcatccaactcgtgaatgttcaacgaacgtccgctattaaacgccttgcacgactcacactcattacaaggttcggcattcggttgtagattcatgcaattaatcgtcttggcaaatatacgggcacaagttgttttgcccactccacggggtccacagaacaaataagcctgagccagttgcttattaagaattgcattcctcaacgtggatgtaatcgagtgctgcccgatcaccgtgtcgaaacttgcaggtctgtatttacgtgccgaaacaataaaattttccatgataatctattacaggttgttacccggcacgagtgaaaaatcgtaccggattacaaatttacaaagtaaaatgatttatcacgctacaaaaaccaataatttttcttatatcttttccaaatccgttttagcaatccacccctcgtttccatcggccaaacgaacattgtaccaatctcctagagttccgataacctgtaccttcagtccttcatggatcacgaacaattcggtcccgctattatccggagccccgcgtaccaccacgctgggagtcattacaatcccactatccctgtcggtcacccggtgatattgtttcaaagcgaagaaaatagtcatcacggacaccaacaacatgatgatccccagggtaaaccaacttttctttaaagatatagatgtcgcatggaagaacaatgctgccataatcagaaatcctataaacagaataacagacacgtacgcccattgatcagccgtgaaagcggtcacgaaagcattataccaacgtacaaggaaaagttccggtaataccttgatattgtcaaccgtggccttttgcgccatcgttaggttatattttatatcattatcacccggatgcaacaataaagcacgttcgtaattcaatatggctttcgcaatctccccttgcttgtaataacagtttcccaaattgtaatacacggttgcggattccatgttatcggataacatctcgttatacaaatcaatcgctttctgatagtcgccttcctggtacattttagttgcctcctccgccagcgtcttgacatcagtagcataggtcaccacaccggataagagcaacatcaatattatatatatccttttcattcttttcaacttttagtttttaaccttagtttttagcttctaacttttagctttcatatcgctttatccaatttcgtgataatagatatactatccttgtacacgttatccatctcttctccttgattagcacccggggcataacgagcgtactcacaatgatcgagcacctcaataaagctctgaattaacgtcgcatctgccccccgacgagtcaaatgatcactgatattgtcccgattcaattctgatgcggctatgttcaatttataacttacatacccccataaagcgttcaatgtctcttgatagaatagttcagaatttccggctttcatcgcaacagaggctgcccgcaaacgtttctgagccattttgttcgccgttttactcttcacccgtaccaaatcggcatttgccttgatccggcgacgattaagaatcatcccgaccacgaaaagtacaaaaggaatcaagaaactcaaccagtattccatcgtggcgaaatacaacacgcccttcggacggagatcgttcttgtgtgtcttgatatagcgaatatcctgtcccaacatcctaacatcttctttcttgaatgactgtaaggctgcctccccagatccttgactggattcatttcctttttcaacccgaacagcatactcctttcccttcaacatcttataagccccggcttgcgggtcaaaataggaatattgcacggctggaatcttgtaatctcccgcataacgaggaatcacgagatattcaaaagtaacagttccggacgttccgtttatatccctggtcactttcggatcgtacacgtcaaaatcatgcgggaaagtgattttcggagcctctaacaatttcatgtttccattcccgcgtaataccaccttgtacgttaacgcatcattcgccttcaaggtatctgttgacatagaggttatcatggtaagggttcccaccataccgctaaatcctaaaggctttccggcctcgggtaaaggtttcacggtaattttcacgggtttactcttgcagagtactcggacatcacgggaattcccgaaaaagtcatcaaagatacttccaccacgactccccacccgttggcgaacaagacaatacaactcgtaaggctctatcgttaacgtcccggcatgttgcgggaaaagaatcgttttttgtaacacgcccacccgatcatatattttcccgttatattcctcacgttccaaatgaatctggggaatcttcacgtcttctgtcaggaatccgtcaaaaggcgggatcttcttcccctgcacatcaaccagatttacccgggcatatacttttaacgtggcagtcaaactctctcccacgtaaagcgtgttacggctcacttccattcgcagaaacaaatcatcatccgtaatcgaagtacttccccggctctcagaaacatccccggaactttgggtattattccgaggtttcccggaacctttgatcacttttatcttcaaaggctgggacttgtactctttaccgtccacggtgatcgtggccggctcgatcgtaaactctccttcttcctgcccttccaaaatataagtgtacgtgtactcttgattttgcttcatatcgccattgataatcgtgatattagaagacgtactcaatgacggtcctgccagtaaatcaaatccttttatcgtgggaacctgtaagttctcccccttagcgttcaacacgaaggaaagacggaattgctccccgacttccacaacggaaggtgcggacgcgataaattctgtcttttgggcaaataacttagacccaccaaaaacgcataatagcaatatgataatgaatgacttcatttgtttatcttttaattctttattatccctctgaaaaacatacaaagttaccagtttttctcaatcttcatcttctttgccttttgagcttgaactttatctttctgtaccttttcctgtgttttcttttcgtccgcttccaaggcctctaacaagcgtttggcatcttctttcgagattttaggctgagcctgttgatcctgctgttgctgatccttattctgctggtctttattctgttgatccttctgatcttggttttgcttatcttgatcctgtttatctttattttgttgatccttattctgatcttgctggtctttattttgatcctggttctgatctttattctcgtccttattttggtctttgttctgatcctggttctgatctttattttgttgatctttattttgatcttgctggtccttattctggtccttattttgatcttgattttgatcttgattttgttgatcctgtttctgcttgcgggcaaactccaagttatactttgtctcttgggaattcggacggtttctcaacgactgtttataagcctcgatactctcatccaacttgttcatggccaaaagagtatttccgatgttgtgatacaactctcctaacttttccttgtctttctcattctgtgccaacgattggaattgttgtaatgcctcgtcaaactttttctgtttatagagcgcatcccccaaattaaacgcaccctcgtatgatttcacttccgtatccaaagccttacgatactccacttcagccttctcaaaatcctgtttattaaacagatcattcccgccccgaataaactttcgttcctgttgcgcagccgatggtaaacttataactacagctgctatcatcgttatcaacatcttcaccataatgtctcgtttaaaatttaccgattcgttccaacacttttcgtctcacttccaaatatattgatcttcaagaaattcttgtttttacgttccagtaccatgaaatccaacaacacgaatatcaatgccatgatcaggaaatactggtatttttcagcataatcactgaatacccgttcttccaacaatgtcttgtccatacgatcaatctcgtccaacaaggtgtttaatcccacgttcgaattacttgcccgcacgaatattccctctccggccttggcaatctctttcaatgtctcctcgtccaacttggatataatcgggttaccactcccgtctctcatgtattgtccgggatttcccttctccgggatcggtcctccttgtgccaatcccatcccgatcgtatgcacgtagatacctttttcccgggcagctttagccgcagcaatagcatcgtcctgatggttttcaccatccgtgatcacgataatcgctttcgatgcctccgtgtccggggtaaacgacttcgcagccaaatctattgccgttcctatcgccgtaccctgtatcgggacaatatcggtattgattccagataggaataatttagccgaagaataatccgtcgtgatcggcaattgcacgtaagcatcccctgcaaacacaatcaatcccactttatcatcacttaatttttccaccattcgggaaatggcctgtttcgccgcatccaaccggctgggctttatatcctgcgccatcatggaatttgacacatccaacgcaataatcaactccacgccctctttttttacctgttgcaattttgacccgaactgaggacctgcaaccccaagaatgacgaaaaacaaagctaccagaacaagtataaattttaatgtctcccgcttataagattgcaaaggcatcagtgttgacagtaattcgggactcccgaattcagcaatcgcttttttcttccgaatccttgctaccacgtaaaaaacaatcaacaatggtatgataatcagcaagtataataattcaggatgtgcaaatctaaacataaccgtcttaattttaaatttaatgattttagattttaaattccggattgcatcaattcacaatctaagatttaaaacttacaattatggaattttcctcaacaacgtgtatcgccctaacgcctccacaattaataacaaagccccgatcaaagcaaaatagaaatactgctcgttcttacgactgaaatgtttgacttctaccttgctcttctccaattgatcaatttcctgataaatttgctccagttttttgttatctgttgcccggaaatatttaccgcctgtcatgtcagcaatctgggtcaatatatcttcatctatctcaaccggcattcgctgtaattgcatcccaaaaggcgtctgcacgggataaggagcctcacctaaagttccgaccccgatcgtgtagacccgaataccaaacgtttttgccaattctgccgccgttatcggtgcaatcgctccccggttgttgactccatccgtcaaaaggatgaccaccttagatttcgccttgctatccttcaaacgatttaccgcatttgccaacccgaggccaatagctgttccatcttcaatcatcccgctatgaatatccttcatcacgttgactaacacggcttgatccgttgtcaaaggactttgcgtgaaactttccccactaaaaacaaccagtccgatacgatcctgagggcgctccaatataaacttagttgcaacctccttggctgcctccagtcgatcaggagtaaaatctcgtgccaacatactaccggaaatatccaatgccagcataatatcaataccctcgctgttataggtctgccaactcgagctggattgcggtcttgccaacgccaaaaccaaaaatagaatggccaaaacccgagctgcaaacaacaaatgacgtaaccaaatccggctaccccgtttcatttgcttgaacacccgaattgaagaaaacttcaaatcagcatgcgagcgtttctccttgaatatgtaccagataaccattggtatcagtaccaacaataaccaaaagtactcggggtttgcaaattcatatccaaacatatcttctattttagatttaataatttcagattttagattttgattaccaataaactgtaaatcacaaatcgtaaatcataaattaattttctctgtctttctcctctccggtttccttctcttccttttctgccttctctctcgcctccctctcctgttgttctttcaactcctgctccaggcgttctttttcatgctcagctcgaatcgtatcattagtttcttgtacaaaatcataagcaatatccagattccgtacgttctcatcctgcaacggctctgctttagcaaacttcacgaaatcagccgtttcaaacatatctgccaacttatcccgttgttttgcatctacctgctcacatttctccaaagccttcaaggtttcgaaagaagtctgttccatcgctgagattcccaattctccatccaaataattccggatcgtatcagttaattgcgtgtaatactctttggtctttccactctgccataacttctccttcttgatttcctccaaagccttcatggccaacacatacggagggattgccggtttttcgtgatggaaaagactcttacgggatttccgaactttgataatccagacaaccagaagaatcaccacgatccccaacaatgtccataacaagtaaggtaatatctcggcaaatgtccacggagcagccaaaggcatcacaatatcgtaattccctttctgctgatcgaccacgaaagtattcacgatcaagtgtaacggatcggtcctgagagtattattataactttcctgttgaatctcgataggcatcggcggaatcacgaacacgcccgaatcaaaagaagttatcacgtaactttcctgcacgagtacccgtccgtctttttccatgatagaatcacgaactggtccggatataatctcgatcccttgtgctatcgtgtctttcaattgagggaatgccactttcacacccggttcagcctttactttcatccggaaatgaatctgatccccgatcataatatagttcgtgtcaatctcggcactatattcccgattttgtgcattcaaagcactaacacaacctagtaggataattacgaatagaataattctatttttcattttaattctccattttcaatgttcaattaatatccagcccctcttttcttgaataacgtaatcaatgacctcacgtaatcttcatcagcgctaatagatgccatatcgacaccggcatgtttgaatatccgatccagttctttatctcgttcgataccatacgcttcgaactcgtcccggactttcttgtcggaagtatccacccaaacactttcccccgtctccgcatccgtcaagtacatcaacccgacaggaggcaatattttctctctccgatcgtacaattgcaaagccaccacgtcatgtttcttattggcaataatcaacgggtgttcaaaatcgtgatcatccatgaaatcagaaatcaggaaacaagtacaccgtttcttgatcgcatttgtcaaatattgcaacgccacagaaatattggttgccttgtgttccggataaaaatccactaattcccgaatgatatgcaaaatatgcgtccgtccttttttcggcggaataaatttctcgatccggtcagaaaagaagatcacgccaatcttatcgttgttttgaatagcagagaatgccaacacagccgcaatctcggtaatctgattctttttcagtttcgacaccgtaccgaaattacgcgaggcactcacgtcaatcaacaacatcacggtcaactcacgctcttcctcgaatattttcacgtaagggtgattataacgagccgttacgttccagtcaatacttcgaatgtcatccccgtattgataagcccgcacctcgctaaacgtcattccccgacctttaaaagccgtgtgatactcccctgcaaagatattactcgataatccccgagtctttatctcaatctgcctgacacgttttaataaatctgaagtctccaccttattaattttagatttatagattttagattttaaattcactctaaatcacattgaaaatctcagattgaaaaccatgttattttcaattttcaatttctaaggcacttcaactgtattcaagatttcactgataatatcctcgctagttagattgttcgcctctgcctcgtagctcaaaccgatacgatggcgcaaaacgtcatggcaaacagcacgaacatcttccggaattacatacccacgacgtttaatgaaagcgtacgcttgtgctgctttggccaaactgatactagcacgaggagatgccccgtaggcaatcatggaaacgaatttttccaagccatgctcttgcgggtaacgtgttgcaaacacgatgtcaacaatatatttctcgattttctcgtccaggtaaacctcttttaccacctcacgagcccgcagaatatcttccggctgtaggatcgtgttagactggggataaattttctccaaattctgacgaacgatcaatttttcttcgtcttttttcggataatcaataaccactttcaacatgaaacggtcaacctgagcctcaggaagaggataagtaccttcctgctcgatcggattctgggttgccatcaccaagaatggttcttccaacttgtaagtcatatccccgatagtcacctgacgctcctgcatcgcctccaacaaggccgattgcactttcgccggggcccggttaatctcatccgccagaataaagttagcgaaaatcggtcctttcttcaccacgaactcttcccttttctgagaataaatcatcgtaccgacaacatcagccggtaacaaatccggggtaaattggattcgactgaatttagcattaataatatgtgctagtgtatttatcgccaaggtcttcgccaaaccgggaactccctccaacaaaatatgtccattagaaagcataccgatcatcagtccttctaccaagtgcttctgtccgacgatcactttgttcatctccatactaatcatatccacaaaagaactctcttgctgtatgcgctcattcaatgctttgatatcaaccgtattcatatcattgatttttatattgatttatattactactttgtctaacgtaaatattctacttcggtttcaatttcctcaaaaagagaacttatatctccaccgttttctgtttttccaaaaatagagattattccgccaaatgttaaaatcaaagacactaaataatgttaaaacaaattttaaggttttcccaaataatttctaatctcctcttaaaatgcagaacattactaagacatggtctattttttaacatttcaccttttcttatgacacacttgttaacaaacctatctcaaaaagtaagcaaaaatcaaggttttatgacttaacaataacttataccatttttcgaggaaacagtcggaacggccttcgttccaaaaaaaataagaaataaataatgctcaacgttcgatactagcgacaaaatacaaccaattataacgggtcaacatcgaaataaatacgcacccctctaccaataggagttttcaccaattcatcacttttctgctttaagaaagccttcaattttgacagggaaaggccttgttccgcctttatcagaatttgtatccgatacatttttctaacccgagacacatccggttctgccgggccgcataccctacgttccaatcgttcccgtagcaacctagccaactcgttcgcagcatttctcaaaaccaccccatccatatgcctcaactctaccagaatcaaccgggaaaaggggggatagttaaacatttcccgttcttgggataactgagtgtaaaactctctatagttttccttcctcaccaactgatacactcgactttgcatatctgtcaactgaattaccacctttccgcgctcaccttttcgtccactgcgtccactcacttgcatcaacatatcataagcccgctcctctgcccgaaaatcgggaaaacccatcagactatcggcatccatcaccccgacaagtttcacccgttcaaaatccaaccctttcgaaaccatttgtgtgccgatcagcacatccaaatttccactttcaaaatcatcgattaaagccctgaactttgccttattactcatcacatccaagtccattcgagcaacccgagcttctggaaaatactgtttcacgtcctcttcgatccgttccgttcccggagtacgattcacgtaatgtccctgtccacactcctgacacatggccggaacggcccgcaggctcccgcaataatgacaatttagcgtgttccggtagcgataataagtcatactcacatcgcaatgtttacatttcaggatggatccacaacggtcacattgtaaataagttgaatatcctcgtctattctggaataaaatcacctgcattccattctccaacacccgtttcatttcctcgtacaaaaccggagtaaaactccctttcatcatctttttacgacgatattctttcatatccacgaacaacagttccggcatcatcacttccccgtaacgggttgtcagttgcacgaaaccatatttcccgcttagggcattctgataactttcaaaagaaggtgttgcagaacccaacaatatttttgccccactcatctttccaagcattatagcggcatcacgaccgttatagcggggtgccggttctttttgcttgtaagaactttcatgttcctcgtcaacaataaccaaccccaattgtttataaggcaagaatacggatgatcgcacacccaacaccacgggataaggattcgtaccattctgtttacgccacatctctgcccgggcactatccgccattcccgaatgataaacaccgacttgatctccgaagacccgccgcaatcgtttcacgatctgtaccgttaacgcaatttccggcaacaaatacaacacctgttttccttgccttagcgtctcttgtatcagatgaatatatatttcagtcttacccgaagaagttacgccctgcaacaagacacactccttctccttgtaatacccttgaatgtcgcccaaaactttttcttgcgcccccgacaaagcgtgtacatcctccacctcctctttagatacctctaaacggctgacttcctgcacaacaatttccaacacaccccgttcacacaatcctttcaaggccgaggctgaactaccgattttctgaataaactctgttctaggcaaacaccctacttgatgctcgtcgctataatatacccaatcacacaacatcttgtattgagccctcgcccgcttcaagccatcaagaaccttgtccaattcttcattcgaaaactttcgtttccatcttaccaaacgttcaattttaggcttaaacagatcgtctacagactccttgattccgacaatttctttttccaacaaagttcgaacagcaacatagacatcctttctccttaagagtttttcgacttcagccatacatatttcacctctttctcgaaatactcccatgatctccttctcttcccgacttaattcactttcatctaccaaccgttcttcccagccgttcaccaaactcaaactcgtgtaactctccaagcgcatcgaaacaggtaatgctgcacgcataacctctcccggtggagtcatgtaatactcgctgagccacaatagaaattttaaatgagaaccagaaagagcgaatccttcctcgataactcgttctatcggttttgtttcaaatccgacaggcggattcgtatgcaacgcatagacaacacccgtgtaacgtttattcttaacaaatgaaacgaccacgagcgcacctaccgttaccgaatgttcatattcttccggtaccgaataagtaaaaaaactttccactcccagagggataatgacatccgcgtacaacaaacgaattaattttagattttaaatggacaaaacctccgtaatatccaacaaattatgatttaacgattttgaattcttgatagccttgttaaaaggaacatgaacaatatccttattcataatcccaaccataatactagtctggtcatccaacaaagcatccactgccgccactcccaacgtactagccgtcacgcggtcaaaagcggaaggtgatcctcctctttggatatgacctaaaacagttactcgcacgtcatattcgggatgtttcttagcgatctgatcggcaatcgtgtatgcaccacctgatttatcaccttctgccacgatcacgattccacttgacttatgaggtttataatcatgctccaaataacgatccaagtcattcaaatccgtctcgatttccggaaccagtacagcctcggcccccgtggccacggccgaccgtaacgcaataaatccggcatcccgtcccataacctcaataaagaacaaccgattatgagcacttgccgtatcccggatcttatccacggcatccaccaccgtgtttaccgccgtgtcatacccgatcgtgtaatcagtcccgtaaagatcattatctatcgtaccgggaattccgacaacatgcacattatgctcttgacagaataaccgagctccggaaaaagtaccatccccaccaatcacaaccaaggcatcaattcccaattcctgcatcttctcgtaagctttcgtacgtccctccggcgtacggaattcctcgctacgagccgtcttcaagatcgttcctccgcgttgaataatattactcacgtcatgggaatacatccgcacaatatttccctctatcaatccctcatatccatcgtaaataccataagcctcacaaccattaaaaatagcggccctcacaaccgcccgaatagcggcattcattcccggagcatcgcctcctgaagttaaaactcctatttttttaatctttcccataaaaacaatgtttaattgaaaattggaaatcaaaaatgttaatctctatacccccaattctataatttaatttttagtttttagtttttaacttttagcttccaactcctcctttatctcttccatcacccacctcggtgttgaagttgccccactaatcccgacacttccggctttatcaaacatctcatcacgcaggtctttcaccccctgcacaaaataagttcggggattcacctcccgacacacctcgaaaagttgcttcccgttggaactcttttccccgctaacaaacaagatcacatcatgtcttgctgcaaaatctttcaactgcgggattcgatttgctaccttacggcagattgtatcgtttactaccacagaggccctcgcactctccttcaccaactctacgacacgcttgaaaccatccaaactcttggtcgtttgagaaaacaggattatcgaacgagaaaaatcaatagatttcaaatcttcctcttgctcaataatcagcgcttcatcattcgtctgtgccaccaacccgttcacctcggcatgtcctctttttccataaatcacgatctgccccccgttccctctcacttcctcgtacgcctttcgtattttcttctgcaaattcaataccacaggacacgaggcatcaatcacctcaattccattcttctttgccagctcataagaactcggtggttcaccatgagcccggaacaacacccgacatgcctttaaccgggcaaactcatcatgatctatcgtactcaatcccaattgttttaatcgctccatctccaaactattatgcacaatatctcctatgcaatataatcttccatgttgcaactcttcctccgccttggtaatcgcattcacaactccaaaacagaaaccggaattttcgtcaatttctactttcatatttcgaacaaatgatctttaacatctcttccacttcttcctccacggtcatatcgccattatcaatcaacacagcatccgacgttctcaccaaaggacttgtttcccggtgttcatctatataatcccgtttccggacattcgcttccacctcttcatatgtcacttgctctcctttctcaaggagttccttgtaacgtctctgggctcgtacttcaggacttgctgtcataaaaaacttcacttccgcatgaggaaatacaacactcccaatatctcgtccatccataatcacccctccttcttttgccatttcccgctgtttttcaacaagcaattcccgcacataaggcaacgaagcaatcaagctcacgttatcagaaacctctagtccccgaatagccgcctctacatactcaccattcatgtaagactcataacgttttttctcctcgttatatttaaaaccgaaaacaattgttggtagaatttctttcaatttttcatcctccacgatcccatttcgtatcaccccttctcgcatagccctcaatgtcacgatccgatacatcgctcccgtatcaatatacgtatagcccaagcgtgcggctaatatcttcgatacggtactttttcccgtagaagaatgcccgtcaacagcaacaatcaaacctttcttttccattttcaatcttatctgttcagattgcgaagatacaaaaaaagggagtaatctttgcgatcaccccctgctatatttttgttacaaatcttagttcaccaactgtaacaatttctttgccttctccatcatggtctggttagaagactcttctgccaatgaagtagctatcttagcatatcttttagcaacgtcctcgaaaccacatttattagagatcaaagcataattgtaaagggcatcaaaatctttctttgactcaacagttttgcccgcccacaattgaatcaccttcaaacgagaaacatcattcatgatctccaatgcaccatcggtaatttctttgatcattttcctgttctcagggaaataacggaacaactttctagccttgtaaaaataatcctcagacttacgctctgcccgtaattgcttgatgtaaaaataatcagccaccacgtcataatgttcgtaaccagaacttttcaagaaatccaaatacttgttatactcgatcttgttactgttatagtactgttccaaatgaccaacaaacacgttatccaacttctggaacacatcatctttcgagaagttctgcatgaatttggactgattgttaaacaaatatttaatctggggagcattcacatcatccacgtaatctcggataatcgaccagttataatctttcaagtagtccacctctttctgagtctgaaaatacctgttcacaacatcacgattcggcttcccttggtttttcaactctctcagaagttgaattgtcgttttagggtccgcaggattcgcctcgaacttcttcaccaaattatccaatgaatccatctccttctcgtgagcttgcactccaacaagattgaataataaaacacctacgattaatacaattttcaacataatacttgatacttaaatttgaacttacacccatataacacctttaggagcaaaaagggtgactcaaaagtcgattttaacttaatatttaacatgaattaattattttacttacaaaaatgaatcaaatctcccctttaaataaaaatctataaccttttcattctttttctctctactctgtgaaatatttaatatttatggtgttatatacggactaaacatatcgtatgtttcaatccaatccccctttttacatgcgaagaccttaaattttaacaatcttaatttttaaacactccacactgatacagaaatgaatgttttgttcaaatttatctataaataggatgccaatattaacctaccccttttccccgacaaattcgttaacacgtaatatcaataaaaccctcgaaaatcattgggaactaatttttctgattgctcctctttaatcgtatagggtgctacacgagaaatcgagtaaacatttcgataaagaccactaccagcataaaattcatacagtgtaatcacacacctgcgttgctccatttttatccgtggacctaaattttcttctaaaagaggcaatatttttttttcatcaaaccaaatactaaaaacctcccttctgttcctctcgatcaaaaattcaatttgttctttcttgtaaacaggaaaacgatagctatagtttgcatgccaccataaagcaaaattattattatacagtttaaaaatcaatagttgaaaatatcccatcttactatcttccggaattaaatgtcgaacagcatgattcactgagtcccatgcaaattcaagaagaatgcgttcgtcgcttacttcactcatatacatgcacattcgttttattctctctattcgtttatttttctcctcctcttcccaatcttcattttcaattttttcaacccgtacgtccattatcgaatcccactgcacccgaatcctttccctttctgtagaaatatattcttcctcttcaaaatcatcccgccgtgcatataacaacggaatccctccatcccaactataattgtagatatactctaaaatatacctaggttcaggaattaactttgagaaaatagacatataatctttcaaattaaacgtatttgtatcaatgtctcgaaactccctatctccaaccaatttttcctctaaacgaacattatcttggtaatcacaaagtttgtccaaaaatttattatacgattgggctgtaatctcagacgaaaccaaacaaatgaaaagaattaatacatataaccgtcccatacacttgattttaagataatattcaaaggtatgacttttattttatatagacaacgaaagattgtattagcgaaattgaccggaaatctaactttccaaccaatctcgccctcatttctaattctcgaaaaacttcgatacctcgaaatacaaattacgataatgagcccgtgtatcccgatctcccgaattcatcactcgttttaataatttataaactttttccaactcataatgataaacagcattcgccactattctcgtatcagaaccgtcagcaggactcatagccatacgttcatgtaaatggattgttgaacaagaacatatatcagcatgatcaccttcaatcaacgagcgtcgccccttctctcccgtaattccttttccctcggccatcattaatgacaaaatgtaattatactgcatcactcgttcataatgattaagatctcgacgttttaacgtcggttccatcactaaattataaacgtcgtccatatactcgactggcgtataagcatctttaccatcctgcttttcccatacagaaagatttgataatataccacttgacgttaaagaaccaacaaccaatcccatatactcggccactttcgtatttccaaatgagaaatttcgttcaatctcaagttgacaataccaatctggaaatgcccgtaattgttctaatataaaagccaacgcttccctttgcttttcctcgctcacgaatttataagcttttttttgatcgcccataaccggagcatccagataaacacctcctaaataaacaaggatatgttcaatatacctcctgtattggctgaatatttcccgataaagttcttctggtttatcaaaagtctctccttcatcatatgtccattctaacaaatgtctcgtaatatatttcaagttctcaatcccgtaacgattagctttcatacaatcatctcctaaagattcggataaagcagacggatcaacaatcgaaaacaaagaaaactgctgaggtccataatgatacatcggatcatgctgtttttcttgtatccatttatttagaattggacgttctgcctctggattctcgacagcaataggagcatacccccattttatggcatatttatcataaactcccaaaagtgggggaagtaaatttaccccctcgtctcccggttgcgccacataattaaaacgagcgtaatccatgatagaaggagttgttccatatttccgagtaaacgtcacggaacgtaaagaatctaccggataggcgtaagatgcccccatattatgcattaacccaagcgtatgaccaatctcatgagcagccacataccgcaatgctcgtcccatcgtttcctcgtcaaacaccttttccctcaccttaggatcaacctgggctaattgaacaaattgccagttatgcaacaactttatcacgttatgatagaacaatacatctgcctgtatgatttctcccgaacgaggatcaatccaagccggccccattgaatttgccgtttctgtcgtgatataacgataacacgagtagcgaatgtcatccggatcaaaatttggatcatccgctggataatctttagccactatcgcattcttaaaaccgatttcttcaaaggccgcttgccaatcttcaacccccaatttaatgtattttctccatcgctcaggaatagcaggatctacgtaccatacgatcggcttcttcggttccaccagttctccattacgatagcgctccacatcctcatctttaggctcgattcgccatcgttggatataatctacttttttcaactcgtccaccttttccgtataaatatgttttcgtaacggaaaatacccgattcggacatcagatatacgtggtctcataggcttatccggtaacagaatgatcgaacgagtcataatagccgtaaaaggataatcatcaacggtatacactaaccgacttttaatattcagatttaaaggaaatgatttcacctctaatatcgtcgatttatcactagagaaactaccctccaaaggattctccccaagaataaagctcaatggagttcgcggcttaaaaggacttaattccttctgatccgaacaaaagaaaaaagaaacatcaatcacaaccccggtagaatcagcattcccacacactattttaaaagcctccattatcggatctacattatttctttgcaatgattgatagatcggagacatcgggtcacattgattcaacgggctcaatcgatgtagatacacttgttcctcatcccgtgtaaattttaccaataacggatgaagaggcatctctcctcccgacacatcggtattattacttgtagcggttacccgtgaagaaagcaacatatccttattcaacaaactttgaggtatttcaaaatacaccttctgttttttcttgaatattttaaacatcccttcatgcacctccgcatcttttaaaatatcggcataactactggctcctaccgccgaatcttgtttggttgtcacgggacctaactctcctaactttttgccaaacaactgagcttcactagtctttgccaataataaaccggcaaagattagtattcctgtccttacattcattcttaattatttaaactgtttattccctatagcaacaagatcaatctgatatttcattttaaaataatttaccaaaatgtcatatttatctttcaatttactatgagtatctaacacgagttttaactcttcataaggaactgttagaattactcccatgaaatctctaaaatcaccttctttattaggtgttaccaatgaataaggatttgaaagatccctataccaaaaaccataatctcttacatccacatcagtcactccctcattttccggcaaatattctaaaaacgcttgataataccccttactcacttcataaaaactctccggcacctgaataataccattttgtaatagatactcttgccaaaacaccccgttagttgactctcgaatacttctcaactcttcttctgacaaattctctaccccttctcgtatttttcctaaagccaaataactaagccccgccaaagctgcattatcctccaatacgccccaattcatccgccctacttgctctccgatcaacaatttcaatgggaaatatttctttttaaagtcagtatcataaatattcaaaaatgttttttccaacatagaaaaccctttcatcaaaacgacacggtcttcctgttttgtcaggtaaacattttttgccagtccactcatgttccattggtaatcaatcgtatcgtaatcaaccataatgatggatccgttttcttgataaaatttataaatatattgatcaacctcatctcctccttccttcagttcataaggaatatctcccttcgtcgtatgaatggcatcctcatcataacaggctgaaaatcctatacccaaaacaaggattaacgatagtaatttatatgttctcatcctattcatcttttaattattgtacaataacaccttttctctccggacgattgatattctccagattatagtcaaactcttttacctccacaggcaaaggcaaagtgtacgctttatcattctcttcaagtacaaatttcactttttgagaactattcatgtctgtcgtgtaaatgtgctctattcttggacgatcccaacgccgaaggtcaaaccaacgatgttgctcgaaacacaactcgaaacgacgttcctgccgaaccaattgaataacatctgttttcgtagaaactgttattggaacctctacttcaaaacgatattttcgaagatgttcaatatcatctaaagctaaatccgtatgtcccaactccgcattagcctcagctcgattcagataagcctctgccgtacgaaaagcgaagccatatactcctgtatttgcagcacctttcccaacaatcaaatccccccaatcatctttcacgtaagtccgttttcggacgtcatttgcatgaaacgaattataaaacgccatggcaacagggaaacacccacgatacgcagcactaagataattcacttcataatcaccgtatgtccaaatgatctcaggattttcttttgtaaatacataatcttcttccgttaacgtccgaatatcatataaagctgaatttacagctaaaaccttatccgcataaaaaataacttgttcatagtcttttttgtatagataaaatctggaggctaacaaataagcagcacctttggatatccgaaaaaccgttttcgtataatccgtggattcaagaagttgaatagactttttcaggtctttctctatcaattcgtaagaacgtgccaatgtttcccgttgatatgtccgttccctcacactatgctcataattaaagggaatacctaaagctttatcagccgtttctttctcgtaaggttcaccgtacaagtttactagtataaaataacaatatgcacgcaaaaaataagcttcccctagtaaatcatctttatcgctctgagttccttccgcatcatccaacaaatcaataacattattagcaataagaatcttactataatacgtttcccaagcattatccgcattcaatgctccggtaaaacgatactccggattcggttgccaacaaaaataaccatacccatctccccgaatatctgactgcataataggccaggtattcgctttttcttcaacatcatccgtcataatatccaaatacgtatgaatcgaagtattatctctaatatacccttccccaaacaagaattcactataatcctttaccgttttaggaataatcaaatcctgagaactctcttctagaaaattttcacacgaagagaaaaataccacaattattatatatatcaatttcttcatggctatttcgttttaaagtgaaatatttaatccaaaagtaaaactcttcgtcgggggcacggtacctgatcccaaggtcatctgctccggatcctgtcctcttaatttcttattggcccacaaccaaagatttccagcctctaaacgtaaactaactccggacactccgatgcgtttataaagatgttccggtaaattataactcagcgaaatattcctcattcgtaaaaaatcacccgacacaacccgtaaatctgcattattatacatctcccacttattactggatattgtatatttacggtccatatcagaataagctaaactcaaatctgacaacgctggaatattcgtattctcatttaccccttttctccaacgatttacaaattcatctgacatattttgctgaggcaaaggcaacatctgccccgtagattcatataaattattcaaccgaacttttttacccacagagaaagcaaacaacgcattcagcgtaaaacctttaaaactgaaataagtcgaaaatcctccgttaaaatcagccacccgtttcccggaatacgcaaatgctttagcaaacatttcctcttttgagataccatccggctcgtctatatctttaaatttcggcaacccctcttcatccaaaccatcaaacttataggaataaaaaccatccaaaggtttagactccatgatcagattcccttgcaaataatccttataatcataagtttgcgtctgattcttactggtcactttattataattctgatacatattcaaagagagtccccatgtaaaattctttgtttttataggagttccatttaacgtaaattcccaacccttattttccacatcacctccattaattgaaacatctctcttaccggaaactgttgaaactcgcttagttataatttgatcttcaccctttttcaaataatactcagcacaaccgctaattctattattcaaaaatgcaaactccaaagctaaattataagattttgtcttttcccatttcagatatggattctgaagtttattcaaagatgatatatactctttggaaacatcatccattccgctcattgacacaatcagattcggagtctgatctgaatgaacattaccttgtaccccgtatgatcctttcaacgccaataaattcatccattggatattactaaagaacatctcgttatgaatattccaacgaacagcagcagaccatactggcaagaattttgtactcttatcctgtccgaatttattcgatccatcagtacgaatattaaaattagccgtgtaacgatcatcgtaagtatacgtgaaagttccatagaaagaaaccacattagtcagacgatccaccaccacatccggattagccatcagccattcgttatacaaaggccattcagctgcattaatagcaacaaatttcttacctctatccggcaaatatccacgttgcacagtagatattccatcatattttacagaacgagcttctgatcccacattcacgtctatttcatgcgtttcatgcaatcttttgaaataattaaatccagccctcaccgtatatgtagacgacaatgtattatcattttttaattccccaccataaggtaaacggcaccccgtctcaacgaaattacgatctgtcggcaattcatcaccataatttacaccccgcaaatctgtgatataatacgatttctcatttgcccattcagaatcctttgtattagcttttgataaagaaaacaccccggagaatgtcaatcctgatagtattttataatttacatctaccatgaaatcaatagtctggttttttatcttccggccagtattatctcgttcattaaggatattataattcaaaatggtttcgtacccctctgttttattataaaacaaataagatccatcctcattataagcaggaattgcacgagaagtattataagcatatccgtatggatcgatagaaccatgcaaatatttctttgttgctgcgtaagcccttaaagataatccgacatttaattttttactcaattctaaattcaacttcaaaagagcattacaactctccacatcagaccccttcaccacggcatttgtatttgcatatccagcagaaaaataataattcacaaactccgaacctcctgaaattgataatgaatgcttatgagacacgtccgttctgaaaagttcatcataccaatccgtatttactttttcaagatcatacacccgatccacaaattgttcctgagtaatccgtttagcatacaaatcatataaagctccttcataaccgatattagaaggttttattccaaacgtcaatcccctctcctcaatctccttagacacatcaattctctccttggaattcatccggttcagattattataactcggcctcaaactaattcctacattaccagaataatgaactgacggtttcccatatttacccttttttgtcgtgatcacaatcacaccattagctgctttcactccatatatagcagtggctgacgcatctttcaaaacatcaatacgatcaatatcttccggattaatgctagcgattgcgttgcctatcaaattcacgttatccaaactattcaactcttcagccgaaattggcaccggatcttccaaaataattccatccaccacccaaaccggttcccgatttccagaaatagaagaggctccccggatacgcactttcggggctgctccgggtgttgaagtcgggttgataatattcactccagccaattttccctgtaacatattatcaatcgaaatagcagcaccttcctgtaactctgaccctttcacgctgatcacggaactggcatttttacgtttatcaatacgttgatacccggtaataacaacctcatccatcgtattcacctcttcttccaacaccacattaatcgtatctttacccacgtatttcacctcttgtgtcttcattccgacaaaagaaaattgaaggataaaatctttctcttcttggggaatagccaacttataactgccagtcacgtctgtagccgtccctaccgataatcctttgatcatcactgttacacccggaagaggagccccgcttttatctgtcactttccccgtgatcgttctttgttttatctctccatttttttgctccatttcactcaaattacggatcacaatcgtctgatccacgattttatatcccaatctagttccttttaaacaaacatccagtatttcccgaacggtcgcatttttcagttcaaccgttaagttatctactttagctacatcctcatgactataaaggcaagtatagtcactctttgattcgatcatttttaagacttccactaaagaaacacgagccacatttacgtttaacaatgtctcttgagacttcaccacggcattcacttggagtgccgtaagcaacatgaataacatgaaaaacttcatcataagacaacattttctcaggccagaacaccagcccttgcatttgaacttttttttcatacatttgtaaattagataagttactgccctgaattcgtttcaggcttaggcaggtgatattggcgtatcacctgttttttcattcattacttcttacaaaaacatttctatccttaatatctatatctattttattaataagtttcagcatattaacaacttgatccaaatcactatatcgttttatatttcccgtgaacaaaatatctttcacggaagaactctcgtagaacacttcaatattataccaccgggcaatcgtattcatgatctcctccaaacgttgtttctcgaaaacaaaccttccatccttccaagagcaatataaaagtacatcaacagcctctaccgtagtctttccattttttttattcaatcgtaattgttctcccggtttcaaataactacagtctcccttcctttcaaaagcaactttcccatctaccaaagtcgtctctaaaaaatcttcatcttgataatctctcacgttaaaagaggtacctaacacacgaatatctccctggcgagtatgaaccacaaaagaagccaaagaatcccgcactatatcaaaataaatctcccctttcataaaaacttcccgttgccccttctcaaatgtcaccggaacccgaacttctgattctgaattcattctcaagcgactaccgtcactcaataacaaatcatattctcctccccggggaatcgtaatcgtatgataaagaacttctgtcacctcgtcttcactcttccttgatattgcctccttttgaataaaagctagaaaagtcgtatctgaaatatcaatttttgtcccgtcaggctccgtcaatatcgctttataagatcctggttgtatcttctgaacgaaagaaataggctcattttcagcaccgtgaaaaaaataataacttcctcctaacacaaataataatatcgctgctacataacgatataatgcccaggttctcttccgacgtttcgcctgtaccactcgccctgcaaattcttgataagcttctatagcactgtattctttaatgaattcaaatttacgagcgacaaaatccgttgattgataaagatcatacaatcgtaaatgttcaggtgtctcatgcttccaattttcgagctctcttcgaccagaatcatcaattttcccagtcaattccgccacaatcaaatcggcaatatgagtaatatgtttatcctgctccgtcatgttttcttgtgttttattacaagacacggagcattataaaaagtgacaaaaatctacaagaaatttattagtaaaaacaagaatggatgattcaatttttccttcaactgctcttttcccctctttttctgttgtttaacagcatcaatagatattcccaaacgcaaggcaacttccttatcgctcaatccttccaggctcagattaatcacttttctatacttctccggaagttcatctatagcttgttgcaaacgaataaaaatttcttcctctaataccgtgttataaaagaaatcttctgaaacgacctctactcgatcacgataacgatcttccactttcttattccgaatataattcaaacattgattctgtacggaacggtacaaataaaaacgtaaatccgtggtcgcagaaaacttatgaggcgtggtccataatttgaaaaaagtgtcctgcacgatatccttcgccacctcactctccacatatttacaggcaatagcaagcaatgcatgaaaaaactcttcatacaaaattttaaacgcttcttcgtctccttgaaaaattcgtttagctaataatccattgtccgaattcatcttacaccttcacattataaatacaaaggtatgattttattttatacagacaagagtcgcccgaaaattcccggacgactcttcacattaccatataacatatttgtaattttaataaaagataggctctcatttcatcacatctctaacctcctccaaagaaggacccgttatcagcacttttccttgcgggtcaatcaaataaacggtcgggacccgttctaccttgtaatcttttctgactttacttttctcaaacccgtccaaatccaccaactgcaaccaagaaacttgatcctcatttaaagctttcagccatttgtcccgatcgttatccagagaaacggataccacgttcacccccatatctttcaattcctgataatgcttattcaattctttattcttcgtccgacaaggagcacaccaagaagcccagaagtcgattagcaaatattttcccttaaaatcttccaaggagtacattttcccgttcatatccggaaggctaaaagtaggagcattaccggtaagttgacgatttttagcctgttcgtaagcttccgtgactctatttttcaaatccccttcgggcgcagaatcacccaatgcttccatcgccctcgtaaaaaaacgataatccacttcacagaaatacatcaactcattaacgatattcaaggcaatctctgttcctgcaaattcctttataccttgaataatccgatcattcctccgggcaaaatccagcttcaatcgatcggaaagtaaagctttccggttgatatcggaaatcgtgtcataaccttgacataatcgattataagctgaatccaaagtataaatctgacacatatattgcacgtatcgattttgtaaggattctttctgatcggagagaatatagtaattatcactctctttaaccactcgataatgttgcttctcgacatatagcggaagatgttgataaccaaagttgagaaaagcaactttaccgggagtaatttccccagtcagaaaaaaacaatcactcgaatccgcttgagtagaaagaaaatattgacgcccgggagccgtaggatatctcaacccaacggtaccgttccgaagagcctgtccgctatgtccttccagtttgaaaatagcttcttgcttacaggcaatcaaactcatgaaaaagatgatatataaaatattttttttcattggattcattactttaaatactccgcaatcttctcccgaattgtttctcctcgtaaccctttatctaaaataattccctcgggagaaatcaagataataaaaggtataccgttaaaattatagagctttgaagttatatttttcggatcaccgagttgcagatagtccaacttctcttcctctaaagcctttttccaagctttatccgaattatcaatagaaacacccacaacctctaatcctttatccttaaattcggcatacacttttttaatattcggaatctctttccgacaaggaccacaccaagaagcccagaaatccacaagtacatattttccccgtaaagaagaaagttttatcttttccccagtagaagtcgctagttcaaaatccggagcctcatgccctacagcacaactcttaccacgttggatcaaatcttccagtcttctcaaggcgtaacaatgtcggatggaaggatcgaattgctcccacactttttcagcttcatcaacattatcaacaccaaaatacgaagaaataataaccgcaaaaggcatactgttcgtatactgaggaagtaaatcgaatatctcatcccgcctttgtttctgtaaagcatccaacgcccgacttgcctcttccaatttcttcatgttttcaggagtctgactaacttcattatattcgtgaaaagccttgttgtaattatcgtatgtttcctccacccttgatgcagagggaagagaggccataattcgatcagactcttttttccccggagaacctttcaatgacttgacttttatttgctcgtttttgagttctgccttgatagttattttaggagaatctataaaaaaatagatcgtgggaatactcatcgagggccctaacggtccaaccgacggggcataaagcatataataacgcaaatcacctgtttccacttctgccgtgatctcgaaacgatcattttttgttttcgtccgggctatttcactttgatcgatattcatcaatatcaattcttcatttccaagacctttgattgtacctttcaaggttactttttcgactttagccatgagggtggccggaataaaacatccgaccacgaacatgaaaaatagtattttactcataattcttattttactttatacattactttaaccggctcgtcagccactccctcgtaaggtttcccgatcgctttccccgtatcactattatagatgtaaagcgaacctttcaaaccagcacgttggctattataagtagcaatataaagctgtttatgatctgcagactgattcatacactttataacctctccttcaggcaacgttataaaaggtgttgaagggatctcagactggttataagcccatttataaactaaattttgattcccgaagaataaacaagagttagggtcattcacttcaaacacagaattcctgttaaacaaagtaacattcgtcgtacactctctttcgtatacaacatccaaagccatcgtttcaaaacttgtcaaacttgatccgattttagtcaggtaatattttccattattaatcgtgtacacaattaagttcccatctacatcgaaaaatacctgaataatctcccgaccatcaaaataatcataacaggggaaataactaaaactaaaatcagccgcattaaaaccactcgcatacaccttactgtttacatcatcaataaaagcaatcactttagaagaaaactcgttcggtctatcataagtccgggtaaatttcatattctgcggaagatcggtatacggaaatatctccaaatccgccacttgtattttggcaaccccaccattaggagaagtactataaatttcactacaataccgggaatcgtatgaaattaaatcctgcggaacaaaatcattcccgtacatcgtgtaatcaaactcgtgtaccaactggaaggacttggcatccaactgatatactttccgggcttttccacacaaaatataaagcttgtcgtatatcttgtcgcaatcaacaggaccttcgcccaactcatcacctccattcgtgtaagcaaacagattctgtcggaactcgggttgtaatccttgttcaacctcctccggtgtcaatgttttcatgaaagccaaacttccttttccatcctctcttcgacctagaatcaaatacccctcttcaaattcggaattgacaaatacatgataatattttatatcacttccgtatttattacttgtcaccaagcgaagaaaataatgtcccaattccgtcgttttgtactccagattagcctctgtaccgatctctttaaaagctgttgtaatctttttatcaacagcattctccgtgtatttaccgatactccactgccacgtgatatcatcccccgtgtaggaatattgattttggatagagatattatctcccaaatacaagttaatggtatctttcacgttactcgtcacctgtatttcagcgatcttacccgaagcaagcgaagactcatcatcataacaggaactgaacaaaagcaatatgactaaaaatgatatgatattatgaattcgtttcatggcttagttattaggattagggatttgatacatcggatcgtttgtttcaaaataatattcatacattggggttagaatataacggttcaggtacccttgatacttatatatggtcaacaaattggttgccgtcccctgatccagattttcaccccattgttttcgaattgcttcatagataaccggacttttttccttagactggtggtaataatccacaaacaggattaacttttcttgattataatcacccaatttgtcagaacgccaccacacgggagcctcgatatccttgttgctaaacaaaatcacacactcccggatatccgttggcacgtaattctcgttttccaccagtcgcaaagtcaacatatactctttattcttttcgagattaagtttatgaaaatccaaaggaataaatgccattgcggaatccttgggcattatattctccaaggataacgtaaaatgttccccctcctgagccgttgtcttttcttttacaatctcgactttaaatacctggttctgtgacaaattcacgaaaccgatcaaatccacttccacgttcaaatctacatcttgatcacgagttaacccataagtgaattgcagagaatcctttgcaaaaaacaacttatccttctgactcttatcatatatctggtaatcggtatcttcacaggaaaataacgaaactataccgctaaaaagtaataaatatataaatccttttttcatagtcgtatcaattaatatctgtattcggtttcattttccggaagcgggaatacataaatgtcattagaagccggataaagtttaccgctcttaggctcgtaaatactttgattatatcttttctgcgtgaaaaaatactgtccttcacaaataagttcttttctcctctcttgaatcactttctctaatgtgagcgtggctccttgacgatctgcataccctgtcaaccctctcgattgcaatactttgtcaaaatacttcacggcctcatcctgattttccaaactcaaataatattccgtaatgatataatataattccggcaatcgaagcatatttatccctttcacccgagcatccgggcgagtagaataagttagctcgtaagtgtccaatattttaacacaacgcattccgctcgcttcaatcgcactgtaattcttaaaccatttttcatatcggtaatccgtcccctctttgtcagccaaataagtatcgtcatgatcggatttcaagaacaaacaagaggaacttcccgtcaaataaagattagccctgacattcgtgtaaaacgttgcagaaaataatccccaaatcgtctctttaggagaaagaacaccattaaccaaatcttctatttcagatttatcggccaattcaaagtacccgcaatccaatactttctgagcgtactcggcggctgtttttaaatcccccttcatccaatacacccgagccaacatcccctgtacggcatacaagttcatgtgtatctgccgatccttcaaaaactcattattctgttgatccgcattttcaaaatattccccgttttccgacataatctcctctgcggccttcaaatcgccaataattcttccataagcggcttcagcgcttaaaaatggactgactttcaaatcatatttatccacgtaaggtataccctgtgccgacgggttattcacgatattttcacaaaataaccgaagaatatcaaaatgcatgaaacctctcagagccagacattccgctttatacacattgtacagcggtaaagaactttcatcacgtccttccagattttccaaaatattattgacataggaaatgttcttatacacaccaccccaaatctgatcgatcgtcggacgaacagttgcatctttatactcaaagttacaaatctttaaagtaacatctcccggataatcatagaaaaaatattgagacagaatatcattaaaataataagtcatcgtacgaccgtaataagacgggccggccaacgtggaatacaccccgtaaatggcatcttcaaaaccttcggcattcttgaaaagttcgttattcacgacttccccttccggtcgaacatccagaaaactatcacacgaatagtgaagtgtgaaacagaaaataattagtatatatttcaattttttcatgattctcgtgatttaaaaagttggactaatcgtgaaagaaaatccccgactgaaaggataggaagttccccgctcgtattttaccgtggacaaacgagcaacatcattcatcccggctgctaaccgtaaacgtttaaaaccaatttgtttaagccagttggaacggaattcataagccacctcaatccggttgatctctaaaatatcatcatcctcaacaaaccgactactttgataattagttctcgactccgtattcgcaatatccaaataagggaaaagatcattcacattcttccacctctcgtcaaatgcccgttgatccacgttctttttgggatcgacattttcaacattcgccgcacgggtcaaattgtaaacctgccccccgaatttatatgacatactgatattcaacgaccagttccggaaagataacatcgggaaaatagaaccttccaatttgggagcctcatccccgatcaccaccttgtccgccgtattataggtcagggtatgctcaccatttttattaataaacacctctttcccggtagccggattaatccccgctgaacgcaccgcataaatcgccgtggttgattgcccttccttgtacaatactttcggctttcctacactggatgcattggcctcgtcattggctgccgccaaggcattactaatcgccagaatcttattcttattatgcgaaccgttcaatttcagactaaacctccaatccttattttgcaccaacactgctgcaatatcaaactcgtatcctttgtttcgttgctttcccaaattactcttcacggtcgtttcaccgatagaaggcggaatcgtctgatcgatcaacaaatcgtccgtcgtcttgatataataatcaaaggttatactgaaacgactatccaagaaatccgcatttaacccgaaattgtgcgtctttgtcgattgccaagtcaaatccttatttcccatctgtttgggaacggcacccattccatgcaaatagtaattatcctgattataagtataagtcgtgatcgcttgataagacgggaaagaaatatttcccgttaccccgtaagaataacgaagtttcaaagtactaagccactctttctgcaaaaacgcctcgttgtgcagattccaaccggcaccaaccgaccagaaaggagcgtaacggttattggaaccgaactgagaagaaccggaacgcctgatcgttccatcaacgaaatacttgttatgcaaaataaaattgagataagcgaagaacccagctcttgttgtcaactgttggctccccccggggtgagaattctcctgataagtactggcatattgcggagaatgcaactccggtttcaaaaatccggtaccggtaaaactttgggacttactgtcatctttgtagatatccccccctaaattaaccgttaacaagctattatcaccaattggttgattataactaatcacgaaattcccactcaggttcaaagatttactgtgactttcctgcaagtatccttttttcgtcaaatcctcttcactcaggtaaacggcagacgtgggtgaagtaaaaatctcgtgattagacgaggtggacacgatagatccattagctgtcaaatacaaacctttcatcacatcccaacggatatttacattattcgtgaacgtgttacttgatgttttgtcgtaattaccagctttcgcctcatacaaaggattattgacatcccaggttaattttttcaaaagagccccggtttcgtcataaggaccatcgtaaggatttaaagttacataatcagagaaagtaccataaggactgttttttgattttaccccggaataattactttggtaagaaaccgtcactttattagcaatatgataagacaagaatacacttataccgtaagtattacgataatctcccctcataactcccctcacgtttcttatattggcattaacccggtaagtcatatcgttccctttaccactaactccaatcgaattgccaatcgtgtaccccgtacgcaaaggcttggacatccaatccgtatccattcccttagaaatcaacaattttttccggttatactcttccaaatcatatttattctcaaaattatacaaattggctcttcgttcaaattccaacttatcggctgcattcaaataatcatacgtcgataaatccggaaaatccaccgttccatccagattataactcaaccgtaacttatcattcaagatctttttccgctcgataacaataacaccgttagccgctctctctccgtacaaagctgaagccgatgcatcttttaacacgtcaacccgttcaatttcgtttatatcaagatcatacaaatctcgaagcgtgatttcaagtccatccaaaataataatcggttgattcggattaacatccgcctcggtcgtcaaagaagaagttccccggatgacaatctccggaagattattcgggttagacccggcttgattattctccacgagtttaagaccaggtgtcaacatcgccaaggcactgatcaggttggtattagaaaccgccttgatctcctctaccgaaatcgtcttcaccgatccggtaaaactctgtttgttcttggtaaaaaaaccggtgaccaccacgtcatccaaagccgtttgcgactctttcatgatcacgttgtacacatcccgctccggagtaacttttaactcgacattttccatcccgacgaacgaaaataccaacgtagcctccttttggtccggcaaagtgatcgtgtacctaccggctgtatcggtcacgaccccgatcgtggttcccttgattaataccgtcaccccgggaagcggatttttattctcgtcggtaatcaatcctttaataacccgggcatttttttgctccccccgaatgatctctttaataataatcatattattctctatctccgccacgaatcccgttccttttaacgcctcacttaaaacatccgacaataaagcattttgcatactcaccgtgatatttttcacggccttcgttttaccataatcatacaagaatcccatgtcacactgactcttgatcgccacgatcaaatcctcgatacccgcatttttcaacttcacactaacacgttgattctgcgaatgaaccgcggcattcaaccccatattgaataccaacaaaaaaatacaaaggtgtttcattgacaaaagaattttttgacaccaccttttttgaaaaggtgtgcatagtttacctctttttttcataaatttgtgttgtaaaattaaacaatcaaataagcttgccggcttatttatgtgacaggggaatattgccgtattctcctgtttcattttcatctcactacttgtactacttttttatctattataaatttgacatcactcgttcgctcgatcaatcgcaacaagtaactgaaatcatcaaatctcctcaactcacccgagaacaaaacgtccttcacatcctcgttccggtagaaaacctcgaaatcataccatctggacaaagtggacagaatatcctccaagcgcttctgcttaaaaatatatttaccatccttccaagcaacaaactctgccacgtccacttttctctccatggcaaccccgctctctttattgtacgccacttgcattcccagctccaacacaaaactttgctttcctcgctcaaaatcgactttcactttcccggaaaccaacgttgtataatcatttgcctcgctagcatagcaactaatgccaaaacttgttcccaacacggttactttctgttctcccgcgtgaacgataaaaggccgggaagaatcccgccgcacttcaaaatacgcctccccttccaaatatacttcccgggtatctcccgaaaacactaccggatatcgtaaacgagacgcagaattaatccacacctttgtcccgtcttccaactcgatccgatattctccccccttgggaacgctcaatttattatatacaatatcttgagacaggccagatttattattcactggtaaatagcttaaaaccgtactatcaaccttaatttgatttcctgttctctcttgtaaaaaatactgttgttcccctaactgatacgtggccccatccgccatctccaacacggcattatattgtcccggaacgatcttttgtaccgccacattcaatttttgttccgtgtttgcccgatagtacacgaaccaacaacaacaaatcacaatcgccacggaagctaccgcactcatcacccacacccaacgctgtctcctttcaatcctccgctgcccctgcacacgcttttcaaacaccacccaagcctcctgaatttccccagtctcaacttcctgcacattttcctgttgatacattctccgcattcgctcgtagtattcccgatgttcccatccttctttcagccatgcctcaaaacgttccccctccacagcggaaagcttcccttcgatcttccgataaatcaagctagctgatattgttttgtctttcatggtttttatcttaataacacctctataacgaaaagccatttattttgtgtgacaaaaattttaacttttttcagataaaatgaaaaatattctttgaagcacttcatccatccctcgtaatacttgtaaacaagtctcgccgatgtctctctgatatgttcatttaatttcaagataaatagagctatttgtttttcagaaacatataaatcagaatagaggtatccatctcttctgcaagaatttctcgcaattttttataccccctagacacctgtgtacgaatcgtgtttatcgtgattcctaattcttctgcaatctcctgatactttttcccttccagcacgttcaatttaataatcaacctgcattgttccggtagactttctatagctagattcactttatcatacacttgttcatcaatctcttcatccatatcaggaacattgatcatggcttccgccatcaaaaacttatacttatcctccacttgcaaatgacgaagataatccactgctgcattacgggcaaccttataaaaccatgattttagctggaaattatcgggtagagaacgactgctttcaaataatttaaagaaaatatcttgtacaatatctttcgcaacatcctcatccccaacatgacgcacaacaaacacgacaagtggttgatagtactttttaaatacgatctcataaattcgggtatctcgcctccgtaatccccaaacatacgactgatcctcatttaaattcacatccaacttcttacgttttaattgatatacaatttaccaagcaataaacgaacgtttaatgcattttaaaattgcatggactaggcaaattgttaaatatgataattctctagtgtcgagatagatgaaagatatgaaatcattggctgacaaccaatatttctatattgagaaaactttattaaacgttc

SEQ ID NO: 10725 - DNA, 55727 bp, Unknown
  gut microbiota DNA sequence
catataccgccttgaaaacactcacctctatccaaccttcgcctttctccctaccaaagcttatatcctaccatcatcccacccatccaccttcgttatcccttcgttcttatagaagcccattttaacgacaggacaaggacgacataacgtcaagatgtaagctatactattgattataacaatacttgcacttaaacaagttgattccctaaatattcacctccactccggacacggacatttccaacccacaaacaaccgttatcatacccggtaagtcccttaaagacaagataaagacgagacacgaatgacttatgtcgtctttatcaccaccatgtatcccaagagtttcccctgtttctatctatatccccacgtaaccaagacttaaacagctttttttaatataccatgccagtacttgttatttctcaaatggtaaaagactactccttacccccggacatgaaaaaagtgatccggggcatcccggaccactcacccaccacacggtgcatccaaaaagcaacattcaaccctacatctgcttttccagttcgtcaaaataataggtcacgtagtttatattttcctgtattttcaaattgggaataattcccctccccacctgaataaactctttcaatgccgctttattctcttgggtacggaaataaaccgatacgggcatcaccatcagcatcacgtcagcatcagagaaaatgggaaataccttcttaacgagcttcaacaattctccggtattcttttccttgtaagcgttggctaagttcacgtacgccaacaatcgttttttatcatccgttttcaacgtccggatcactttcccgatctcctgtacatcagcaagtgtcgttttcgtgtcacgtccccaaacaatggatgacaaaacacccgcatagagcatccctaaacgtcggtccaccttttccagtcccacccgttgactaaattgcttcctgtgttccagtaaaaaacgatagtttgcagagttaaacggagccaaatcattattatcaaacaaaatccaacacgcagaatcaatcttctcaacatccgtcaactgcccggataaaattccggcaacctctctcaatcggcggacctcactcgcatccgacaaggcccgtaaatatttcaacaaaaattccttatcccgctcgccttgatcataacggacagctaatgttcccacggtctccgtctgtttcatggaatgttccacccgttgaataattccatcaacatccgctcctccaaccaacttatcatggaccacgccatccggccgaatcaacacgaatgtcgggtacgccccgataccaagctttttagccagttccggcccttcccccttctccatgtcatatttcacgttcacgaagcgggagttaaaaaactcccccgctttcgctcgcgtaaaaacttgttctgccatcaacttacagggaccacaccaagaagtgtaagcatccaagaaaatccaccgattttcttttttcgctttctccaaggcctccttgaaagtaagcgattcgaatcttaccccctcttgcgcccgcagtaaggtgagggacaaacaacacaacaacattaaaattattcttttcattcactgaaaattaacgcattaatcttcggaaggcaacgaagctttgtacttgttgaactccgtccggtacttattcccggctgcttgaatatcccaaccatattctttgaaatatttaatcaaaatctcgtatttcaatgcccggggtttactgttatccaagtaatccttcttaatattctcgtacgactccatcacaagtaaacgcaaccattccgaaaaatccccctcgaaagaacgagaacttcccccggtaatatatcccccgtttcgacatagttcagccacggcattcttgtatttgatcacgtagggacgacggttcacctcctcctcatcttcatcatccgcatccggattttcttctttccacgctttttcgtccttgtcatattcattccctagtttttcgtacgcttctccatcatcataagcctttcccccagccacgaattctttcaggggttcctccatacgggcaacaatcatagaccccaacttccgccacacttccgaagccaacacggaatcctggtaataatgatttaccggatctgtcaccggaatggcaccatccgtggtattaggccacatcaaaattaaacgactgcgccccaacgctttcaccggataaatccaataaagcgatccgtattgtttcacgtagaaaaattccaacgggaaaaacgatttggaatactgttccgatacattactcaacaacgcttctgaataattcaatacttccggaactttttcctcttccaaattctccgctccccgcatggcaacaagggcatcttgagctaaaattgcatttgtcaattcatcaatactgctaaaataagtacgaacccaaaccccataatcattatacatcgtttttacccgaggatcagcgttctcatccggggaaaacatatcgacaatccccaaatcttctgtcggcgacaatttactctccttgtcacagctactcaataataacacgagagcggtcagcagcaaatatataattcttgattttatcatgatattctacatttataaatttaaaaccaatcgtttatctaggattcaacggcatatcaggactattcaattgttccgattccggaatttgaagcacgtaacgcaaatccccctgctccaacgtgtatacctgtccgttctcgtatgcatgttgaagcatcggttttcccaatcttcttaaatcaagccaacgcattcccgcatcaaacgccaactccacacggcgttcttccaatacgcgttgcaaagcggtttcatccgtgaaatcggctttatccaactcaacatagtcatcactcttggtacgagtcaccaaaagacgattcaaatcggcaatggccaaatccttttctcctgtccggacatacgcttccgcacgagttacataagcctcacttaatttcaaaccgatataataacaatcactttgctgagtggcaaacatccggtacacggtcggtccctgttccacgtaatccgcactctccggatctgcattcgattcgaaaatatatcgcctgtaatccaccacattcggatcacgcttgcagagattcagcaattcttctgccggtttaaagcgagttttgtaatagtaataaggatttccattcgctttaccccccacgaaaaacaacacttcattccggtaatccgtatctatgaacccatacgtgtaactgaatgcattcgaaattttatctaacccgtccaagtaagcttgaatctcgttcatatcaaacaaagccttggcatcaataacgtatgaagccgcctcaatagcctcttcatacttgttcatgaacaaataaacccgtgctttaaaagcctgcaaagagatataatcaaaacgatacttacttttactttccttaccttgtagatctttagacgcttcctctaagtctttctcaatctgttcccacactttaccgaccggaatccgaacgttattctgggtattctgatgcacatccttggcgctcaatggcatcgggactcccggcttttccatgttctcggttgcataattctcagcataataattcaccaaataaaaataacaataggcccgcaaagcataagcctcacctcgtaccgtttcaaacaaattcttctcttcggcagaaggtgttttcccggcaaattcatccagaaccgtgtttgcgtaaaatatagattggtacaactgtttccaataaccgtcctcggccccgttatactgatgcgtagccgcccaaacaaaccatggttcataagattttgttaccgcagaagtggcatttagattcgcatacacgttatccgtagccaaatcggtattaataaagaaatccgaacggggataaccacccaacaaaacggattcgaaatcctccacgctaaccggcaacatactattcaccggttttatatccagcaaatcacaactacagaacaacgtaagtagtatcaacacgtgagtataaaatatctttttcataatcaataacattaaaattgtacagatagcgaaaacgagtaagtacgagataaaggcagatacgtgttcccgaaagaaacattggcactactcgttgacccatatttcatgatagctcccgttgcctcaggatcttgtcctttcaacttcgaatttttccacacgtgcaggttattcccttgcaacataaaacgaatgttttgaattcccaaatcccgcaattttttcagattcaagtcataactcaaggatatattctgcaaccgcacgaaatcccccttcacggttctcaggtcactattattatacatcgttccgtttgacgggtaaggatagaaaacggcatcatcaaactcgttcgcctccagtctcggaatatccgtgaaagcctcgtcacccggttttctccacctagaggcccattctttagacatattctgtgttgctgccgggtaagcaaatgcttgcccatccgtcatatttctcaaacgaatcacgtttccgaagtttccaaccaacaatactgacaatgtcacatttttatacatgaacgtgttggtaaaaccaccttgcactaaaggcattgttgtaccggaatacaccaacccttcaatattattcatccctttcagaaccttttcccctttttcgttatagaactgggcacgtccctcctcgttcaatcccgcatatttataagaccataacccgttaatcggtttacccacgattgcagccgaagcgtaatccgtccgttgggcatttgtcatggagccatacgtaggcgttgaataaacatccagaatctcgttgtaattataaccgaagttgaaattagaagtccagcggaaaccatgagtgtctatattaatcgtgtttaacgagaactcccaaccggtattcttcatggatgcccagtttacagaaactgacgggaacccggaaactaaagacacttgtttttttccaagcaaatcgacacctttcttatagtagtattccaacgttccggcaattctacgattaaagagtccgaactccaaagccagattggtagaataattcttctcccatttcaaattgggatttttcggcgcatcaataaccaaataattctctttcttaattgcatcgatagtaccgactttagctaccaaatctgaataagcatctgccacgtttccctggcttccgtaagaacctttcagcgttagataggtcaaccactgcacatctttcaagaaattttcctctttcacctggtaattaaacccgaccgaccaaagcggctggaaaaggtcattcgttttcaacccgaaacgattagaaccatccgtacgggcattgaaactcaccgtataacgattcttatacgtgtaaccggccactccaaaccaagaaacggcagccgtttcattcatactttccgtccagtaaggaacgcctaatttagccatcaaatccaattgtagaatttgttgatgcccccgatcgtgagcgtaaccataaatttgggttttctcctcttcatatttagaagttcgtatttcctgacctaccatcacgtcaaaacggtgatcttcattgataaccggcatataagatatctggttacggaatgtgatggaactattattcgttcctttgctctggcggtatccaccatcgtgccataccggctcaaaagtggtgttatcctgcatatccttttgacgggcacgcacaaaataactatcctcggttgctacgtccacgtcggtcgtatttgatttcgagaacgagaacaaactggtgaaagtcagatccggcaatatcttccactcgatgtctacggttcccttcaacccaaaattcttggattttctccaactttgttccctgttttccagaaaattaaatttcagatcattataatacatataattgaaatcaccattctcgtcataggcattatgagcccgggtcgtgtagatcgcccattcgtagggattctcacgtgaatcggaagcgaagaaactcttgttgttacgcatattcacgtccaacattcccccgatacgtaaattatgtcttaacttggtgaacacctttgccgccatcgtgtaagtatccattcccacacttttggcagttgcctgctcatccatataactaccggaaagatagaacgtcgtgttttccgatcccccggaaatactaatactgtggcgatgagttatcgaattccggaaaagatacttaaaccaatcggtattcaccgtttccaactgattcactctatcttgaaactgctcccaagtcattttatgatcatgaacgtctataaaataacgctcgaaatcggaaaccgttccatattgcccggccccgttggaagaagcctttaacaaaccttgcgctaacatctccatattcacatcaatacggtctttggaattcatcatgtaagcatctttcaatttcggacgcatacccatcgtgatacttccattgtaagttacccgagttttaccggccgtaccctttttagaagtaatcacgataacaccgttggctgctcgtgtaccataaatagcagttgctgcggcatctttcaaaacgttgatcgattcaatatcatccacgttcacgcctccgataccggatgcgatcaaatttctattgttcagaagatcatcgacattggcatccaccggatcttcaagaataattccgtcaaccacccataacggctgaacgttaccactaatcgtggaggttccccgaattcgtatttgtggaacggctcccggagcccctgaagtactcacgatcgtcattcccggtacctgtccttgtaataatttatcaatactcggctgattcaccatacgcaaacggtccatatccaccgtagtaattgaagacgtcaacttacgacgttcaatcttctggtaaccggtcacaaccacctcttccatttcactcacatcctcttccaacaccacgttgatctccttctgccccgtgtaagtcaccgtttttgttttcatcccgacaaacgagaattccaacacgatcgactgttgatccgggatagacaatttataggttccgtttatatccgtggccgtacccaaactggtacctttcaccagcacggttacccccggtagcggagcgttgtccttgtccaccactttacccgagatctccacggatttcacgtttacctgtgttgccgttttccgagaaacaacaatcacgttatcgaccaattcgtatccgaaattctgtccgaataccaaacgaacgaaatcggctaccgaggcattctccagatcaacggacactttcttattcacatcaatctcctgtttattaaaaaagaaatcctgttttaattgtttttccgcacttcggacggcctcttccaagctgacatcctttaatttcagactaatgaccgcattctgactggaagccgttgccgacacgtgggttaaccctaccagcatcaggaatatcataaccctcactccatgaaataggttaaaaaatcccctgtatgtaccgaaatggcacaaactaaacttttttttcataactttgaatttcaaattaattattgaggttctctttgggagaatcagacggggattgttgacggcaatcctcgtttcttctcctattcattttttattgtcacttttattgttcgtccatttatatcaaaaacaacattacttgtcttctccacgatagccaacacgtttttcaaatccatatcccggttaatcgctccccggaattcataccctttcgcctccggggacaaataaactacatcaatatcataccaacgtttcaactgacacatcaaatcccctaaagtagtagaagggaaaacaaaacgtccctgtcgccaagccgtgaattgctcgacttccacctccttcaattctgttttacccgatttcaagttcaaaacactttgcatccccggtcgcaaagttacctcttcatgctctttctccgaagtaaaccgcactttcccctccaccaaggtagtatatatataatcctcatccccatacgccttgatattaaacgaagttcccagcacggtcacattcgactctttcagatgaacgataaaacgacgggctacatctttccgcacatcaaaatatgcctctccttttaaatacacctctcgttccccggtaccgaattgtacaggaaaccggagttccgattcggcattcaaccaaacccgggttccatcacttaattctaattgataaaaaccgcccgtcggaactttcagcgtgttgtataaaaccaccgtcaccttttcatccaacgcttttgcctgcacgtaagtcaacccctgtaaagaatcatctttaataccgaatactccatgatcttgaatttgccgcccggaaccacctaacggaacacgttttccatctgccaaaatcaattcaacttcagctaatttaccttgctcccaattggcctgttgaggaaatttttgttcaaaaaaccaatcggaatcattccacaagtacaatgcacttaacgcaacacacaatatgacggatgccgccactgaccaacgcataaccaattgacgttttttctttcgagtaatggctcgctgtaaacgctcccgctcttcaccttttattatctcaaaatcccagttcgtgtattcctcccgaatggcaacgaattccttcaacatctccacgtgcaacggattactcatccaagcctcaactaactcgttatctaattcatttcgacgtgtaagaatctgattagcaaactctatatctttctcgttatacttcatctctttctatttttcacagctaatacacgtaccccccaaaaatgggcgacaagaaaaataaagttttttgaaaaaaattcagcataccggttacagccaccagtctacaacgaataaataactgaatatatgaattattatattctttttagacacaaaagaagcatgatcaaatcctcctgcaattcatctcgcaagaatttcaaggcccgggtaatatgtgttttcaccgtgttcacggtaatttccaactcttccgccacctccttgtacttttttccttccaccacacattttaccaacacctcccgctgtttttccggtaattgcgccaatttttcctccaaacgtaccaaccgtttctcgtaatcattcaaatcttcattcgctgcctccagcaattcgatcacggcttgttcgttaccggttaccacgcgtaaatgccgtaaataattcaacgcacaattctgggccaacgtgaacaaataagatttcaccggataagtcggatttaaacgcttccggttactccacaaagtcaaaaaagcatcatgaacaatatcttttgcaacctcctcatcccgcacgtaattaaacacgaaacccatcagtttcgtgaaatgtaattcaaataaatcctcaaaagtcttattgtctaaaagttcattcgccatatagtattcgtagttaatacgtccggaacttcattttgacaaaattaattaatttattaaactaaaaaaataacataccaagataatgatttacgaaaaaagaggaattgcagcttgtaggcagcaattcccctatagcatgatcctcatacaacttaaaaaacgtctccgtacaagatcatgcgccaactccgtccccctcacgatacgtcccgcataattcaataaaccgtcataatatctgtcaaaaagatacacaaaagccttttcttctcctttttgcagggcctccaacaatacttcataaatatcctctcaaaatttaatacaacttttcaaagaaaaagaagaatcaaatacataaacttaccaaacaacaagaaaatagctcacaaaagtgaagctattttcttatccttaatatacaaacacacaatcaaactattccgccaacacctgtttcaatttctcaacaatcccatttttatcaaatcgccccacaattctcccatcaggcccaattaataataaagccggaattgtacttattgcatatttattagccacatccccctctgaatcacaaagctgcttccatccacatccctcttcttccaatgcttttttccaagcctcctgatttttatctaaagaaatccctatcacggaaaaacgttctccttcgtattgttcatgtattgccgctatcgtcgggaaactcgcccggcaaggcatacaccaagacgcccaaaaatctaacaaaagatactttcctcgttcccgtgacaaaataaactcctctccctcaattgtagttaatgtaaaatccggtgctataccccccgcttccgttttagccaatctttccgcataatcctttatacgaacaatttcttgctcttgtagcattttaggatccaaataagatattattttttctatttgttgagaagacaccttagatgatcgataagaaacgatccgcaatgatatcggtgaatccggataagttttaataaaatcaatctctttctcttccatttccttttgtaactggtctcgatacctaatcaaacacgctttattaacctccttctccgaaagactgattttcaaacttatattataaagagaatcattataaaccgatatcccccgattataaatatgatattgatcgtttatcggcgttccggaagctatagctttataggaagattcacccttcacctcaattgttccattttccaaataaaaatcacataaagaaacaaaacgtcccttaacaacaatcaaagcccacaaaggtttctccacggaagatcccgtaaactcaaaatatccatctttaacacacacgctatcgatatcttttgacggaggtcccaccaatcgcaaatacacctgagttccgtccgcaagctccggtacattccctataattttatacccatctgcacaagatgttaagatctggcacaccaacatcaaaaatataaaacttccaaagaataactttttattcatattacataaatttacgatataaactaacgacttttccttctacatgatcatatctagtgattatttcacctttagaagaaagagtcgggttaattatcaacaaagcagactcgttctctcccgtttgtattgcaataccaaactcatctaacttcgaagaattatcaaaggcgtaatgcatcgcaagaatctctccttcataacgataaatctcattaaccgcacccgctccggccgaaagattctccaagttaatcgcttgcaacatattcccgttactgataaacaaataaggtgacgttggatgcaaggcaaagcaactcccttcacacaccacaccagccggcaactccatacaagcaagtaactttgccctaccatcccactctatcgccattctacgtaaaacatacactcccttatctaacacaatactatatatatcatcatcatacaaaattgcccccatccatatcatttccccttggacatcatataaatctaccccggatacagattcttcttcattccacaccacggaagaaactcttgaagaaagcgttgttgccgcataatacacgaaacgatgattcaattcatccaaagcgaaataataagacgtataagctccttttacaaggaacggtgcaactttataccctctctcatcaccctcaaaagggtattgataataagcatcatccggagatcccatacttcccgacaccttaccataaactaaaccatcagaaacaacactcaatgcattctcgtttcgataatattccgaagtaatattatcgatatgaagggactcgtttttaaattcatcttcataatatttacaacgcacaagtgaagtcccatctaattccggtgatttcccatttttacaaaacacggaaacacgatccatgtaagcccccgtgattccatcctgatacctgagttgttttaccatcaaaggtgtacccgacaacttttcgttattcacctcttgataaacatcttgatacaacatttgttcatcctcatacgattgaaaagcaagtgccgcctttccatcccgttgtgccgtaagcatcaaccatccggaataaaaaggagatacaacactcacctgcataactttagaataacgcacatctgttgtcatatctcttacctcaaaagtcaacggattagaggaaaccgcaacaggaatccgagtaaaagtataattaaaatcttttgtcttgcaaagcgtatccggacctatacgccaacaataagtaagattactctcatcaatattcgttattaccttaggagttattgactgtgatttctgaagaacaaaacgataagaatcatcaagtccactgattgccacttcttctaaaggaacataattataatttcctttatcctctatacaagcattcagacaacacaataaccatacactaaataaatatatctttctcatagtatcaattcttaaatttctttactaaaatcctcccaaactctctgccacgggagctttcagatcttcgtcgtaaggattatccttctcattatacaaccattgccggaactccagaaccgttgtcttcacctctgattccctataatttttatatataaaatttccagtgccgcgatcagtccattgtatatatttatctgtttcaaatggattcgttccatcgctcacattcataaattctaaccacaaccgaaacttcatcgaagaataacttcctaaataatgatcgtatggatcccacacccaataatccggtttcactaattgatcagttatcactattttcactttatctatagctcccgatttaaaattttcattatcaactaactgtaatactaattcataagaattattttgcatatcccctgtccgcaacaatttaatttttgccacaccaacattcttaccagcctcaataaactgttcattttcatctaataattgataatgagtgtttaacacagccgtactttcatcctccacaacttgccaagaaaatggcacgacattatcattatagcgccctgcataaacaacaggaatttcatatatcacatctctaacagattcttctgaaaaagtaaaggtataagacaacccgggatacccctcttctacttcatttacatcaaaagaaatataattacgctcatcaaatttctcaatttcatctgttgagcatcccgtccataacacaatagacaaaatcaaaaggaaataatatatcactttcatatcaattcaatatttataaatctaactctccatttgaaggaatattaccatattcaagttccgcttccggcaatgggaatgtataatactctactttcatcggggtcgtagctgcagacgaccatggattaaaaccaggagttgttgaagactttaaacgtttccaaaagaaaaacatctgtccttcagcataagtctccttacgcatctctttctttatatagtcaagcaattgattcgcactagcatctgctacaatccctttatcttcggataaataacctctatgtgatttcaattctcgcaataatcggacagattctcccggattatcctcgatattacattcagccgcaatcaaatacatctcacccaaacgaatcaaaggtaccgtttctttcttcatcacccccgaactactaacccgttgattatatttgctggaaataaccttattattagctctatcattagaaagcaaatacaaataccggaaatcattcgcatcctcaaaaacccctaatccatacacaccccatccatcggataatgaatatttttcggatgtaaaataagtttcataataattagccaacttaggaacattcaacccacaaatcaactccggcatgaaaatccgatccccggaagttacatccgtctcacttacccacgtgaaaggagattcttctatcaccttcattgcataatggtttgcattctccacatcacccatatacaaatacactctagccttcaaagcattcacagcccaataattaaaacgatattgtcgattcgccataaaatcatttttcccggaataagtacaaataacttctttcaaaatcggatcatcacttgcctctaatattttctcggcctcgttcaaatctttcaataccttttccataatttccttcaccggtaagtgcggatatcgaacccgttcataagtttccacatacggtatcgcaatacgatcttcgttatcttgatacgccggtgcaaacattcgtaacaaatcaaaatgcataaaagcccgcatggccaacgcctccgcttccaacacatctccctcattattaataaagagatctttacgagacttaatatctttcaaaatactattcacatttgccacattattatacatggtattccatatagcatctatcgtggggcgcactgtcttgtcttcataattgtaattactagtaggatgccatacataatttcgagctaacccttccaaaaaaccatacgtcagttgatgaccatacaaatccggatgaacaagatttatataggtaccgtaaagcatttgcttaaatccatcttccgtctcgatcaaatcttctcgatctttctctgttgtcggttgaacatccaaccaattcccacacccttcaacaacgaagactacactcaacatgaaaaaataatatatcactttcataattcaattctttaaaaatttgcacgcaaaccaacagtaaatgaacgagcgaaaggatatgaagtgccccgttcacgtttcaccgtggaccaataaaacaaatcagacatattaaatgaaaatctcaagctctccatacgcaaacaagaaatccaattctttggcatttcatattgtaacgaaaaagaagaaaattgcaaataattcaaatcttgaacaaatcgagaacttgcatacgtgaaatattgtactaatcggctagtaacattcgctttatactttacaacatcccctggtttttgccaagtttctgtcaagactcgcttatctacattctgatatttgttcgaattttcaaccttgtctaccaccgtctgattataagcctcgccaccatattgatatgcaaaagttgcattcatatacaaacctttccaaccgacatttactccaaaagtacctctaattttgggttctgtatctcccacgacaattttatcaagggcattccaggtccatgtaggctttccttctttcgtcaaaaaaagctcttccccggtcatcggatctatacctaaagaacgaaccgcataaatcgctgtggttgattgtccttcttcatattttgttagaaatttatgagaagcttgcttatattcattttccgtttttccctccgaattatcaatagatttattataggactctaacgcggaagaaatggacaaaatcttatttttattgtgacttgcattcaaaaagacagaaacattgaacgttttcttctttatcgcaaaagctcgcaatgataactcataacccgtgtttctcatacgacctagattttccgtaaagctatcaaatccgactgacgggggagttgttactggcaaaaccatatcatgagtttcttttttataaaaactcaaagaaaaatcaaatctatcaaacaaacctaatgtcaaaccaaaatcataagacttcgttgtctgccaacgtagattctcattacctagcccttgtaacacaacgccaatatttccatcatatctatcatttttcgtggcagcataaatatccttagcttgataaggagaaaaactaattgatccgagttctccgtaagtagcacgcaattttaacacattcacaaaattcagttttctgataaacgcttcattatgtacgttccatcccaaaccgatactataaaaaggtgccacattttccgctgaaccaaactgtgaagaaccatctaatcgataagaaaaatcaaacaaataacgactatcaaatgcataattagcggaagcaaaaaaactggtcaatcgagtatgcccttccgagttattcggtactccaccttcctcgtatccttctgcatacgctggttccgacgcatcatttccaccaaatccttgagcggtaaatccatacacaacacttcgagaatcagacatggaaacaccagccgaagccgtggcaaaatgctttccgatatttcgagaccaagttaccagtaaatttccttccaatgcttcctgtttcacttgggaataagtataacgcccacgcaatatttcatcttctgtcgttacatctgacataccttccccataatctttataagtaacagaattgggagataaaaacgaagtcgtttcattttgatttctcgtataacttattctaccattcaaacgaagcgaagaatgtattaaccaatcaaaagaaaaattctcattaacattagaacttgtactttcatccttatttccaacaaaagcctcatataacgggttagagggttcattattaacacttccccaaagattacttaaatttccatattggtctacaaaataataagacttatacaaatcccctttctcatcatatataggataaaaagaatttattgtcgtgtaatcactaaaagccccgtaaggtgattcttttgattttgttatcccaacagacaaataattactaaaaagtagtctatcattataattatacgacaaatttacccctattccgtaatttgtcctagaggatttcttcattacccctggattactagaataatttaaatccacgccataacgcattctattatcaccacctgacaaattcaacgagtgcttatgtccaaccacattgcgaacgggttgtgacaaccagtcggtatctacaccttcggcaacccaacgagcaatttcattatacccgggagccaatgttccatcgttattccgatacaaccccaaacgattaattaattgcaaattttcttttgcattcaaaagatcataactagacaaatcaggcaaattaaaatccaaatccatcgaataacttatctggagttcaccggacttaggttgaatcgtcttgacaacaatcacaccattggctgcacgtgatccataaatagccccggcagctgcatctttcaaaattgtaacagattcgaccctattcatatccaaatcgacaatcttctccaaggttgtctgataaccatccaaaataaataacggttggttcggatcatttaccaagccggacttatcaatactctcaaatccttgaaaagaactttctcccctgaaacgaattttgggcatcgtattcggatccgatcccatttcaatattttccgtaatagataaagagggatccaacaaagctaaactttttatcagattctgacgtccgacagccttcaaatcctcattactatacacggaagcattccctgtaaaactcttcgcattatgtgtaactaaccctgttacaacaacttcttctaaactctcggcttcctcttcaagcgttacatttaacggttttccctcgttaaaagaacgttccgcatttttcatcccgataaaagaaaaaaccaacacaggtttatcagttttcggaatcaccatctggtaatgcccttgcatatcggtcgctgttcctatcgtggtccctttcaacataactgtcaccccgggaagcacttgtccagaaacatccgacacggtaccacgaatcaccatttgttcttgctcctgttttcgctgtaccttccgaatcaaaatagatcccatctcgaaacgatattcgaaagaagttcccgtgaataacttcgacaacacggaatcaacagacacattcttcacgtccatcgtaacacttgacatcgaagccaattgatccggatcatacacgaaattcaattttgtttggtccttgatctgccggaagacaaccgacacgtctacatctttcacgtgaattgataccttctgttgttgtgcgaaggccccgaaagaaaagcccaagcacatcacaatcgtcaaccaccaacggcgacatgaaagatttggattctcccgcttaaaaaaatcgggaaaaacaaaactcgtcttgttttttttcataaatttgtaaattaacaattaaaactaacggatgcgcaaacatcccgagacaaaccgtaaacgtgttgacgcactttacggttttttattaccatcactcatcattgtccatatttcaccataaccacgtttccctttacctcaaaacgcagtgttgcaggcccctcgatcaaacgaagcacttgttctatattttcataacgactgatcaccccggtaaatcgtttttgtttcaacgactcgttttcatagaagaccttcacgtcataccaccttccaagtcgttccatgatctcctcgatcgtttcccgttcgaaaacgaattccccgtctttccacgctatatatctatacggatcagcctcttccacccgaaccattcccgttttttccgagtactcggccatctgtttaggtgctaacatcacctcttttcctgtagcattcacccgaatacccaccttaccacttaccaacacggtctgtaccacaccgtgttgatacgtgctcatattaaattctgtcccgtacactttcacctccatcccttcctccgtcaccacgataaacggatgttttgaatcaggagctacctcgaaataagcctctccagtcaaatacacttttctctcttcgcccgtaaaagcaaccggaaaacgaagttctgtcatcgaattcaaccagactttactcccgtcagacaacgccaactggtaaaatccccccaccggaatacgcatcgtattataaaccaactcttcgccttgcacctttgccatagtatagttcaacccggtcaccgaatcattttgaattcccgtctcattcacaccctctattgatacacgttgttgattcaaaaccactcgttcgcccgtactcaaaattaactcggctttcacacccggtacaatccgttctgtctccgccagcatccgcatctcatccaaatctcgccattcattgaccatacgtcccacgaacaaaccgatcaacaaaataacagaagcggccaccgaccaacgtaacgtcatccgtcgactctttctttcctgaatcgtattttccaaccgggcaaattcctccttcttatcccggttaaaatctatattcatccgcttctgataaaccgtggcaaattccttcagtaacatcacgtgttccggatccttcatccacgcctcgaccttcgcatcatccaaattctcccgatccgtcagtatcaaatttgcaaattctatatcttcatccgtgtatctcatagattgtcattttgcatctatcacacgtacccttcaaaaaagggtgacaaaaaagatatttttttacctaaaatcaaaaataaaaagataatcacctattactcaatatgaaaagtaaaatagattcgccctgtaactcatcccgtaaaaacttcaacgcccgtgacatatgtttcttgatcgtgttaatactcacatccagttcatcagctacctcctgatattttttctcctccaccacgcacttcaagaaaacctcccgttgtttatccggtaactgagccaatttctcttccacacgagcataacgctcatcgtactcggctaattcgtctgaagccgcttccaatagctgactcacctcccgttcattcacctccaccacccgcaaatgtctcaagtaatttaacgcataattctgagccaacgtaaacaaataagattttgcagaataagataaatccaagcgtttccggttattccaaaaagtcaaaaaagtatcgtgaacaatatccttagccacctcttcatccctcacgtaaccatatacgaatcccacgagattcccgtaatgcaaatcaaacaactccacaaaagccctatgctccaaaaaatctttcgacatattatcctttattcacgacatcttacctgcaaaaataaactatttgtcgtgttatacaataatcctcggaaatatttaattaaaaaagaggctattcccaaaggaataacctctacaaacatttattcaaacacaattcgttacttgtcaaacaactctatcaacttcgtatccaaccacccaccacgagcatttgtcaagataatcttaccttggggatcgatcaggaaagaactaggtaccccactaattccgtattttttcacgataaacccatcaaatccttcccctttatcacacacctgtaaccaagccatttgttcctgttccaatgcttttttccactgttctttattagcatcaattgacacgctcacgatatcaaatcctttcgcgtgataagccgaatacgcatctttcagatgaggaatatccccccgacacggaccacaccaggaagcccaaatctccaacaaagtatattgaccgggttttatcacatccgataaattcaccgtattcccttctttatccaacatatcaatatccagatactgatcccccacgtaaaccgggatgctatttaatcttttctccagagcctttcccttcagactatttcgcaacggttccgacaacaaagccaataccttgtttatctcgcctcgcccatacttggttatcgccaacgtaccggcaacatacagggctaccggagaatccgaattctcttgaataaatttcaccttgtaacgataaatctcatctttacaattctccaattcttccaaagcgtcataagcgggttgcatattcttacgtcccaactcatcggcctttgcgtaataataagccacacgatacttctcgaataatgtagaattcaaggttgacaagggttccaaccctttatcatatttcatgtacaaatcattagccggagaaccagtaattttaatacatcccggaacagtcttactcgatttagtaggcaaactatcataaggagcttccaacgtcatgaatgaattatcaacaaagattggtaacttcaccgtacttttccattctccccgctgactgtcatttttataaatcgtgatacaacgcatttcaggagattccactttcccgtcaaattcaaactcaccatttttaatcatggtactatcataaaaatgcctgtattgtgagagatcagtcaagaaaactttcaccccctctccacccccactgattttccctctaattttaaaaccatcagcatgacacaaacttatgcttgccaacaagattacaacgtaaacacatataaacttcatcataacattatttcttgttatatttttccaataggggaataatcacgtctttttcagaaggacggggtgccgaagcggaaataatcttaaaatctttatcaatcaacaagaaacgtggaattcccgtaatatcccatcccgtccgaaccaacggatcggtagaaaacaactccaataccttcccatgatcggcatctcctttcaatttattcaaccacacctccgtattgtcatccaaagaaataccaacgaattgaatattcggaaattgcttacttaactcgttaaaataaggcatctctcccaaacaaggcatacaccaagtagcccaaaaatcaacatacaaaactttacctttataatcactcaacttacctttcttcccatccatattcacaacagcaaaatcaattgcgggacgtccctccatcaactttgcccgtttctccaatcgccctaaaaatgcttgtttaaaatccgcatttttcaacttggaaccgtaggcatacaattcatcataaagtgatttcgtcatttcctcgtccatccgttcccccacaccataaatttcattcaattctttcaaccgttgtgatttcgggaaatcaaaaatagaagggtctatttcattacaactcgacaacacatctctcaccacagcaacctccaaatacttatccttagcagaaatctcctttaacaacggatttatgtattcccggatagacttgttaaaatcattcgcaaccttttctccctcttcccgtgtcttacaatctttcaaaagatcagaataccataaatatgccatataactattagccaaatctgccttaattcgcatcatttccatctccctaaactccttgctcacgttattcaacgctttcaactcttctattcgtttttgagccattccatcaataaactttttagtttgctcaaaattctctttcacgtttcgtccagcttccataaacgaaccagctttagggaataaacgtcctttcaaataattattcgcctcttcacctttccctttgaaccaactttgcggctgagaagttcccaaattcacctccatatcatcccccggagacaagtacaacgtattccgtccaatctgaaaataagtcggtttttccaacggtaccactaaatcaaaagttccgtcatcattcaccgggatacggattacatttatatccgatacatcacccacggctcccgccaattccatttttacattgttacttccgaattctttcaacgaaccgtgtaaacgagcggacttcggtcccgcacaagcacctatccctaaaagaagaagggctaccatcatcattaaattttttctcatacagtaatttttattaatttaattattaacaaggcaaaaagagaactctatgcctgctcccccgaagaggattagcaggcacatcgttatatcaaaaacttgttccctattctacaagaacaaaatatctttcacatcaccaaaatcagtataaacttgagtcgccggatagttttcactatcagtcccaacacctccggttacagaaagattcagtacgacaaaatcacattttccgttccccatatcaaaaacaatccccagactacgattaggatcaaattcataattcgtaaaatccaaataatttgtgttaatcttagcctttttggcaaatttcatcatcgttgcttttcctcccgcgtgcgtgtacaccggagtcgcttttcccccactctgtttaaaatccaaacgataaaccacgtttcctaccgtgtaaaataaaataccgctgtacgacatggtagaagcaaaacaactattttcatccattccctcaggtaacttcagcttatagtaaccggcaaaagcaggatgtccatcaacagtcgaaaccattccgtccatattaaattcatacacgaaacaactatccagaccttttatggaaacgctgttagcataaaaaccacgactattattaggatcaaactcgtaaccagcccctacccaaagaactttttgctctacaggcaaattattcacatcaacatccgtcacgttattgtcccgcttcggaacaggattaattctataactagatggattctcatttgtcggattaaaacgattaggatctcccgtagtcgatcgactttgattttgatagaaacagaaacgatgtcccacctcatcatataatatcgcaccaaatccagctttggatgcatactttattcgtatattatctcccaaatctgcagctatatttgctttatatagtttcattgctgccggactttggaaaagaactccatccgacagacaaacagctccccacgaagcctccccatcaatcaacttcacgttagaataattaaaacgactttgatccgatgagtacaccattttagtcaacggactcattaactcaaacttcttccactgacacataacgcctgactcctccggtttatccgtgataacagaaaacaaattaaacatctcccccctgccatatggataataataagtaatataattacccagacattgagccattccctctaaacgttttcccgtttccttataataagcatcctgtgtcttcaatatgctattccccatatattcaacagcacccaatgcagcgtgcccattctcattatgcagaatcatccacgccccatcatacggttttacaagttttatcttcacattaaaaggataattaatttcggtcaacttatcgtacacgttcaatctgaaataatgttcgtactccaaatccggatcatccgggacaatatggaatcgtaacgtatcaattcggctaatcgtatcgttatcatcgtgtccttcaataaactcattaatcacggaatgtacccacataaactccaaattatccctattcttttgcaaagattgacttaactcgggaatgatacacacggtcgtgtccccatccaaacgatacgaataaacatcatccaaaagaactgtaatcgtattaatttcctcgtaatcataatttcctttatcgtcataacaagccgctaaaagaaaaacaatcaaaatatagaatacctgtttcataactttcatcattaattacattatcacatcatttcggataaatcaggaaattcaatccattcacccgtattctcatctagtaaaggcggattagaagaatcggccttatactcttccagtgattcatacaacacatttcccataagagcttcaaaaaaactgtcttcattataataccagttcatgaaactcacacatcctaacatcgttatcatgtaacgcattttcgtttcactccactccccgaaaaagaacactggttcatattcccaatcctcttgcgtaattccccataattccatggaaaccttatcctctgccttcaaattaaacacctgtctttcctgcgttccagcttcaaaatccgattgcgaataatcaaacattaatttcgtcgtgtaagtaatatttctcgttgccggacgttttacaatcacccgaaacgtagcaacagccgtatctgccgggacataatattcttccggaaaaatcacctccaatgcattttccgcaggagcctcagacgtcaacaccactttccgtgggtaattcacaatctctcccattatctttacccctacaatcaccgtatcttgcaacaaagaatcaccctgaacattcattccaaaattcttttcccattccaagtacttctcatcatcactccaataatatttacttccgttcaagtatcgtcccctgaaattaatctcgccactttccccaaattccaccatatcatatttttcgcaactcgaaaaaaatgcaagcaaaatcatcaacaaccctatatttttactctttttcataacatccattttacgttataaccattattcatcgcatcaattagtcattccgaataactcctcattttccggccaagtgaacatataatttttctcaaccatcctttccaccggacaatgcaagaaagtcgtgtaaccatgccgcttgtagaaaaagaataattgtccttccccgtagaactccttgcgatactctttctcaatctcattcaaacgcgtagcttccgttaaacccgtgggatcaacacccctagcttcacgcacctcattcagataacctgcagcagtttgggcatccgctgcacactcggccagaacgtaatacatctctgccaaacgaatcaacaccaccgttccttctgtagaagaccacatgttctcctgtctatatttccgggttgttatcccgtttaaagcaaagtcaaaactaaccccttcccgtattctaaaatcattcgtaccatcatgagtgacatcaaacatttcgtacaaaaaattcattgtcgaaacataataagaaccgttagtcccgaattcctctttcacctgtaaatcaaaatcatccacgtatatcgaaaacacaatctccttcgaacgctgcaaatcagctacatcggccacgaaatcaaattgtttgctatcgatcacctgtttcgcataattagccgcctcgattttattccccgcatacaagtataccctagccaataaagctttcaccgcatacaagttcatacgtttatgacgataaaccaaaaaacggtcacttgtcatattctgctcttcatactcatctttcggaaaatcaaagtttaacggatcagtatcagtcaacaatatttcagcttgtttcaaatcggcaataatactatctaccaccacgtttgatgcctgcatctctttaggctcccggttaaataccgtccggtaagtaattcgtttggacgtagggttctgttcgtatataggtccatacatccgcaacaaatcaaaatgcagaaatgcccgtaaacctaaagcctcccccttaataatctcataataattttccgtagtaaaaacatcccgcttcttatcacaataatacagcaaattattcacgttagcgataatattatacatcttaccccatatcgttgtcgtgtaactttctgtcttcgttgaagggaacgtgtaccacaattcatcttgataagcttccacattcgaaggttcataacgttgtcctaaaatatccaaaaagccgtaactcaaatttttagcatacaaatccttggatgccattttaatatagattccggtcaaagcctccttaaaacctatctcccgactaaacacctcttcttcctccacggtcgttttgggttgtacgtccaaccaattcgaacaagaagaaaaaaacaatatactcaaacaaacaattatatatcttttcataccctatatatttttagaaagtcacacttaaagacatggaagcctgacgtgagaatggatattctattccccgttccattttcactgttgaaaaacgacaaatatcctccatatagaaaccaatcgttgcagaactaattcccacacgtttcaaccaatcatatctcgaagcttccatccggtaggataaattaatcgtggtaaacgcaaactcattgtcatccatcacgaaacgtgaactctcttttgtatcctccttataaatatccccgtcaatagctttgaacaagacttggtctcccggtttttgccaacgactatataaagctctccggtctgcattttgtcgcaaattagcattctcaaccttatcaatcaacgtttggttaaacacctgcccaccccaacggtattgtccggcaagcgtcaaactgaaacctttataagtaaaagttgttgacactgctccttgaaacttaggttcggtatctcccacgggaacttgatcggacgaagaatacaggttggtcaactgtccgtcccgggttaaaaatacctcccgtcctgtttgaggatcaatacccatggagcgaacagcccaaatcgtggtttgtgaataaccgttttcataacggggcaacggatgttttttccgtttatcttccaaggccattcccggattattcaacagatcatcctctttatccgcctctgccatctgtttctcattcatcaccttcaacgcgttcgaaattttctcgatctttgatttattacgtgcaccattcaatataatattccaatatgcttgcttggccggattactatacggcattaaacgcaaagtcacctcatatcccttattggaaatctctcccaaattttccttcatcgttgaaaaacccaccgagggtgccatagaataatccaataaagtatttttcgtatatttctcataatactcgaaccgggcactcacgatattacgtaacacagaaaaatccaacgacacattataattcctcgtctgctgccacttcaaatcgggattccctaaaccatatatctccgtccctacaacatccgaactcttatacgtcttcatcaaatttttataagtgtacatctgcaaggactgataaggagtaaaaccttgtgaccccgtgattccataagttccccgtaaaatcaattcctcgaaaattcctaaattcttgatgaatgtctctcgatctgcattccaccgtaaaccgacagaccagaaaggagcataacgattatttttaccaaattccgaagaagcatttacactcatactataatcaagagcataccgttgcttgtaggaataattcaatgtcatcataaaagccaaagcacgagcaacattctcactaccctccgtatcttcaaactcggttcccatatgcacttcactcaatttatcattcgggaaacccatcatggaaaacgtggttgttttcgtagagttttcgtttatgctataacgagcatacgctgccagcaaatgatcaccaaatgctttattatacgccccggacaaactgagacgataagaagttccttccttcttggtccaatcatatgaccctttcttagcgggatccgactcttgataaaaatcattatgctgagctgatttgaaaatctcaactgtcccatctttccgtgttaatgtaaaatccagactcaaacgcaaattatcaatcggtaaatattccaccttcaacgcttcccgaagctcaaaatcccggctctcgtccttcgattcgaattgtttattccaaagtggattcaaagtcggggtaccgtagtaagccacaacatcaccgaacccatctcccgtacgattatcgtccaacaactgccggatattcccatgactatccgtcttacgataataagggtttactctagcatattcttgaaaactcccgtaaggagaagttctagccccgtcagaataatccaccgacagagaattattgattaatattttattcgcccgataattcaaatcaattttcccagtcttcgtgttcagatccgactccttcatcactccaggtgcccatttagctcccaaataaattttataacgtaacgtccggtctcccccttcaacggtcagcccatgccgatgggaaaaagaggtttgcaccggttccgcaagccaatatgtattcacccctctcaacacttcttgtcgaagattattataataattcattaatcccaaatcatctttataagaatagtatcccgccatttcctctatccgtaacttctcttccgcattcatcaaatcataaacactcaaatccggccattgtaactcataatttccattatatgtaaaccgtaacttcccaggagcaggagcttttgtctccacgactaccaccccattggcagcctctgaaccataaataaccgtagcagcggcatctttcagtaaagtaattgattccacctgttccggatcaagatccatgatcgtagttgcatcaactccaatcaccccatccaaaacaaacaaaggttgattgggacgagtattcacatcaccccgcaaaacgaccacgtcatcactttggtaatttcccatacttgcctgaccgcgcatctggaaatcagggatagcattcggattcgatcccgtcagattactcgtattcattttaaaacccggatccagcatttgtagcgctttcagcacgttacccgatgtcatacgtttcagttcctctccggatacttgtgtagccgaacccgtgaaaccctctttcttccgggtaaaaatacccgtcactaccacttcatccattttttcagtctgctcctccatcacaaccttcaactccttctttcccgctagaatctctttatccttaatatctgccagtttcaccttttgcgtctccatccccacgaaacgaaaaaccaccacacctttcaactctttcggtaaaggcaaactgaacttaccatccacatccgtggcacatccgaccgtggttccctcgataagaacggttaccccaggtagaggagccccgcctttatccaccacttgtcctttcatcagaacggttttctcttcttctttagcaacaactgttttcggggtaattacaatcaggttatccactagtcgataaccgaatccctccccgaaaataacctgtacaagttcatctaacgttgcttgattcagattcactgaaatcttttttgtcacatccacttcttttttactgaaaaagaaatcttgtttcaactgcttttcgacttccaaaattacctgctcaacagtagcatctttcagtctcaagctaaccgatgcattctggcttcgaacctccgctgaaagatgtgtcaatcctatcagcatgaataaaatcactatcttcatcactcgaaataggttaaaaagtttcctgaatgtgctgttcatgcacacacctcgtttttttttcataactttgtaattgaattaatacttgaattctcttcggagaatgaacacgggggttgttagcggcaatccccgtttttctttcctaacgttttataatagttatcacttttccttttacttcaaaatcaacatttgtcgttgccttgatcacagacaacactttatccaaatccatatcccgcttaatcacgccccggaattcgtaatctttcagttccgaattctggtagaacacctcgaaatcataccaacgctgcaactggcgcatgatcaaatccagtgtcatcgcccggaacacgaaccgtccctccctccaagccacgtatggctccacatccacctttctcacggtcaatagtcccgactgcacattcatcacgctctgcatccccggtttcagaatctcttcctgcttgttcttcatggatgacacccgaaccgatccgttcaccagcgtcgtgtagatctgcccgtcatcaccataagtgttcacgttaaacgatgttcccagaacagtcactttcgccccgttcattcgaacgataaaaggacgcaagctatctttatgtacctcgaaataggcctctcctttcaaatcaacgatccgtttcccatcactgaattctaccggatatttcaattcggaatccgcattcaaaaacaccttggtaccatccgataataccaatgaatactctcccccgacaggcgttgtcaacttgttatactcttctgttaccattccttttccatgctcttcatacacgattccctgactgctggtagccacccgtactcgttcattcaacaaaatattcaaattctgcccttgttccaacaccacctctttcccgtcagccatcattaaaatagcctttgacgttccgggctgcatcacgctctttgccaactcttgctcctcgtgtatatcccgaaccccgcttatcgtacgtcccacgaataaacccaccaacaagataatcgaagccgcaatcgaccagcgcaaagtcatccgacgactcttccgatcataaatactcttttctaaatacaggaattcttcctcaccactctctccatagctttgtctcgacaacttttgccggattgccgcaatctcgtccaataactcaacatgatctttctctttcaaccatgctgtcacttcctcgtcattcaactcttcccgccgagcaagtaacctattggcaaattctatatcatcatccttataatccattttttgctattttttacaataacacaacaagcctcctcaaatgggtgacaaaaattaaatattttttattcgggaatagttgatccttccgttatggttgctctcccctttcactacctcataaacatagtaactacataacatgatttctcccttgtcattgataatcaagtggagtttgaacccgagaaaccactccatggagcactgtacccctaataaccaggaaaataattttaatcttatatcgagctcacgttagaattaagcattttgatgaaatttctacccaatcaaactatcatcttgtaagagatttgttataatagacttatcatgatattaacatttactattataatctaatattttactattttaataggagcggaataggggaggaatgggagcggaatgggagcggcttacaatatgataacaatatgatagtaaattgttgacaacattttacattaattcaaactgatcttttgttgaaaatccctaaacctatgaatacaaaaacactcggttaggggtattttaaggtaacgaataaatatctgacgagagttcgatataaaaacggtaagttatatcgaattcacgttaaatacttaaattcccatgtatgagcatccaacaaaaaaacaggactctcgaaaatcctgttttcaaattattccggaaaataaaggaatacctctatttatatttcttcattattttctcgataacctcagctgttaactcatgtccttgcaggaaaggaaacccttcccaacgaacaatacctttcggatcaatcaaaatcacgtgaggaattccctttaccccaagtgctttcttcattactcctttagtatccactgcactataatattcaatattcgggtctttcatctctttcactttctcggcagtttcatcagaaattccgataacgaccaactttttcccgaactttttagcgaattcgtttaattcaggaatagctttccggcacggaccacaccatgttgcccaaaagtcaatcagaatgaatttacccttcaatttcggttgttgggaaatccactcttccaccacaaattccggggctttcttattcaaaaaagagtctgcccataatttttttccgttattggactcttgtccaaagacgtttgacagggtcaacgtcattacgatacatacaattaacttcatcatttttttcactattttaaattaacatcccaattttcaaacatttatactcgttcccgtttcagcaggaataacatcaccatttcccccttcaactcgtttcgcaggaatttcaatcctcgtgaaatatgagtctttaccgaatttacactaattcccatcacgtcagccacgtccttgtatgtttggccttcaacaaaacatttcatcagtacttcccgttgtttttcaggcaattcgtcgagtttctcgttcaagcgggccatacgttgttcataatcatccaattcctcatcagcattctgcaacgcctcaacaacttcccgttcgttcatagccacgacacgcaaatgtttcaaataattcaaggcgtaattcttggataaggtgaacaggtaggacttcaaagaataagaagtatccaatttcttttgattcttcaacaccacgaggaacacatcatgcacaatgtccttggccacctcttcgtcgttcacgtagctacacacaaatccgaccaaatccccgaaatgggatttaaataaactttcaaaagaatcactatttaaatcatttcctatcatgatacgcatataactaacacgacctctatctatgcaaaagtaaactttttattgaagacgacaaacaactggcccaattataaaataaactgttctcgcatcaacatgggaaaagacactggcaggtttcaagggattcggattaattttgtaaatttgctgacaggtggataaggactttccccggacaaggcaaaaaaacaacgtcataaatcaaaaacaggctcgcatgacacacgttaatataacatcccgaaaactatttcttatcctctttttactcgtgttaccggttataatcaaagccgagcagaagggattggaggaacaattacgaaaagtcatagcgaataaaaaagcacaaattggtattgccgtgatcattaatagtaaagatacgatcacgattaataatgatgcacgttacccgatgatgagcgtgttcaagttgcatcaggctttagcagttgccgattattgcgagaagaagggcttgtctttcgatacatctatttatattcgtaaggctgatctgaaaacggacacgtacagcccgctccgggacctgtacccggatggggaaatttctctcccaataaaagaattactagaatacaccttgcatttaagcgataataatgcctgtgatattcttttcctgcaaactggaggcacggaggctacggatcactacatccgcaccaatttgggtatgagacatttcgcaatcaaagccaccgaagacgaaatgcaccaagataaaaacaaatgctacctgaattggagtactccacttgaaacggtaagaatgattgaattactgttgaacgtgccgctattcgatgacgagtaccaaaaatttatcaaaacgaccatgatgtcctgcgaaacgggaaaagatcggttagcacgccctctgcaaggaaacaaagcaatcctcggtcataaaaccgggaccggtgatcggaatgacaaaggacaaattatcgggatgaacgatgtcgggttcgtgtacttcccgatggccaaaactacacgatcgctgtttttataaaggactcagaagaaagtgaggccgcaacagcccgaattattgcagatatttcaaaaacggtatatcgacacgttacgaataacagtcacgaataaaaccatgaaacactgaaccacacgactattttcatcattcacttgctttatggttaagaactgctaacagattactccaacacgaatgagtctcgaatatccccgctaagaaggagtaacgataattcggaaacttttgcttggtagatagcggataacttccggtcgacggcatcaatgtaactacgttgaaattccctgaattcgattccggaaagcgacccgatcttatatttttctaaagccgcatccaaattggcctcagccacactagcactttcaatctcgaaatttaccatcagcaggttgttttcataggaattatacatcaacgccaaatctcccagtgtttctttttctacttcttggtaggaaagttcggtattttccaattccagtttggcattcttgatcttcgtccggttttgtaaacggctgaatataggaacatttaacgagaatccccaataaaaaccgtttgaccggttcaacgtggtactggaagagggtgtatctgtcttgttatagttgtacccggaattgaaatctagcgtcgggaataatacggcacgggcattttttaaatccagcgcggaaattttctgatcttttttagcgatcaacaaggtggtgtttcctttcaaagttttttgctccaaggtacccaatgctagttgcggccccagcaagatcgtgtcttgcacgtagttcaccatttgcaaatccgtattcatcaatttgttcaacgtgatataggcactttttaaagcctccttttgccgcacgtaggtagagctatccgtgttcaaatcaatttttgcctgttgagcttctaacccggatctattcccaatcttgtaacgtactctggcctcatcataacgttcattcgaaagttccaaagaatgacgtgctgctatcaacttatggtgttgtaccagcacgttataataagctgcactcacgttcaagatcaagttctccacggcttgctgcacggcaagttcgcccattgccaataactctttctgtttttcatgggtggtgaacatctctaacccgtcaaatatccgccagtttagagcaacccccgcagtgtagttatccgtttttacatccgacatcttattcacctctcccacgctattctcggtcttcgtgtcatttcgggtctgtgtctgtttcgcagtcccttccaatgtcggtaggaaagtcgagtaattcaaattattcttatccatccgagcctcgttccggatgattttaatggaaaaatttgattccaaggctttttccaaacattcatccagacttacacgctgcgcggaacaattgaaaatcgagaattgaaaatttaaaatgaacaataaaatgatcatttttcctatccatttcatatatcgtaaattctgttttctcatagttattctttattctacttgcaaatctttcaattcattcaatcttctatctcttctattatttttacttttttcgaggagaggtaagtgtaaatagccgggatcacgaaaagtgtcaacagggtggaacataccataccccccactacagcgatacccatggcaacacggctctcagctcccgcacccgtggccattgccatcggaagaatacctaacacggtagacaaactcgtcatcaggatcggacgtaaacgagacacggccgaatcctcgatcgcctcacgcatggacaaaccggctaacttacgctggttggcaaattccacgatcaagataccgttcttcgaaaccaacccgaccaacatgatgataccgatctggctgaaaatgttcatggtctgcccaaaataccacaaagcaaccatagccccgatcaatgccaacggaacggtaaacatgatgattaacggatcacggaaactttcgaactgcgcagcaagtaccaaataaataaataccaacgccaacatgaaagcgaacatcaaactggaagaactttccacgaagtccttggacgttccagataacgtggttttaaagtcatcgctcaatacctctcctgcaatacgatccatctcttccagtccttgagaaagggtcacgccttttgccagtccggcagaaacggttgccgacacgaaacggtcataacgatataactgtggcggcatggaactttcggacgttgtgatcagattatccagatgaatcaagtcgccattgttattccgcacgtatattcctttcaagtcactcggtttgtttcgatcttgacgctccaactgggaaagtatctggtactgttttccattcatgatgtagtaacccacccgttgctcactcatggtcaactgaagtgttctggcaatatcctgcacggaaacccccatactggcagccttgtcccgatcaatattaatggtcaactccggtttcgtgaacttcaaattcaaatcagatgccgaaaataccgaactcttgttcacctcgtccatgaaaataggtaatatcgccttcaaatcatccagatttttcgcttggattacgtattccaccggaagtcctccccgccggccaccgaaggtctgttgctgggaaaccaacgttcggcctcctgtaaactgacgcacgtctatagctaactcgtcggcaatctcctgttgagtccgtttccgcttgtctgcatcaaccaaccataattgtaaacttgcacggtttgtttgtcctcccccgatgaattgaatcactttctcttgttccggcacggtttgttccacaaaggttgaaatttcatccgcgtaacgggccatatactcgtaggtagctccttccggagcgacagaattcaaacgaatattcgaacggtcctccaaaggtgccatttccgagggaatcaataaccacaggaaataaatagctacaccggaagccccgagtataatgattgaccaataacggactttcaagaatcgctgtaaccaacgacggtacacccggttcattccctcgaaaaaaggttctgttttccggtaaaaccagttttgcgtggcattccgggtcaataatttcgtggagatcatcggtgtaaatgtcaacgccacgaaagaggaaaccactacggctccggcaatcaccacactaaattcacggaacaaacgccccgtggttccttccaagaaaacgatcgggaagaacacggccaccaacaccactgttgtcgcgataacggcaaaaaatatctcgtttgatcctttgaatcccgcctgcaacggggacattccttgctctattttcgtgaatatattctccatgaccacaatagcatcatcaaccaccaaaccgatggccagcacgacagccagcaaggtcaatatattgatggtaaacccggccacgtacataatgaaaaaggatgcaatcaatgacacggggattgccagaacaggaattaacgtcgtccgccaactccgcaagaaaaggaaaatgatcaaaacaaccaagaggaaagcctcgaaaatcgtgtcctccacctcgttgattgaactccggatgaataccgtgttgtcgaaagctatcgtggcatcaatatcttccggcaggtccttttccaaatcctgcatcacgagataagcccggtctgcaatatcaatgtagtttgctcccggctggggaatcaaagcacacatcaccatgggaaggccgttacgtttggctatactccgggtgttctcggcatccacttccgccacaccaatatctttaaaacggacaatttttgatccttctctcgaaatgaccagattgttgaaatcctcgatagacattaatcgtcccaaagtacgaattgtcaactcggtattgtctccttccactcgcccggaaggtaattcgatattctctttttcaacggcagactgcacgtccatcggggtcaaccgatgtgctgccagtaaagccgggtccatacgcaaacgcacggaataacgtttttctccccaaatatccacgctactcacgccggggatggtctgtaaccgttctttgtaatagcgttcggcatatccgctcagatcaatcaacgaacgttgaccactacgcaaagaaacagcaaaaataggttgagcatccgcatctgccttgtacacggtcgggggatctatatcctgcggtaaccgacgtaacgttccggaaactttgtcccggacgtcattagctgccgtttccaaatccacgcttaattcgaattctatcgtgatccggctttgtccatcacggctcgtactacttaacgaacggattccctgtataccattaatggccgactccaaaggctcggtaatttgtgtttcaataacatcggcgttagcccccacgaacgaggtcgacacggatattaccggggggtccacgctagggtagtcacgcacgcctaaatatagcaacccgatagaaccgacaatgaccaaaatcaagtttaacacggttgccagcaccggacgctttatacaggttgaagataaactcataccactgattaattttagatttatgattttagattttaaattctaaactctacattacctgaaactctaaattttaaactctaaactttttctctatttattcaacttgacattcacgatcattccctcacgcaattgcatcaagcctcccgttaacacggtgtcacccacctgtattccggaagttacttccacgaattgggaatccctactgtctgtttgcacgggtacgctggtagcttttctattttttactacccacaaacgtttcccgtccatctccggcacgacggcctctgtcggaacaagtatatatttcaaattctcagctgtcatcaactcccccttcacgaacattcccgctaccaaatttttagtattccggtaacgagcccgcagatttatggtatgagtagccacgtccgcctgtggatcaacagcatacacttctgcctcgatctgatgttccatcccgctaggttggaaagtaagttttctacccactaaaggcaggtcaatatatttttcaggaatagaaaattcaatttttaaataagaattatcaacaatcgtggacaccttagtactcggttgcaagtaactcccctcactcacgaaacgaaatcccattcgaccgtcaaaaggagcccggatttcagttcgagcaattttaacctttaataattcaatatcagccagattcatattgtactcggtctccaactgctggaattcttccacgctgatggattcccgctttaatagtatccgctgtctttccaatttggctgccaataattctttttggaattcggcacgagcgagttgagcctgcaaatccgaatcatccactttcactaacaaggttcctttcttcaccaacgtcccttcttcaaaagcgatcttcacaactttaccggctgtttccgaaaccagttcgacttcttcatttgcaaccaataatcccgttacgggaattccattaccggaagttgacatagatgccacgatccccgataccggtaaagccccccggttagtcgccttgggagctgttgtcggggttgacatctctttatccgaagaaaaatccaaacgagggatcacgattgctcccacgatcacgaccggaattccaatttgtaaaactctctttaaacctttgttcatattttaaatcattacataccaaaaatgcctgtttcagcaaagcttagacaagtattcacaacactgttgttatgacatcaaatatccccaaaagtttatcaacaaaccgttaatagtttgttaaaataacgagatgttttagatattttatttaaaaccaatggcgccatttaaacacgatgaaaccaaacacggaaaagagtatcgagataacaatcacgatcaaaaatccataaggattttcctccaaagagttcggaacattcatcccgtacaaactagcaatcaaggtcggtaacattaatataatcgagatggacgtcatccgtttcatcacgatattcaaattattggaaatcaccgaagcgtaggcatccattgtaccgcttaaaatatcactataaatacgggccgaatcctgagcttgccgcaattcgatctccacgtcctccaccaaatcctcgtcgaagaattgccgctgcactttcaaggtcttcattttgatcaacaagttgtcattcccacgcaaagaagtgataaagaataccaacgatttctcgattttcagcaaccgttgtaattcttcattccggatggaacgttccaattcgacctctgccatgtgcatttgggcgttgatttgtttcaagtatttcaaataccacacggaggcagaaagaaacaaacggaaaacaagatcccaattattggcaatctccaagtttttacgaatcacgtaattgatgaaatcaggtatcatttctgtctcgtaatagcacacggttacgaacatatcctccttcacgataatccccaaaggcactgtgatgaaaggaatacttgtatctaccgacttaaagggaatacgcaggatcatcagcgtccatccatcctctacttccaaacgggaacgctcgtccacgtcttcaacgtcatctataaaagcctccggaactcccatttcgtcgatcaggtagcgaagatcgtcctgagtgggtgaaacaacattaatccagcaattgggttcccatactttcttttccacgaaccctactttacccattaggaaagttctcataataatcctccttcaatttatgaatagaggcatttatcgagaacccctattcagattaatactgttgatgatagtcgtccatatcttgttctatgaattttgccacaaaagtaatctttttattgtaaaacagcaattatttctttaaatcgatgaagaccggaagatgatcactgtatcctccaatgtagtgaggcccccgataggtcggtttcggacgaacaccgaaagtccctcgctcttcttcaagtagaaaatccgcatcatagatacccattcttcgggacacctgcaaaccagcttccccgttcaacaggttcccggaaacgatgatgtgatccagcgtctgccactctcccttgtaacgataactaccatagttttttcctagcaagtaatacccggtgttgtaaaagttttcagattcaattgtcccggattccggatttcgagttttcaatgtcttttgcgcagatgtattcgcccgtccgttcaaatctcccaaaatcaaaatcatggctcggggatgaatatcctgtatagaatccaccttctgccttacgacggatgctgcttttacccgtttccattcacttttcgcctccccaccacgcatagaagggaaatgacaaacaaaaacatgaagagtatcgtttggggccaatataccctcacaataaagtatatcccgggtggcctccccgctttttaagtggacaggaaagaaagcgttatgcaatagccgaaatgaatctttccggtagagtaaagcaacatcaattccccttgtatccggggagtcggcatgtacaatactataattaccatccgccaacaccgttttgtttaccaagtctgaaacaacattccgattctccacctcgctcaagccgatgagtagcggaaactttcccgccccgagaccgtttaacactttcgagatattgagtaactttcgggtataacgttcccgattccaatgctgttttccccggggagtaaaatcgtcatctgccgtcagcgtgtcgtttcgggtgtcaaataaattttccgtattataaaacacgactcgttcccgcatccccatctgggcatatgaaacacaggagacacacaataaaaatatctcgatacaggcctttagcaacatcactagagtaaaataagatgtttctccaacaaagcgataattttactccttaataaatttgcattaatcggttttgccgtgtagccgtcaaacccgctggccatgattttctcttcatcagaggcataagcataggctgtaaccgcaatcacgggaaccgtgcaggaaatcttgcggatttcctgcacggcttgaaaaccattcaactccggcatatttatatccattaaaactaaatgtggatcgtgctctttaaacaattcaacggcctcccggccattccacgcgtgtatcaattgataatcctttttcaatatggattcaaaaagcatgtaattactcggattatcttcagcaaccagtatcttaagtttatttttctcgactacttgctgaacgattttctcttcctttatttcttgacaatgcaattttacagccacgtaaggaatcgtaaaccaaaaagttgttccttgtcctacttccgattccaccccgattttaccgcccatccgttccacgatcgtcttacagatagacaagccaagccctgttccctgtgcaaaattgttcaacttcacgaatcgttcaaacacagcgtcttttttatctgcatcaataccacatcccgtgtcagacacataaaaataaagagagtctttctccaaaagatgataaccgaaacgaatcgttccttctttcgtgaattttatcgcattattgagcagattggtaatcacttgtgttaatcgatttttctctgaacggatataacattccggaagatactcgtcaaattcaatttcgacctttgcggaagtcagtcgtaaacaagaggtttgttctaatcctcgcatcaaagcgttcaagtcaaattccgaataagcaaactccatcgaaccggactcaattttggaaagatcaagaatatcactaattaattgcaaaagtaaggtgttattattctcgataatattaatgtattcccgtttttcctcttcagcttccgtcgatgccaatatattagagaatccgacgatagcattcaacggggtacgaatttcgtgactcatgttagcaagaaaggctgattttaaccggttggattcttccgcatattctttcgcatcacgcaaagccagttccatctgttttcgagtggtaatcacaaccgaagatcccaccaaagataaaggtttcccatttttatcccactgatccacggtagcctgagcctctacccattcgtaagaataatgatgttctcttttatccaatacccggtattcctccctgatcttggctactttcccggcaattaaagccgaataagccgcttttacacgttcccgatcgtctttgtgtatctttgaaaaatactgttcttcaggaaccgctaaagaatcctcattatcagtacaatgttttagttcaatcggacgattcacatcacacaagacggtatgtctttccaaatcccaacgccaaggagttatattcgccacgtcaagagccattgacaatttatagttcacagattccaacatggatcttgttttccgcaaatcagtaacgtccacgcaaaaaatatcgaccattccttgttccgtggatgcgatatttattatttcatagtatttctgtgttgcactgtaataatattcaaaggtaaatgactttttctcgataaacatttttttgtacaacacgacgaactcgttatatcgacttccccgtaattcactaccttttttacctaccaccttctccgctttggcaaaacattcttcaaacatcgggtttacttcttccacttgataatccacgacatcccctttggcattataaatcaaccgatgtttcatgtaagccaacggcatattcgtgaaaagcgctttatatttttccaaaagaaccaactcccgatcgtgtaacactctctcttttttcaacaaccgtaaccgtatccataacagatacgtgataaatagtaatacgataatggctagtaacatataacgagcctgctcccaaaatccttccggagcaaataaataaaccgcattatccggatacaaagaagtcgggattccaaccttctgaagaatcggataagagagataataattcggttttcccgccacttgcaaaggaatatcttttgcctcctttccatccaagacctcccttaacgtccgcatgaccgtatgtgcaaaatctttgcccaagtagaaatatcctccagccatatccccgtcatagattccattatcttccaacgtgaagaccgggtgattatcgaaataactgatagctttatggttgttcgtggacaaatatttatttccggcaatttccttacgttggacccatgaaaaataaagtaacccgacctcattcacgtcatatgaataaatggaatccagcatttgatccatatttatctgcccttcaataaaataagacacatccaaatccggaaaatatgtctcgcacacgtgtctcattttctcccgtatctgcgcactcacgtagtgtctatccgatatcaagacaatcttcttcatgttcgggagtaatcgtttcatttcgtctatcgtttcacggatataaacgggacactcgataagagtaatgtttaatccgttcaatttatcctgtaaagggataatatccttcgggttgatctcttctcttttcaacatgacatccaacggactgacataatcttcccgcacacaaagaataacaggaatatctttccagattcctttaaaaacatcctcgaacacgcaccagatactatttcccaacatgacaatacacctgggagcagtatcatattttgccaaaatataatccttccttttctgcaatcccgccatactatccaccaaaagcatgtccaaggattcaacccaaatatcttcttttatcgaatgatctttccgtatactgtcgatagcgtggtttgcccacacgtcagattctgcataagaattcagaattaatatataccctcgatcatggatattcgcttttgtcaaaaaaacatgacaacaacaaataaacaataagcttatccgcaaaacatttttcgtcgacatgacaattccctttatacaaatattgtacaaaggtataaaatctatttatgaacccatcctattttgctcgaattcggcaatatattaattagtcattccctgcaactcttcccaatattccaaagcccgtcgagtatgagggatcacgatggttcctcccaccagattggcaacagagaatatttcgaacaactcttccgtggttaccccatactgatgacatttttccaaatgatatttgatacaatcatcacaacgcaacaccattgacgtcgctaatcccagcatttcttttacttttgaggataaagcaccgtccatatatgtattggtgtccagattatagatccgtttgatcactttattatcggcagccagtattttctcgttcattttagcccggtatgcccggaattgctcaaccatttcactcataattgtacattttacagctaaacaaataatttcaatatatcgttgatgttcgcaaacaacagcagaaacaacaggaaaaacattcccacgatctgggcgttctccataaatttctcattcggcttacgacgtgttatcacctcgtagagcaggaacatcacgtgacctccatccaatgccggaataggcaagagattcattacgcccagaataatagacaacatagccgttaattcccagaaagcccgccaatcccacacgctggggaatatgttcccgatagaaataaatcctcccacggacctgaaagcttccgggtttttaaataatttgaattgtttcagataggatttgatccagtcaaaccccatattaattcccgcaggaatagcaccaaagaaggaatattctttcacggcgtactcgaaatcgtttatcactttcggatacaccccgatcactttaccacttccgagagcaatagggatagaaagggtatcacttccacgtaagacttttacattcaatatactgtcccggtgtgaacgaatcaaatcaatatactcgtcatagaaagtaaacgaatgcccgtctaattccaacacccggtcttcttccagcattccggcattccgggcaggcgattcatcggcaaacccttgtatcgaaccgtcatatttataacgaggtgtcagtaaagctatccgcttaaaccctttcgaggaataggccagcatctccccgattagcgtagaaggaagatttatattcatcacttgaccatcccgcataacctgtatagtcttcgggttctccattaaaatatatcccggaatttcaaagaaattctctacttttttattgtccaaggataatatcatatctccatttcgcaacccggcatcaagcaacaaagagtcgcatacaactccatatttcgcattctcggtaggcaagtactgctctccccatgcgtaaagaatcatgatgtaaatgaaaaacgccaggataaaattaacaagtaccccaccgatcatgatgatcaatctttgccaagccggtttggaacgaaactcgtaaggttttgccggttctttcatttgctccagatccatggactcgtcaatcattcctgcaatcttcacgtatccgccaagaggcaaccatcccatcccgtattcagtttctccccttttaaaacgaaacagggaaaaccacgggttgaagaaaataaaaaacttctccactcgtactttaaatatttttgccgccacgaaatgccccaactcatgcaacataaccagaatcgaaaggctcaacaaaaactgcaatatctttactaatacatccatatacctattttagattttaaatttgagattttagattgagaaactcttcttttgctattcgtcgaccctcttggtcagaagcgatataatcttccaaagtaggttggacaatataactcactttttccatcgttcgttcaatcacatccgacatggccgtgaaagaaatttcatctttcaaaaaggctgccaccataatttcattggccgcattcaacacacagggggcattccctcctcgattcatggcctcataagccaatcccagattccggaaagtcgttacatccggtttttcaaacgtgagatcaggataaataccaaaatccaagcgcggtatctccgaatgtacccgttccgggtaagtcagtgcatactggatcggtaaacgcatatccggaacccccaactgtgcttttatatttccatcctgaaactgaaccatcgagtgaacaacggattgcgggtgtactaatacctctatttgtgaaggttttaccccaaacaaccactttgcctcgatcgcctcgaaacctttgttcatcatggatgcggagtcaatagtaacctttgcccccatgctccaattcggatgttttaatgcctgtgctgccgttacggacttcaaatattcataatcccgtcctcggaaaggtcccccagacgccgttaataatatcttctccaccggattgttatgttcgcccactaaacactggaatatagccgagtgttcggaatccacgggtaatatcgccaccttgtattcctcaaccaaccggttaattaaatctccggcaacaactaaggtttccttattagccagagcaatcgtcttacctgccttaatcgcattaatcgtgggtaacaacccgctatacccaaccatggctgtaacaaccacatcaatcgtggatgtttgcacgacttgagcaatggcttcactcccggcatatacctttatatcctcgtccttcaacaactcagttaactcggaatattttgcttcatttccgatcacaaccatgttaggcttaaactttctggcttgttgtgccagtaattccacctgattatttgccgtgagaacttctacattaaaccgctccggattagcgtcaatcacctgcaatgtctgcgttccgattgacccggtagatcccaatattgctatatttttcatttcaaaacaatctccaaaaacactatttgcgaatcatttaaacttaatgaatgtttccggattcaatgcttttcccgcttgccacaactcaaaatgcaaatgcggtccggttgtctcttcgcccgtgttccctaccactgcaatcgcctctcccgcacggacaaaatctccctgctttttcaacaataccgaattatgcttatatactgaaaccagattcccattatgctgtacttgaatcacgtaacccgtcttaattgtccaatccgtgaaaatgaccacgccatccagcacggacaaaacatttgaattttgcttggccaccaaatccaccccgtaatgacgagtcgtttcatcaaaatgattggttaccaccccatccaatggtgagaagaaatgataaaaatcatcatcggaagaactgacatgcccaagggttaaattgtatttttcttctttttccacgatttcccgaaaaccggcctcttcttccgacatacctaacattgaagtatcataggttaccttcacattatgttgcatcgacacgaaactcgtcgtgtccaagttttcgtctctcaaaatagtttgtatggaatgaagaaaacgatccttcttctgcacttcattcaatagagaatcaacccgtaaagcgttttgtgtaatctgacgtctcaactgttgactcgggtaacccgggatgaactcccgcaaattcgtgaaagcaatcagcatgatcgtcaatataatcaagacgacggctaatgtacttaatgccgtgagaacgtgtaacggagagagccgaaggtgcattacctcctcgtaagtagactcgttaaatatcgtcaacttatagcgattcctcagcttattccaatattttcgttttttactgctcatccaattatttttagccttcaaaaatagtataaaaatccaactttcccagccagaggattcataaactttatcgtggcaattgaaaaatgagtcagctcttgaatcaattcgtggttttgataatctccgggtattgatagattcgcaaattaaaataaggaatcacggctaacaggtgatcgaatatgtcggcctgcaccttttcatacgccacccactcttgttttcgggagaaacaatacacctctaagggaatgcctgttgctgtcggttgtaattgcctaaccatgtatgtcatacccatatttagatccgggtttgcctccagcttacgtaccgcatattgccggaatatgcctaaattagtcaaccttctctcgtccaacacgtcagattttcctttattctgctcgtttaacttcggcaacatatcttcaatataccctttcaagacattcgatttccgtaaagtatcgatttcctcatccgaaaggaaatgaacagagagcatatctatattaatataacgcatgatccgacgaccggcagcctcctccattccccgccagttcgtgaaagaagcggacactaactgataggtgggaatcgtcgtgatcgtcatatcccagttttgtactttcactgtatacaagttgatctccaacaccgtcccgttggcattattgctcggcatcacgatccagtccccgatacgcaccatctgattggccagtaattgaactccggccacaaaacctaatatcgcatctttgaatatcaacattaaaaccgcagcaaacgcccccaacccgaccagtaaattacgaggggactccccgataaactcgctgacaattgttatgataatagctgaaatcacgaaaattttaatcacctgcacgaaaacttttatcggacgatctttcgctatcgggtacgagtcgtagattcggtttatcgcatccagcacggcaacaatcacgaaaccggcaaccacgagtatccaagccacgataaaccgatgaaaaagttctatatgttgccatttcccgtacacgattttaaaagcaaaatctataaatataggcggtatcagattaaatattttctgaaaaacacgctcctcgaaaaaaatatcatcccatttggttttcgttcgacgcaccattcccccgatcacccgggttatccctttacgcagaaaaaatgtaaataaaaaagcaatcagacaaattaccgcaatctgcaagaggacctctaccgccgaggccgtggaagggtctttaatccccaaattcaaccaagaaaaccatttgtttatatctattttcaacagcatcatatctttcctaaacttttacaagcgtatacgataaacagccggataagttaaaccccattaacaacgaatcgttctaaataatctaaaaacccctctatttttccctattttcacacttaacccctaaattaacgttaaagaattaacgtatcagaacaaaattacttacactttgctatatttgcagacacaaacattaaaacattaaaataattcgtatggcaaaaaaattattaatcgtgtgtgctttattggcattgatcagcacaaacctgttcgcccaatatgacatgaaggcaccacttcccatggatccgaacgttcgcatcgggaaactagctaatggattgacttattacatccgccataacgcggaacccaaagaaagagcaagtttttacatcatccaaaacgtaggagcaattttggaaaatgacgatcaaaacggtttggctcactttttggaacatatggcatttaacgggacaaaacacttcccaggcagaaaaggcatcaccgatatgttggaaaaacatggtgttgaattcggaagaaatgtaaatgcttacacggcacaagacgaaactgtttacaacatcagtgaagttcccacaaccaatcccggcttattagatacttgtttacttgtacttcacgattggtctcactaccttctattagttgatgaagagatcgacggggaaagaggggtcatttccgaagaatggagaaccagaagaaacgccggcttccgcgttcgcaaccaaatcatgccggtactattaaaggattccaaatacgcccaaagagatgttatcggggatttgaatatcatcaaaaatttcaaatatcagactctccgtgattactatcacaaatggtatcgtccggacttgcaagctatcgctgttgtcggagattttgatgttgaccagatggagaaaaaagtaaaagaattattctctaaaatcccaaccccggtaaacccggccaagagaaaaaatttcacggtaaatcctcacgatgaaatttatttcgtatgtgcaactgacaaagagttaacccaatcttccgttagcgtatacattaaatacccggctccgaccaaagaagaaaagaatcaccaatacatgaaaaacggtattcttcaatctttctataacacaatgttaggacaacgtgtttctgaattacttcagaaaggcaaccctcctttcatctctgcccaagcaggattcggtggtaatattgtaagaggctggaacacctatattatttcgactaccgcgaaacccaatgaagaagcaggagcattagaagctatttatcgtgaaaatgaaagagtaaaaaaattcggtttcacggaaggtgagcttgaaagagcaaaaaccaatatgttagtaggattagaatccgcttacaaacaaaaagacaaaacaacttccgaagactatatcggtgaaatgcaatctaacttcctagaaggagaaccgatcgttgactttgattattactacaattttgctaaaaacattatccccaccattacagtagatgaagtttcagctttagcaaaacaataccttaaccggaaaaatatggtaatcgtggtgcaaggtccgtccgaaggagttaaacacatcacgaaagaagaggctattgccactttggataaagttgaaaacgctaacttagaaccttacaaagatcagtctgcagaagctgccttgatcacggaagacttgaaaggttccaagatcatctctaccaaaaaattaccacaattcgatgcagaagaatgggtattagaaaatggagcaaaggttgtattccgcaaagcagattacgaaaaagaccaagtacaagtcgcttcttacagtaaaggtggtacctcattatacgatgtcgacaaactggcttcagccatggttaccgatcaatttatcggagcttacggtttaggcgattatgacgctattaccttaagaaaattactgactggcaaacaagcacaagcaggtgttagtatcagtggactttccgaatccgttggcggagcatctaccccgaatgatttcgaaactttaatgcaattgatttacctgcgtttcgagaaacctcgtttcgacaaagaggttcaccaaaccatgatgcaacgtaactacgccgctatcgagaattctgctaataatcctcaaaagattatgcaagactctgtaagcatgattatgagtaattatagcccgagaacattatcatttggaaaagatttcttggataaggtcagcattgaacaaatcgaagagatttaccgtgatcgtattaaagatatcagtgacttcaccttcttcatcgtaggtaatattgatgcagaaactgttaaaccgctagttgaaaaatacttgggatctgtaaaatcttataaccggaaagaaaactggatcgaccggaaagtaagaggaccgaaaggaaagactgaaaaagtcatcgaactagaattaacaactccgaaatcaaccgttatcaccaacttctccaaagaaatgaaaacaagcattcatgacaatctttgcttaaacatcttaaggggagttatggatcaaaggtacttaactaacattcgcgaaaaagaaggaggaacctatggtgtcggtgttcaagctggctcttctaaagaaccgtatgaaagctacagcatgaccatgagctttgattgcgatccggataaagcagaacacttgaaatcattaatctatgccgaaatcgacaaattaatgaaggaaggtccgacccaagaagagatcgacaaggtaactactatcctgaagaaaaataatgaacaaagcaaacctcacaatgcatattggatgagtgcaattcaaacttattatcttcgtggaattgatgttaccgacccgaaaaacttcgataatattattgacaagatcacaacaaaagacgtgaagaaattcacccaaaaattattcaagggagccaatgttgttgatatgatcttccaaccgaaatcaaaataaaattaggttgcaatttatataaaaagaaacgtccgggaattattcccgggcgtttttcattcatacagaatttcatcaaatgataagttcgaattactcctcttctactccatctgccttaaacttaaattgttttgccaccctaaaaataacttttttattttcggggtacaaaacaactttttgggttgaaagaacatatcgatgacgaacagcacattttttcacgttgaaagatccaaagcccgataaccccacatgcccttcctcttttagcccttctaacattgtactgaaaatttcatcaaataccattgtcacatctttttgtgacatgccatttttttgagccacaattttaactatttttctcttgtccatatctaattgtaaaatgatttttcctcacacgataaatactgccccatgtcagttcaacatttattcctaacaaagttagagattaaaagataaaacacaatattttttcacccaaaacacgacaatatagtaaatatatctacaaaacactttcccaacaaacctatttaaccgagaattccgttttttaaaagattccttaaataatttacctatacttatttaaggaaaaaagactatgtaactttgtatgaaaacaataaaggggcaaaatagaataaatcagcagaagatgaaaaaggaaacaaaaacaattcgtttgatctatcctcaatggcaaggtgccaatatcgtaaaattgatcaccgaggttgaaaatcccaacgatgcctcaagaggatatttcctgggagcacaactcttaaattttctggccccggacaatggtcaagaaacactaacagttccaatttcgactgaaatcacggaccgaaaggtgacagacggagtcctcgaccgagatattatagtccgtcaaacaagtgctgcattagacatactacacgtcagtaatcccgataaaatcgtaacactcggcggagaatgttcggtcagtgtcgctccctttacctacttgactcaaaaatacaagaacgatgttgccctaatttggattgatgcacatcccgatatcacgcttcccggagacatctatcccggatttcacgccatggccgtaacagcctgcatgggatatggagacaccaaaattctagcggaattacccacccgatttactccatcaaactattattcgtgggattacgcaactgggaacgtgaagaaatcaaagaacgccaaaagcaatacggaataaagcatctcacgccaaaagatgttgcacgaaacagtgatgcgatcaaaacttggttgaaatcatgcaaagcatcgaaagtcgttatccattttgatatggatgtgcttgatcctgccgagatcatcgctgctgttggtacagaccccgatgggatgaaaatagaagaagtcattcgggtaataaaggacattgctgcagaaaaagaattagtaggcctgacaattgcggaaccgatgcctcgcacggccatcaggatcaaaaatatgttacatcaattacctctattataataaaagacaagtcacaaaattttatttcaaaataacgcccctccctaccaagagaaactaaaagatgaatctgcaacctgtagcctgtaacttgccgaaggcgaacatttgtccataattactctggggctaggctagtgatgggctatgacaagtaccaagcacacccacatcaagaacatagcaagaacaatcgccagtgtacttgctatgtacctacaatgaaaatgacatgttcttttccctgcccatcggcggacaaagtgttgtccacaagataaccataagcagacaaat

SEQ ID NO: 10726 - DNA, 30132 bp, Unknown
  gut microbiota DNA sequence
tcgaacccccggtacctcgcagtacaacggttttcaagaccgccgcaatcgaccactctgccacctctccaatgcggatgcaaatataaggactttatttgactttcaaagcgatttttgagtttttttattcaaggcgtatttcaagtagaagtaaccgcagagtccagcaaacagagagcctccaatgataccgatttttgcttggttcaataacatggctccttccgtacccattcccgcgtaggaaagagttgcaatgaatagggacacggtgaatccgatccctcctaataaagatactccgaaaagggagtgcatatccattttgtcgggcatggttaaccaaccgcattttataaagaggtaggtgaacgagaagatgccgatgagttttccgagtacaagggaaacaaaaatcgttactgatacgccttccagagaggcgagcgtgaatccttcgaaggagatactagcgttggcaaatgcgaaaaggggcattaccacgtaattcacaagggtacgtaggtcgtcgtccatggcttgtaaaggactaaccactttatccgaggcagactcgatactttttaatatagaaagttcagagttgcttaatatgatttcatttgaattttccggtagtctttttaagctttcccggatactattcacgtacttgtatatatgtagtttcggacgggccggaacagtaaaggccacgataactcccgcaattgtgggatggattccggcgttgataaacaggcaccacacgatgattccgaaggatatgaaaaaaaatttattgtgaattccctgccgaccgccgatgtacaagagggcaacaataatcattgcagcaattaaatactccaccgtcagatgcgaactatagaatagggcgatgacgatgattccaccaatatcatctacaacggcaaaagcagtgaggaagatcttcaagcttaatggaacttttttgcctagaagcgagagaacgcctagggagaaagcgatatctgttgccatgggaatggctgcaccccgcatgactagaccaggttgactgatcagatagaagagtaagactgggacaatcatccctccacaggcagccacaaccggaagcaaagctttccggggggacgaaagttctccaacgagtagttcccgtttgatctctaaccctaccgagaagaagaagatagccatgagcgcatcattaataaaatccagtaaagtcatcggattgccatcgtgacgatcaaaaaggttgaaacttccgatcgtgagcgtgatgttttgggaaaataaaatattgtaatattcctgtaaaggagagtttgcgataatcatggcggcgagagccacaaataaaagaactattcctccatttattttcgtttgaatcagtcttctaatggagaatttaaatatttccttgaccattgtcctgtttgttgattgactatgttatatgctgcaaatttaatgaaagttatgcaaatttcaaataaaaaaggtattttctgcacgtcgggttaaaccttcttccaattcatgctggtgatataaatatcctgtatcttcataatatttcgcttgctttggacatttcttgatacatgctccgcatttgatacagatgcctgtaagctctcttacattttcatagctgatagaccccatgggacatacttttgcacaatgcttgcagttattacaacggtcgttggtaagcggtttcactttacggatgtctaccggggtgccttgccggtcgcgaggtgtgtaatatccccggtagggatatggggttccggaaaccggaatgggatgtgatagcgtgtctgtcttgtacttttcacagattttgcgaacgaattcatccactatatccatgtctttcatgtccggcctgtcttttgccagtatccgggagaaagagtgttcacccacgaatgcccctgcggctatcgtgtggagtccgttgttttcaagaatgtctcgtaattcgattagcgcatcgtcgtaatcccgattcccgaaaagcacaactggaatggctaaagccccgttgccttgcatcgtgttcaaatagggtaacagtacgtttggaactcgcccggcgtataccggggtaccaaacaccacgagatcggagtccgtgaatcgcaaaggttgtgttcttgccttgggtaaggtaaaatcgtgttcttcgagactggttttcaatgctctggaaagtcctttggccgtggcggttatgatctttcgtgttgttcctgtcgggctgaaatacacggcccgtatcttgttgatgtgtgtcatttgttgtatgatttgaaccatttggcaaagcgggcgattcccgtttcgagtgatatttgcggggtatacccgtagtcttcctgcaagcgggtggtatcagcccacgtctggtaaacgtctcccggttgcatcccgacaaactctttacgagcttctttccccaagttcttttccagcaactggacgaaatccatgagctggatgggggtaccgtgtccgatattgtatatcgtggcgggagtaccaggtacgtcttcccgtaggattcccggtgtagacacgattttctcgataccagtcacgatatcttcgatgtaggtgaagtctctggagagattcccgttattgaagatgcggatcacctcgtcgtgttgaatggcgttggcaaaaagcatgggagccatatccgggcgtccaaagggaccgtataccgtaaaaaatcgtaatccgatagtttgtataccgtagagatgagcataggcgtttgccatcaactcgtcactttttttcgtggcggcataaatgctaatcgggtgatctacggcgtctgtctctttgaaggggacagattggttgttcccgtacacggaagaagatgaggcgtatatgaattttttgcaactcgttttcttgcaggcttccagtagattgatgaagcccatgacgttactttgcacgtaactttccgggtgttttaggctatatcggaccccggcttgtgcggcaagattcaccacgcagtcgaaagcatgtgtgtcgaataatgtatgaatggcttcggtgtcacacaggtccaactggcaaaacgtgtaattcgtattccgggaagatacgatttctttaccgggaacgggatggtctatgccacaggcgtgcaggcggtcgtgtttcaaggttacatcgtaataatggttgattgaatcgattccataaacagtgtgtcctgcattcagtagtttctgaacaagataaaaaccaataaaccctgctgttccggtaactaagacgttcataataccttgcttttcgttttttaatacaatatttgcggcgacaaaaatataaaataactccgtaaagtttgtattcttccggaggtttgtgccgtgtgaagtccggtatttacgagccgaaaatgtcggttttcagctccacgggtacgatttggtttgctagggaaggatcatagggtatttccacacggatgtaattgtccgtgaatccaccgatcgatccggcaatatcgctttcttcaaacagcaccgggcgggtttgtcccacgtgtgccgtgtaaaaatcgtgtaatttctgttcggaaatatcgagaagtgtattcacccggcgatgtttttccgcttgtgggactatatacgggatgtccagagcttttgttccggaacgttccgaataagggaacacatgtagctgggaaacatctagtccggcaatgaattgtcgggcatcttcgaacgcctccggcgtttctccccgcatgccggcaatcacgtccactccgataaaggcatcgggaataagtgttttgatttcctgtactttctcggcaaaaagttctcgttcgtaacgtcgcctcatcaagtgtaacacttcgttactcccggattgaagaggtacgtggaagtgtggcatgaaacgccgggaggaggccacgaaacgaatgatgtcatctgtcagtaggttaggttcgatggaggaaattcggaagcgttggatttcttccagctcatccagtgttcgtatcaagtcgaggaatgtttcccctgtctctctcccgaaatctcccgtgtttactcccgtgagaatgatttccttgatacccttggatgccacgtcacgggctgccttgatcacgtcttggatggcagcactgcggctacgtccgcgagcgaagggaatcgtacagtaagagcagaaatagtcgcatccgtcttgaattttcagaaaacaccgggttctgtccccgtacgagtaagcaagatcgaagtttttgacctcgaaaatatcacaagaatgtggttcgtgtcgttcctgttcttcgaggtggttcaaatagtgggccacgttgaacttgtctcgtgcgttgagtaccaggtggacaccttcgatattcatgatttcctgcgctctaagttgggcataacagcctaccacgacaatgtaggatccgggatttcggtggatgattttccgaatcatctgccgtccttttttctctgcaatatccgtgacgctacacgtgttaatcacgaatatatctgccccatctttttctcccacagtcacggctccttcctgttcaaggttgtgcttgatcgtggaggtttcggagaaatttaacttgcatcctaacgtgatgtatgccactctcttcccaacaatgttcatatgcgatctactttaaatttgctagtgggaggcaaagatagagttttttcatttcttatccatgaattcttagtgtaaagctacggaaccataatgctataattttgtatggaatttatatactaatttacggtacaggcatgagtttacttgttggacaagtcaacttttttcaggataagccaataggccttccccgtgtaaggggaatttgtaacaggtatacctatgggtacggtaaacttgtatataggttccaaatctttttctatctttgcccaaagaatagaaaaaagccaatgaaatactacgttattgcgggagaggcatcgggcgatttgcatgcctctaatctgatcaagggattgagaaaatttgactcgggtgcggaagttcgcgggtggggaggtgatctgatgcgggagtccgggtgtgagatcgttcgccattacaaggacacggccatcatggggttcctgacggttttgaaaaatctggacaagattaaggcgaatattgaagcctgtcaccaagatattttggcatggagaccggatgtcgtgattcttgtggattacggtggttttaatctccgggtggctaaatttatcaaggaagcgggtattcccgtattctattatatatccccgaagatttgggcgtggaacacgggccgggtgaagaaaatcaagcggttggtggatcgtatgttcgtgattttcccgtttgaagttgacttttatgcccggtatgactatccagtgcagtatgccggaaatccgttggtagatgctattcacgatcgtcctttcaaggatgaaacattcaacgagttcgtacgtgtaaatggcctttccggtaaaccgattatcgctttggtggcgggtagtcgttcgcaggagttgaaacacgtgttaccgaaaatgttgactatggtaaaacattttcctggtcacgagtttgtgatagcgggggctccctcgatgagtgatgcggattatgctccttatttgcaggatgtgaaagtaaagattatttacggacagacctaccggttggtgcgacaggcacgtgcggcattggttacttcgggaacagccacgttggaaaccgctatactgcggacacctcaggtggtttgttacagtggagaggggggagcgttgagttatttcctgtttaagacttttgtcaaggtgaagtatatctcgttggtgaacctgattgccgggcgggaagtggttaccgagttgttgatgcaaaagttgaacgaaaagaacttgttgagagaactttcgcttattatttcggaaggggagaaacgggatcaaatgttggcaggatacgacgaggtgaacgagaagttgggtgatgccggggcatccgaacgatttgcccgcatgatgattgatgagttgtcccggttccgagggtgaattaagatcataaattcctttcgttttgtcgaaaaaggaaacgttgcccgtcaaaatacggttcgatgagttcaaaccggatgaacttggctaacgtgttttctgccttggggcggggaatctttgccagacgacaatactgatttagtgtgatggagtcgtgtgaaaaaaggtaatccaatagaatctgttctgtttccgtgtaatgcacgaatgctcctttgggggttccggcttgttgccatactttgatatgcacgggggtggcaagtatgttttcatccagaatccggatgtaagcccaccagcggttatcgtgatctttggcgtaatagggtttttgttttcccggagggacgatgacttcgagaaccgtacgcccttctacggtgtggacgtgcatttcacaatcgatttgtggtttacaataaagctttgcggcagcctcgatcatgtacatctcctcttccgagcgtactccggcaatcttgccgttatcttttacccccacgagtaagcgtcccccgtcggtgttggagaatgcggaaagagatttagcgatcttgcgggcatcagaaatctcgaatttgaaatcctgttgctggtgttctccttctgctatccggtcgtgtatatagtcggcttttgtttgaatcatagtttggttgtttttctccgcttgcaaagatattgtaatcggattgtttgttctttgtttaaagaaattttaagttatctttgtcaaataattttgagttatggagcagtgtgacctcttattagaatatttacgccaacagaaagagaaagcttacgagttgctctatcatgattattatgttccgttggttctgtttgcggggaagtatgtggaaaatgaagaggtggcaaaagatattgtgcaggaattctttatatcgctacttgataaagagatggtgtttaataatcggattgcactgaaagtatatttatatacaggagtgagaaataagtccctgaattatctacgccatttaaagatcagaagacagtatgaaatgaaaatgttggaagagggggagaagcaagaggtgtttttagagcggatgatggaagaggatgtgtttgcacgaattttaactaccgtgaaacagttgccaccgcaatgcgggaaagtcatgttgttgacattaaaaggatataaaatttcagaagtggcggagttcatgggaatttctttggagactgcaaaagagtataaaaaggacggtaaaaagagattgtataataaattgaaaggtggcatatactcaatatttataggtattcttttctcgtaaatacccgatttaaggtatttctatggctaaacatttataatatgtttgtgatcgaattttgattttttttaattcttatccccccgttttgtttgctgaagtgtttcttggcaaatgcatgttaaaaatggaggaacaaaaaaattatttgtttatggataaggaagaaaatgtattcaaaatatcggagtttatttccaaatctttaagtgattgtttggaagaaggggagttgcaggagttggaaaaatggttggcagaggacgaacgtcatcgggagttgtttgatcagtggagttcgaccgaattgatggaacataaggtgggagaatacgagcgtttggattatatgaaggcatgggaagaattcagaaccgtgagacgggataaactatctgcaaagcgtagaaagataaggcgtacgtggatgaggtatgctgctatgtttatgattcccttgggagtagctgttgcgttactttccagagatgatataaaagaaaagagccgggtggaaccgataaccgtgaaggccggaaaatctcaagctgtattagtcttgtcatcgggagaaaggcaagttttggatttgggggaaagaaatatagaggacgggggcatgagaattagtgcggattccgggcggattagttataatggtaaatcacgctcaggggaagtgcaggatgcttttcatatcttggaggttccgcggggaggagagtattttatgatcttggaggatggcactaaagtgtggttgaatgccgcaacacgattgaaatatccggtggcattcgtgggtgggattcgtaaggtgttgttggaaggagaggcttatttcgaggtcgctcatgatacaactcgtcctttcgtggtagagacagaacaggctaaagtaaaagtgctggggacctcttttgacgtgagtgcttacgaggaagagggaaaaacgtggacaaccttggaggaagggatggtcgagatcgaatctttagatagaggagaaaagataagaatggtgccgggcgaacagatttgtttgatcgaggggaaaggaatggaaaaatataaggtggagacagctttgtttacctcttggcggtcgggacgtttggtatttaaggatatgcgtctggaagatctgatgcgtaatatggcacgatggtatgatgtgaaagtcgagttctaccgggaagaggctaaagatattgtatttaccggtgacgtgaagaaatatgaagatttgaacgaggtgctggagatcatcgagcttacaagtgacgtgcatttcacaatagaagaacagcgtattattgtacattgaaaaaattaggaactatgaaaggtaagtatgttttcaggcgtattttatggggcttgttgttagtgtttatatttggggggagtgtgtttgcccaacagaaaaaactaacgattaatttgaaaaatggttcatttgcccagttgacagaccaaatcaagaaacaatcagattacacttttttctttaacaatgccatggtgatgagtttaaagaaaataaccattcaagtaaaagaagttacgttggattctgtgttgaatattgccttgaagggttcggatcttacctataaaataaaggataaaacggttatattatatgccaaggagactccggaagcggcttccaaaacagtcaaacttcaaggtcaggtgaatgatgaagcgggagaggcactaccgggagtaaatgtttttatcaaaggcacaaccgtgggtaccgtgacggatttagacgggaattattcattggtcgtacctgacgtgatgggtatggaagtcgtgtttacttttattggtaaaaagacaaaagagatcaaatatacgggtgaccgttttatgaatgtcatgttgaaggacagctacaacgagatggacgaagtgcaggtgagggctcgggcaaatgtaaacgagattgatgtacgggccaaaacaggggtggtgaatgaagtggatgttcggcgtatgaataataagcccgtgttggatatggcgcttgccttgcaaggaatggctccggggttgattgtgaccaataaaggggatttgggtagtaagccggagattcgtatccgtggaacgtcttctttgcgggaaggagatgcggcgaacgaacctttgtatgttctggatggtcaggtgatttcgtcggatgcttttttaacgttgaatccccatgatataaaggaaattaaggtgttaaaggatgccgctgcctgtgcgttgtacggaatcaaggcggcaaacggggtgttagaaatcacctcacaacgaggtactgccggaaaaatggtgtataattatagtttcagtggaggtgtgactcttcgggggcgtcgaggggtagacatgatgaattcgaaggaaaaattggaattagaacgtcgactggaaaatacggcaactccgggttatcggtatagtgaagattactatcggaaataccatgcgaatgatccgaatctggagagtttaatagccagaggacagcaagtactggattccctgtctcgtattaatacggactggttcaaagagttgttgcgtaataatttctatcaggaacataatttaagtgcgagagggggaacagagcagactagtttttatgcctctttgaattattcgcaacagggtggacgtatccccggaaacgatataaagcgggtaacggcacggttgagcgtggatcaggagattacccccaaattgtatgcttctttgagtgtcaatggtggatattctctcacgaacacgcccaatggtacgagttattctccgacggatctagtgtaccagttgaatccttatgaaacgaaagatgtgaatgcggagttggtttcctttccgggaagaacgtatgcggatttgttcaatcaatacagtgaagaatcatcagataagcgagccggagtttcaggaagtattaacttccggggtattgaaggattggagattgctgctgttgcgggtattgattatgtgttgtccgagaaactgggcatcacgcctccgacggcgtattctgaaattaccagtggtgttccggaacgggaacggggaaaattgacaaaagataagaatactaccatgaatttgtcgtcgaatgtgcgtgtgacttataaccgggcattcgggaagcatgatttgacgttgggagcgaacttcgatttttattccgatcactatgataatttgggaattacaggttatggattgacaaagaaaatgcagtctgcatcaggtgtaaatcaatcaatagagggcaatcggaaaccatcattcacttcaaagaatgagaagacggcccagctgggcataggagttttagccgggtattcttggaataatatctatgatttgttcggaacatataaaagtgatgcttcttctatattgcctagtgataaacgttggaattccgcttgggcagtcggtgccggctggtcgttgaagaattatccttttttgcgggataatggggtgctgacggaattaaagttaagagcgtcatacggttgtactgcaagcttgcagggtgtctctccttcgtcggcagtggctacttttcaatattccgaggatgcgtatggcgacgatcagttgttgtcattgatgggattgtataatgccgatttgaaaccggaacagaccattgatattgatgcgggaatttccttgggattatggaatcgggtgacgctgaatgctgggtggtaccgccgtcgtacaaaagatgctttgttggatgtacctattccagcttcgaacgggtttactactttgaaacggaatatcggtattctggagaatagcggtatcgagggggaattgtatgtaaaaatggtagatcggaataattggcggatgtccgggcgtttgaaccttgcctataaccagaataaggtcgtggatttgtatcatacggattgcctgtacacgtcagagtatgatatggttcctagttttgaggtaggaaaatcgtatgatatgatatatgggcccgtgtcattggggattaatccgatgacaggacttccggtgtttcggggagccgatggacgagagattgccgcaacggaaaaactgacacgggaggatatggttgctttgggacattccacaccgccttactccggtagttttttctactcggtatcttacggtaattttgatttggatatggatttttacttcgtgttcgggggcaagaaagcgtacaatttttcatacgtgcgggaggtgagcaatgcaaattataacgcgattaaagggcaggtggagaatatgtggtttcaagaaggtgatgataataagatttaccatcgtccttactactcttcggcagccgtggataatctgaaattgtatgctaacagtcgtaccgtgggaagtagcgattatttgcgtatgtcttccttgtcgttgagatatagattgccttattggttgattgagaagacgaagaacgtgatacaatatgcttcggttgcttttcaggcatccaatctattcaccctgacgcgttataaggagtctgatcccgaatccggttcgttagttgggacacaacaaccggtatttacgttgaatttgagtgtaagtttttaatatataagatatgaattggaggataataatttgtgtggttggcttcctgatgggaggttgctcactaaatataccgttggaagatcagttttccgatccggatgcaataacggatgttttgtcggctcgttcattgctggcttctgcctatgagggattacctcagcacttgttcgagtactcggttctgtcggatgatttttgtcccactcaatatttagaccgggatgccacgttgaaaaatctgtatgattggcgggaagttgaaatgacggaattggcgggaacattatggaccgaatattacatggtggtggcagaggtgaacgctttattggcacgaatggatggggtgatcacgttgaatgatgccgaggtggaggaaaaggagaggattatttgtgaggccaaggggttgaaagcatggtgttatttcaatttattacgcctgtttgctcctcgttacgagggaaatgaggcaaaggacgggattattttgaaagaccgggtggagcttgactttttgccccgttcatccatgaaggtttgcgtggaggaaattcggaagttacttaaagaggctagaaatgagaaaaatacattgaagaatgtgcattggctatccgataagagcatcgcttatttgcaggttgaattagagttgtatgcgggtaattatccggccgttttggaacagacggagagtttggaaacggtatatccggaaacggtattaggagccggagcctatgagacactttggagtggcagcgattcggaggctcggatttttgcaaagtatcaattagcccaaatttacgaggaaattcgttttgaaaccttcgataaaggggattatttggtgctgacggatgaggtgctgttcgaggaaggagatattcggaaagaatggtcggaagtagagttcgtgatgccggattctcatgaagttcgtttattgggaaaatataataaaatgaaccgggacgagatcgctagtaaatacgtgaacatagcacgggctgccggaatgtggctgatgcgtgcggaggctttagctcgttcagaccgaagtggtgacgccgtgagcctgatgaaccggatgatggagcaacggggtgctacggcgtgggaggtaggattatcgggtaatgaattgataaataaaattctggaggaacgtagaaaagaattcgtgggtgaaggagttcggttcttcgatatgaaacgatgcggtattccggccaaacgctacggcgtgtatggtaataaggtgtcaaccacgattaagtcggacgactatcgttggacgttaccgattccagcaagcgaatatcggtataacacgttggtcgaacaaaatgaaggatggccggtattggctgtgtgaagtaataggtataaattataaaagtgtagttatgagtaccatgggaaaattacaaatcatgcttttattcttggtagccgttttttccggttgttcggaaacggacgagagagcgtatgtgggaaagaattcgatatatatcagaacggagggggacccggtaatattggcaatggatgatgagcctttgaaggcaacattaatgttgatacgtgcttatgataaagatgtgtcttttgaaattgacgtgaaatacctgactgaaggagcgggggatttggtaacggtgaatccagctatcgtgactattccggcaggagaaaagagcgtggattttgaaattatttcaaataaaaagggtgttgtggcagataaggtgcaattagaaataggggtaaaatatccattaccggaagcggatatggggaaagtggaggaggtgttgcgtgttgtcgtgaaaccttatatggaggctgaggatttgaccgaggaacaacaggctttgctggaaggatacaaggcgaaaggattggatttgagtaaatggatcggggtgatcccggtaaaggtgagcgtggaggtgcctcccacggacgggttggaatctttaattaacgggatgaagaaggtgtatactggaaagaccgtggtcacgttgagtgaagacgctactgcagaacaaccgatactaaagatgacgaataacccgatgggtttgacggaatttatgtatgatatgttgcgcaaggagacagttgagaatgatatgttttggtattatgatcctggagagggggagataaatccttatatggcgatgatggagttaatcgggctttctaaaacgagtctggaaacttttgagatgacattggataatatccgtgtggattttcccaataatggcgtatcaaatgtagagtttttgggggagagacccgatatctgggatgaaacagaattagtgaccgtggttccttttgcttataactattctgcttggaatcgtttaaaagagcttttggatgcaggagataatgaactggcacaagaatatgtggattatggagcaactcttgatccgacccattacctgttttattcgggaatagatgaagattactgggaagatggtaattggatggagcctcagggagtgttgacaggtaacaagttgacgttccagtttaattttgatcattatagtgccggagggtatagcattattagagtagaatacactttatctgagtagttttatgaatatgttgagatgtttatttacagtatgtttgctaggaatgtttttttcaatggcgaaaggccagacagttactcctgcaaatgaattgattgcgttgccggagggtaccgtgtacaaacagttgccgaacggattgcattatgttattaaacaaaatgatatgccggggcataaggtggaatttcgtttgatcttacgcgccggttcgattttgcagacagagaaggaaggcggtgtggcgcatttcctcgaacatatggcttttaacgggacagagcattttccgaataaagggattgttgaatatcttgagtcactgggcgtgaagtatggatttgggattaatgcctttaccggatttgatcggacaatttatatgttttctattccgacagaccgaccggaagatttggatcggggattgttgattttgaaagattggttgacaggaattcaaatacgtccggaacaggtcgaaagggaaaaaggggtaatattggaagaggcccgtgggtatgatacgggtgatcctttttacgatgtgaaagtcgggggaacccgttatagcgaacggatgcctttgggaactgcggaagagataaagagcatgaccgcagagaaactggagaacttctatcgaaagtggtatgtaccggaattggccacgattgtcgtggttggagatttgaatgtcggggaaatggaagggaagattaaagaggtgtttggaggagttcccgcggtaaaaacaacaggatacaaggaatatcctttggagtacacggagaaagtggcttaccaggaaatgcaggatacgttgattactcgttcggcattagaattaatattaccgaaagtgactaccgtgcaatctacttatggcgatcgtttgcaaaagataaaagaacggttgttggtgtcggcagtcaatgcccgctttaaggcgcagggttcacgggtctcgttgtccgacaactggtatttgagtgacaaagatcatctggtgttttctatcgatggggagcatggaaccgagattaaggggaaaatcgtagaggtcgtgagtactttgaaacaaattcgcgagcaaggattttgtgaaccggagttggccagattgaaagaaaatgcgataaagcaattaggaaagatttatgccgtcaagagttctgaacaatggtgtgaggattttgcagacttggcaatctcgggggagcgttacgtgacagataccttacataatagttggcttgcctctcaaatacgcggaattgaaagtaaggaattgcaggccttagctagtaagtggtttgggcgtctatctcatgtgcgtgcagcttatcattataatcccttaaaaggggaaaagttgacggaaaaagaaattcagacctcttgggaagagggagaaaaggcctcttgtggcgtgtacgagtatgtggtggaagaagaggaagaacgggagaaagtggatgtccctgaatttttagtacgtaaatttactccttcccggcagttgattgcttcggaacgagtgattgatgggttggacgtgaaagaaatttgtctgacgaatggtgcacggattattttgaaacggacgaaagatgaagatcggcaaatcacgttaaccgcttttgccaagggaggggcttcggtgctgactcccgagaattaccctttgctggaaggtgtggcgggttacatggaaatgggaggaattgagaagatggattatgactcgtactgtgaaatgttggcacaggaagaaatggctttttccgtgacgtttgagccttactggcatgggtggattgctatggctccggcagataagatcactgaattatgccatctggtgtatgaaaagtgtttttatccggaaaagcggtatgaggattttgaagatgctaaacaagatgtgctagcaagcgtgggacaggaaaccgtgttgtcgaagatgttgaaaagcgcaccggacaggcagatggcagcacggatagataagttaatgggtaattccttggcaacaggaaaaatggccgagagccgtgaggaaatagaggcgatgaatttggatgatattgcagacttttacaggcagttgtatacgaatcctaatggattggtgtgtgtcgtttgcgggaattttgatatgaacgaggtggaacgtgatttggtagcggctctcggtatgtttcccgcacaagaaaaggttaatgactgggtattgccgaaatttgattacccggaaggaggtttccgggagatattcccgaatgagaatgaagggcagactatttttgattatctctattatgggaattatgaagcaggattacgcaattcattgatgctgaaattggtgagggatgttgttcgcaatcgcttgttgagtgtgttacgggagcaagaatccttgctgtattctccatatatgttattatattacaaaggattgccgcgggccggatattattttgatattaatgcctcggtggataccaaaaacatggggaaggtggatcagctattgaaggaaattattcgggatgtgcaggagaatgaagtggatgagaaagaattggctgcattacaacgctcttttgtcgtgacccggcgtgaagtggtaaatgattatgctactgcagaatggaaaaagtatctgatgggtgctttacgggatggggagaccttggaggatttggctcgttacgaggaaatcttgtattcgattactccggcagatttgaaggatgcctgtcgggagtatttggacatggagcgatgtggtgtcttgttaatgcagggtaaagaatcggaataaactattttgaagtaataatggaataaatgatataatatgaggagttgtttgattattttgctggtgatgttgttgggttttaccaactacagtaaaggacaggaaaagaaagcttatcgcttgtttgatgcgaagggaaaggaaatcgaatataaagagatgatgaaagtgctgaaagcacaggatgttgtgtttatcggtgaggttcataattgtgccatagctcattggttggagtatgagatggtaaaggacttgcatactgcgcataaggataaattgacaatcgggttggaaatgttggaggctgataatcagttgatggtagatgaatatgtgggacggttgatctcttccgatcgctttgaagaagaagctcgactttggcctaactatctgacggattatgcacctgttgtggggttaggccgtgaacacgggttacgggtgatagccacgaatgtaccccggcggtatgctaatatggtgaaaaatgggggatttgaggctttggaaaaattatcggcagaggctaaaaaatatatcgcacccttgccgattgattacgagccggatgaagaggctgccgggatgttcggtttgatgatgatgacctcgggaaagcataccgatccggagaatgtagccaaggctcaagcattgaaagatgccacgatgggatggtttattgcccagaatttgaagtccaaatttgtgcatctgaatgggaactatcattcggatttcaagaaaggcattattacttatctaaataaatatcgtcccggtttgaagatcgcaaccgtatgctctgtgcggcaggatgatataaagaaattgggggaggaaaatgaaggacgggcggatttttatatctgtgttccaactgatatgaccatgacatattaggatgtttcgaaaattcttcctacctttgtactagaaaatgagacatgaatccatatacatccgggagggatgctggtttgtgtctctttttttatgggtgtgagagtgtctaatctaagtaattggtgcatgggaagaataaaagaaaaaaagcgagtggcggcggcgagtagggggcaggttcatctaaatcccttgggtattgatgcggcaatcaaggcttacaggacggcagttcttgatagcgaacggctagaggaaaagatccgggaattgatccgtatgggtgatttttgccgggaggtttgtcgggatgaagaagctcatgatgcttatgagcgtgcccttatgttttgtcgggagaacgagaataaacgttcccctaggttctgggaggaggcttgctattgcgcatcccgtattgatgagttgtcagctcatcaacgaaaagattgttcgacaatggtcagtctggttgacttttatgcagataattttcccgctgccttttagtgacagcgggaagtcaggtcgtatggactaattttccaaaaagaatttcaaatcatcatctgcggtcgtgattccggcaataccgaatttttccacgagtactttcgccacgttcggagaaagaaatccgggtaaggtcggtccgaggtggatgttctttactccaagatagagtagggctaacaacacgatgacagctttctgctcgtaccaagcaatgttgtaaacgataggtaattcattaatgtcttttaccccaaagatttctttcagtttcaaggcaataaccgccagagagtagctatcgttacattgtccggcatccagcactctcggaataccgttaatatccccgaggggtagtttgttgtaacggtacttggcacatcctgcggtaaggatcaccgtgtctttcgggagtttttgggcaaactcggtgtaatattcccggcctttcatccggccgtcacatccggccatgacgaagaatttacggatagccccggatttcacggcatccacgattttatctgccagtgcaaacacttggttgtgggcaaatcctccgataatacttccggtttcgatggcttccggcgccgggcatcttttagcgtgttcgatgatttcactgaaatctttcggttgtccgggtttgcgctcgatatgtttgaacccgggaaaacctgccgaaccggtcgtgtacactcggtccttgtaatttgcgtccggatgcggaggaacgatgcagttcgtggtaaatagcatcgggccgttgaaatgttggaattcatacacttgtctccaccatgagttaccgtagtttccggcgaagtgtttgtattttttgaatgccgggtagtagtgtgcgggaagcatctcgctgtgggtgtatacgtccacccccgtaccttccgtctgttccagaagttcatacaggtctcgcaggtcgtgaccgctgatcagtataccgggatttttccgcacgccgatgtccactttcgtgatttccgggttcccgtaagtatccgtgttggctttgtcgagcagggccatggcgtcaacgccatttttaccgcattccagtaccatttgcacgagctgatcggcggacagtgggagtgtggtggctatcagcccccggtcgatgaattcgtagatggaagggttctcgtgtccgagattataggcgtgttccgtgtaggcggccattcccttcatcccgtaggtaagcatttcttttaaagagcggatgtcctcgttttcggtggagagaactcccacgtgtccggctttcgattccatttcttccagcgagtcagccgtccaaaaggcaccttcgaatgtgatcttttcgggattcccgcctttgtcgaggaaggtttgtttcaattgttcccttaacttgatggcttctttgattttttccacgaaacgttgcttgtcaaagttcgcattcgtgatcgtcatgaacaaaccgtcgagaataaaacgatctgccgagtggtcaacggcatcaagggctcggagttgtactcggtagtgggcgattccttttaggataaatagtaataagtcttgtaagttagcgacatccgatgtctttccgcatacaccgcggaccgtgcaaccggttccttttgctgtttcttgacattgataacaaaacattttttccatggtttagtgtgtttgatgaatattttttctatttgtttgtcgcaaatgtacggggtccgtgaaacaatagttgtaatataaattacaaacgtgaatttaattttcaataatttatacgtgcatagatgaaaaaggttaaaggtaggataaggtcttaaaaaagaaaatgatacatttgtgtatcataaaaaatggcagataatggatatagcacaacttttcgagagtcctttatgtatgggaattcccgagcgggagagagagcagtttattgaaggatttgattatagcgtgaagagctatatgaaaggggatgtggttttccggcagggagacgtgtgccgtttcctttatatcttgttggaaggggaggtcgaggcggaaatgacggatgattcaggagccatgttgcgaatcgagacgatccgggcgtcgagagcgcttgccccggcatttctttttgccgaggataatcatttcccggtgacagctaccgtttcggagaaggctgacgtgtttatcgccacgaaagaatccgtgttccgtcagatgggacgttatgaaagtttcctgcgtaatttcttgtctgtgaatgcaaaccggacgacatttctgaccgggcgtttgcagttcctgtcattcaagacgattcgtggaaaattgatccattatattctggaactcgcctctcccgataagaaaaaagtgttgttgggaaagtcgcagcaggaattggctgagtttttcggggtgactcgtccggcactggccaaggtgttgtacgagctggctgatgaggggatgatttccgtaaatcggcaggagattattatcttggatcgggagaaaatgcgtagggccttgaattaacctgttacgttgtcttttcgggtatgaagggggaagagattgccggttgttgtaaaagggtgatgtaaatttaaacattttttcgtcgttttcgttaacacgataaccgggcggatggttattcggacatctgtttagggacatatcgtgaacttaaattgtgataaaatgagtcttaaagaacaatactggagatattccctcgtggcaattattctgttgctgggaattcttatattttttcaaattctgccgtttttcagcgggattctgggtgccatgacgatttatattcttctgcgcaaccagatgatgtatttgaccgaaaagaaacggatgaaacgtagtatcatggctattcttctgttatgcgagacgattctttgttttcttattcccctgtcaattgtcgtctgggtattcgtgaacaagttgcaggccataaatctggacccgcatagcttgattgccccggtggaacatgtggctgagctgattcgggaaaaagtagggtatgatcttttaagcaaagggaatatagatacaatattggcagccttgccgaaggtcggtcagttcctgatggggagcatcagtagttttaccattaacgtggtggtactgcttttcgtgctttatttcatgctgattggcgggcgggatatggaggagtacgtgagcgatattttaccgtttaataaacggaataaaaagaatatactacacgagttcaacatgatcgtgaagtcgaatgcgatcgggattcccttgcttgccgtgattcaaggggctgttgccacgttggggtattttatattcggggcaccgagtcccgtgttgtggggattcttgtcctgtttcgccacgattatcccgattgtagggacggcattgatctgggccccgctggcgttgtacatggggatgacgggacattggggaatggcgatagggttagcagtctatgctttggtcgtgatttcgaatgtcgataatttggttcggttcatgttacagaagaaaatggcggatactcacccgttgattacgattttcggagtggttatcggactttccctatttggtttcatgggggtgatcttcgggcctttgctcctgtcaatttttgtcttttgcgtgaacatttttaaagtggaatacttggaaggagaggtacggacgagacccaagatatacaaaccttgattcgtttacaggtggtaatgaatggggtgtgctactcttttttcaaggtataactatcacaatcctgtttctgctcccgaacaataatgttaccccgtcgtcccgtggtgaggggatgacgggtgtgaaaggggaatccgtaatttaggtatgaatacctgtaattcgtgtacatacgagttgggagtatttgcttatttttgtgatagatttaattttgagttgtatttatgagattaataaaaagttcaagaaagcgtatggtactatggattgttctgtcgattgtggtggttatagccattgtcggaattgttttcgtgaatcagccgagtttcgggagaattccccggggagaacggttggcaagaattgaacgttcgccgaattaccgggatggggctttccgcaatatacatgaaactcctttaatgacttcggataagggacgtttgcagggattactggacttcgtttttaaggataagaccggactgcaaccggattcggcgttgaccgtggtgaaaacggatttacggcagatcgacccggaagaggatgtgctggtgtggttcgggcattcatcttatctgattcaagtggatgggaaacgggtgctcgtggacccggtgttttgcatggcctccccggtgtcttttattaacaagccgttcaagggaacggacgtttatcacccggaggatatgccggatattgattatttggttatttcccatgatcattgggatcacctggattatcataccgtacgggcgttgaaagatcgcatcgggaaagtgatttgcagtttgggagtaggcgagcattttgagtactggggattcgataaggagtgcatagtcgagttggattgggaagaagaggctcgtttagattccggttttgtcatgcattgcctacctgcccgccatttttcgggacgaggactttctgccaataaaacgctgtgggcttcgtttctgcttgaaactccttcccggaagatatatctggcgggagacggtggttacgacacgcattttgcccggatcggggattgttttccggatatagacttggccattcttgagaatgggcagtataacgagggatggaagtatatccacttgatgcctgattatttgattcgggcagctttggacttgaaagcgaaaaaggtgatgaccgtgcatcattccaagtatgcgctggcccaccatcgttgggacgagccgttacggaacgagataaacatggcgaaaaacgactcgttacacgtgttaatacccggaattggcgaggtcgtgaggtggggagaatagattttaatgtgacatatcggctctctccccgtgtaaggagtagttggagtagtagttgtaaatatcaaacagaatttttggcccgcccttggtgagggacgggccatccaatcgtttgtatcttacaagttaatatattctctgagagcgtcaatataatcctccaaagccttccttcccgtgtcggttagttgacatgaagtgcgagtttttttcccgacaaactcctttttcacttggatatacccggcagtttcgagtttttccagttgtacgctcaggtttccggcagtcgcgttcgttttctctttcaagtacacgaaatccgctgtctctaccgacaagagcagggagactattgccagacgtaattgagaatgtaatagcggatctaattctctcatagtttttcggatttattgttcagaatatgtcccggtatgatcatcatgacaacaaatgacaggccaaagtagaggttccagagtatggcggcactgttatttatcgtgtaactcatcagcatgtatatggcgagcacgaaacctacaagcggggtgtagagcaaacacttctctctgatgactaaacccgtgattgccgttccgatactcgtgtacaggaggcataacgggagcatgagcatgaaatcacattttccgacaatgaatgatagagctagtatgactaacatggttaacgagaatgaggctcccatcacttgccagactttattgaccatgctgtccgtgtaagtgatgacggtcggggtgttccttttttccttgaacgagaggatgattaccggcaggaacatgagaaaccagcccgcccaccaccagggggtgtgggtcatgcagagtaacgtgtagataatgatcgacaaaatagcagccgtgtagccgtagatgatgaagtaatttccctgacctttcacgaggttctttctggttgcctgtatcatttgagagatgagttctaaactttctttctctgtaaactttttttcttccatgtttgttgtgtttggtgtttgtaaagtggtttattttataaactatattctcaaaaaaaatagcgctattcttttttatttatgcaaatataaagcagtttattttataaaccaaatgatttagtgaattttattctttcacgtggatattattttttatttttgcttgtaaatatattggaggacggtattatggtaaaacaggattatcttgtgcgcatgattcaagaaattatttctgcgatcgctagggctatattaaacaagaagaagattcgtcagcaggatttggacgagtatgacttgttgacccagcaaatgttgggatttcccgtgaaggagctggcgacaatggatgtgcaggaactgattgatcggtatgccaacgaggaagacaggattggtaagattgaacttgcgtccgtgtacctattgagattttccgaagaggtggaggaggatattttgttgaagtcgaaactgcgtcaggatgggattcgtttgcttaaatatgttcagcaggaagatacaaacttttcaatacaacgggattgtctgatccggatgctggaaacgaatcagtaaaatttggggtgtcgtttgggaatatcgggataatgttctacttttataacttgtcatttggattgattgtatagaaaaggtcgtggttgaaggaaagtacaaaaataaaaagtagaagaaatgatacaaattcaacattatgaatctccttgtggagagctgattcttggctctttcgaaggtaagctttgtttgtgtgactggatgtttgaaaaacgcagggcatctattgataaacggattcagaaagcgctaggggccgattacgaagagggtgtttctgacgtgatccggaaaacaatcatccagcttgacgaatattttgctcgtcagaggaaaacgtttgatattccgctcgtctttacgggaacggagttccagaattcggtgtggcaggagttgctggatataccatacggcaaaacggtgtcttatggcgagttggctaaaaagttgggaaacccgaaagctgttcgtgccgtggctgcagctaatggtgcgaatcctatttcgatttttgttccttgtcatcgggtgattgggggtaaccataaattggtcggttacgggggaggcttggaggctaaaaagggattgctggatttggagatgggggtgcaaagtttgttgaatggtatgcggtaaaatcgtgcataatagctatatctgtgaaaataaagctagggcatggtgaaacaaaatgcaattaaattttaatatcagaaatagaatatttagcggtgattcttcggagttaccgttatttttatgttcagatgtttataggtaattaattacctatatttgtaatatgatcaatatatgagttgaacgaggcaaacaacgatatgttgaatgaggcaatgaaaatgcaacggtgactcgaattaatgcagttgatcctgacggatatgcgggaagagagtaaaaattgtggggtgttggagtttgtcacgtcaccagtacaagtaatgccattggagccgtcattgtttttcggtcatggcggttgggcggtttcatttgttcgtaaacagactgtaatatgaaagagaaaattgatgcgttgaaagagactttttttattactgccggaatgggcggatcgctataattattttgttgagctgggggaatctttacctgcaatgcccgtgacatttcaagtaccggagaaccggattgcttgcaatccgatgttgtatttctacgtgtgccatactaagacctttgctatatatttgcttctgccaatgccgtgatacttgctgggttggccgctatgctttttaacctctgcaacggggtatcacggaaggacatccgggataatatgccgtatctacttgctaccttaaaagaattggggttgattgataatctcacgctgtcgaggcgtgtggcactattgacaatggttgagaaaataacgaattcataaaaaatgattcaacgaatattttgtaataaacaaatgtttatctatatttgtagtgtaaaagtttctttgaaatgttttcctatgaagagctaaaggctcggatagaacatgagaaaaatagtcttaggttctatgtcctttactggcatattttgaaaaaagatatgtcggaagaggaactggagagaatgattgactttcatttagatcgtttgatcgaactactccggttgaaaggttgacaggaagctctcgaaagagggcttcccaaagaaactttacaattttaaatattttagatatggcaagttacaaagaattaaacgaggaattggaacaaatgaaagcggaattcttgactcttcattccgaggaagaagagcgggaatttggtgagaaaatggaacgatttgtagcttccaaaagcccggaagatcgtaaaattctcgctcaagcgtttgtgaatggtgcgaaggaatcttgtgaacgtgcggagaaattatacgatgaaacgttacgtgtttatctggaagggatatatgaatcaatttcgtggtcttatgttgctcgacactattttggaaagagtcgatcatggttgtgccagcgtataaatgggttgaagattagaaataaagaagtacaatttaccgagaatgaaaagaagatattattagatgcgttacttgatttaagtaataacattaaacgtacagctcttgttatagggcatctctgaaacttttacaactttagaggaaacccgccattctcgtggcgggttttttaatagtaaagttgctacgctttgttttgtagataatagtaattttactatcttggtattgttggataaataaaacagagttctgtgaaagtattagagatattgagaaaactcaatgaggacggttggcagcttgtacactagagaggcagtcaccgacaatacaagcacccgaccaaaccggggaaggtcacggtaaacggtagatcgtcagatgatattactggaacgttattgaaaagcaattcgggttagttttctaacccgagtaaaagagaaaagttatggagaaagtgagagtacaagtagcaaaaacaccggaaggttattgtgcgacggtcgatattcttccaggttttattgttgctgtcacgggtaactttagtgaactaaaaaaagagttatttgaaagtgttgatttttacgtggaatgtgccaaagctgatggagatgtatatccggaagtcttgaatcaagaatacgaatttgaatacaaatttgacgtggagagtcttttgttcttctacgagaaaatattgagtaaggcggcattggaacgtttaaccggaataaatcaaaagcaacttagtcattacgcttgtggacgttctaagccacggccggctcaggctcaaaaaatagtgaatgccctgcatacattggggcgggatttattggctatctctgtctaagttatccaactgaagtgtaccccaaaagttttatgtctaacttttggggtgcacttcactttttggacagccctttggttgtaggttgtaagctaaaatacatcttcgtgtgtttcaattaatgcatttgcttcttggatgtcatgaggagtgtagatatctgttatgagaatattagaatgacgtgcttggtctcgcacgcttaacttatcaatatttctatcgcgtaataaacttgttattcctgaatctttcaaactgtaaaatttatatgagtctggaaaatgaagttttttcctgatttcccggatccaatagtctctaaattttttttcattcacatattcgaatccgggcataaaatcagttgaaaatagataggagtcacttgggttattaaaaatatttagatcaaccattagaagtaaaaccttcttaggaagggttacgactccagcttccctgtttttggcaatgtctgccggaacaaaaatggtccgattctttatagaaatgtgttctaattttatttttgccatttctttaggtcgaataaagcaataatacaatatataacaagctagtagataatatttattttgtgttttaagataatcacttaggcggattagatcatttttctcgattatagtacgctttttcttgtgtgcttttttacctagtaccgggattccttctgtcggtttgacattaacatactgttgttgtagcaagaaggttgagaactgtcgtaaccatgataaataattatcacgagtttgggctgtattctctctgtcgatataaatatgatctaaaaaagcaacaacataagcagaattcaactgataaatatatgtgataggtatatctcgttgctcgttatattggcgtagatttcgtaaaaatgaagagtaggcaacaaatgtctcttctctgaacacatcatctttatataatttggtgatgtatcgtttgtagtgttcgcatacctcttcaaatttgttataagatttgccgtactcggcttcaatccaaggattccagccttgagataattgttcgtttagtctcttaagaagatcttgagcgtattttcgttttgcgcatacccctccatgcacgtgattaatttttatccgtttccgatgaagtttccctagtgctggatcaaaagccatgaacccgatataccattcttttcccgtgtaaagttgtgggggtgtgtaggaaacgatctcgtcaattcgtgttttttcgtgatttgtcattttttttttgcttactcacatctgttgtgactatgcaaagatatatatgtaccaatacttgtcccgtttttgtcccggtataaaaatggggaagcggtctaataaattgtttttcaatttactaaaccgctttctgtcgggatgacaggatttgaacctgcgacaacacgccccccagggcttaaaagaagagtcgtttttattcgtattta

SEQ ID NO: 10727 - DNA, 29158 bp, Unknown
  gut microbiota DNA sequence
gaacagagaagttaagcccgtcagcgccgatggtactgcccccgggtgggagagtaggtcgatgccgaatttagagagaggggcgagtcaatgtgactcgccctttttattttctctcgtttttcaattcttcattttcaattctcaattgttttacctaccttagcgttctgaatcaatttatgtggaaatggcattattcggtctatttaataaaaagaaaaaggaaagccttgataaaggtttagagaagacgaaagaaagtgtattcaaaaaactctcccgggcaattgttggtaaatctaaggttgacgacgaggttctggataacttggaagaagtattgatttcttcggacgtgggagttgatacaactcttcgtatcattgaacgaatcgaagaaagagtacaacgggataaatatgtgggtacggatgaattaaaccgggtactgaaagaagagattgttgacttgttgaaagagaataattcaacggattacgatgctttgagtttaccggaaggacatggaccttatgtaatcatggtagttggggtgaatggagtgggtaagacaacgactattggtaaattggctcacaaattcaaagatgctggaaaatctgttgttttaggggctgctgatacctttagagctgctgcagtagatcagttggtgatttgggccgagcgagtaggagtaccgattgtaaaacaaggaatgggtgctgatcctgcctctgtggcttttgatacgctgagtaaagcgaaagctgagaatgctgatgtggtgcttattgacacggcgggacgtttacacaataagataaacttgatgaacgaattgacgaaaatcaagaaggtcatgcaaaaagtgattccggatgccccacatgaaattttgttagtacttgacggttctaccgggcagaatgcttacgaacaggcgaaacaattcactttggctacggaagtaaatgctttggcgattacaaaactggacggaacggcaaaaggtggtgttgttattggtatttccgatcaattcaagatacctgtgaaatacattggtatcggtgaaaaaatagatgatttacaagtattcaatcgtgaagagtttgtagactctttatttaattaatagaacataatttttgagagcggttattatggcagacaaggtcatgataaccgttttttaatgtttagctatgaagaagagaattttatttatttgtttgggtaatatatgccgctccccaagtgccgaggctattatgaaatattacgtgaaagagcggggattggaagggcaatactatattgattcagccggaattagtggttatcattccggagatccagcagatcgtcggatgcagagtcatgcgataagaagaggatatgatctgaccagtttatcccggaaattttatccggatgcagatttttctgattttgatatgattattggtatggatgaccagaatatccgtgatctgcaaagaatggcaacttctgcggaagaaaagaataaaatattcaagataactgatttctgccagcgtttttcctaccgggatagtgttccagatccttattatggtggggattccggattcgaattagtgttggacttactggaagatgctgttgaaggtctgttggatcagttggaaaataaataaagctcataggaaaataccttatgagctttattagaaagttttgactgtttatttcaggctagctaaacattcatgtacattgttctcgatgcgggcaagaatattcgtgctgtcggctttttcaaatttcgttcctgtgatatgttcgtataattcaatataacgatttgtgatgttggctaccacttccggagtcatttccggaacagtttgaccttcttttccttggaaaccattttccattaaccattcacgaacgaattctttggatagttgacgttgtctttctccttttgctaggcgttcttcgtaaccgtcggcatagaaataacgggaagaatccggggtatggatttcgtcgatcaaatagatctttccatcttttttaccgaattcgtatttcgtgtccacgagaattaatcccattttggctgcaatctctgttcctctttggaaaagggcaagagtgtatttttcgatggcctcataatcttctttactaaccaatccggacgagataatttcttctttagagatattttcatcgtgtccttccatagctttggtggtcggagttacaagaggtgtcgggaatttctggttttcaaccattccttctggtaaaggtaaaccgcaaagggttctcttgcctgctttatattctctccatgcacttccggccaagtaaccgcgaataaccatttctactttgaatggttcacatttgtgaccaactgtcaccatcggatcaggtgttgctattttccagttcggaacgatgtctgacgttgcgtccagaaatttagcggcaatttgattcaatatttgtcctttgtaaggtattcctttcgggagtactacgtcgaaagcggaaattctgtcggataccaacataacgaggtattcgtcattgatgttatacacgtcgcgtactttaccgacgtattcatctttctgtcccgggaatttgaaatttgtttttacaatcgcttccatgttatttgctttaaagatccgttatttagttttttcttcgttgttgtaagcgttgacaatctcttttaccagcctgtggcgaacgatgtcactattgtcgaattcgacgaatgcaatcccctttatatggtgcagtaatttgaaggcatgaattaatcctgaatcactttgttttgggaggtctatttggctcatatctccagtgatcacaaatttagcgttgacacccatacgggttaagaacatctttaactgattttttgttgtgttttgagcttcatcgagaatcacaaatgcatcattcagtgtacgtcccctcatgtatgctaaaggggcaatctgaatgatttccgtttcgagatattcgcttaattttttcgagggaatcatgtcagaaagtgcatcatacaggggttgcaaatagggatcaactttctctttcatgtccccgggcaggaatccaaggctttcacctgcctctactgccggacggctgagaatgatccgtttgacctctttgttgcgtaatgcttttaccgcaagagcgattgccgtgtaggttttaccggagccggccgggcctgaggcaaaaagcaggtcgtttgttttggccagatcaacgagtttacgttgatttgttgttctggcccgtataattttcccgttattcccgaaaacaataattgaggctgggtcctcggggtcttccacgatctcgtcttccagaataattctcttcaggttggcgatcgtgagcatattatatttattataatgttccaaaagggcattgattttggcaacaaggacatcaatgtcgctttcttctccctgaataatgatttcatcgcccctggcggtgatcttcaattttgggaaaaattcttttaaagtaatgaattttgcattgttaatgccgtaaaagtcaataggatcaatgtttccaatacttattcttctctctatcatgaaacttaaaataaaagccttatttttgcaggtgcaaagtagggaaaacaattgaaaattgaaagttggaaattgaaaatttttcacgagagtagagtttgttatggagaaagattttacaaaacaggaagaagcttttgcagagctattgaatataatggaaactttgagggaaaagtgtccttgggatcataaacagacgatggagtctttgcggacgttatccgtggaggaggtttatgagctgggagatgcgattctgaaaaatgatatgcaggaggtgaaaaaggagttgggggatttgcttatgcatatcgtgttttatgccttgatcgggaaggaacaggagcaatttgacatgacggatgttttgaacgagatctgtgccaagttgcgctatcgtcatccgcatatttatggggaggtgaaggtcgaagatgagaatgacgtgttacgtaactgggaacaattgaagttgaaagagaagggacgtcataataaagttttggaaggagtgccggatgctcttccggctttagtgaaagcataccgaattcaagataaggtgaggggagttgggttcgactggaaacaaaaagaggacgtatggcaaaaggtgcgggaggagttgggtgaattggaagtcgaggttgcccggaaggatcaggtgcgtatggaagaagaattcggtgatttcatgtttgccatgattaatgcggcgagactatacggtataaatccggaagatgctttggagaaatccaacaagaaatttattcgtcgtttttcatacgtggaaaagaaagctcacgaaacagatcgtaacctttcggatatgaccttggaggaaatggacgagtattggaacgaggcaaaagcgatagaaaaagcttagaatgaaaagagcgaattaatttacgatttatgattgaaaaagtatggatttcgtgggaagaaatctaaaatctaaaatttaaaattagcaaggtggatttaacaggtaaatggaaatataaagaggattatggctatggggtagccgagggtgagttgttcttgaaacaagaggggaatgatttgtccgggcggattatttttacggataagcttgaaggagaggaaggatatatgttacaggaatttttagtgggaaggcttgaagaacataaggtaaaattggatgccgaagagtttgatattatccattccgaacacgagatcgagtacgagttggatagttggtttggtatcttggttgatgccgatacgattgttggggtgagtaaggatggacagggaatcgagggaaaattcacattcacgagagaaaagaattaagtataaaaaaatagataaatttgaaaagctgacaaaagtcagcttttttttgtctcggatcggttatattgcagaagaatctaataacctaactaataaaacaataacttatgtcgaagattaattcgcatccgattctggatgttccgaaacgagataaagtggtattcacttttaacggtaagaaaatcgaaggagaaaaaggttttaccattgcggcagccttgcatcaggccgggtaccccgtgcatagtcacagtctggatggccggggacgttctctagcctgtggcatcgggaaatgtggggcttgtgagatgttggtggatggtaaagtccggcgtatttgcgtgacaaaagtggatggagtgaaagaggtacgggagttcgcccagggggaaatggccgaacaacatgccgaacaccggattgatactaggaaagtacttcgtaccacggtggtgatcgtgggggccggacctgccggattagccgtacgggaagaatttgaaaaatatggaatagataatatcgtgattgataataacgataagattggcggtcagtttaatatgcagacccaccagttcttctttttcgagaaagaaaagcgtttcgggggtatgcgtggatttgatattgccaaaacattagcgggggagaatatggaaggcatttacttgaattctacggtttgggatattttggaggggaaacgagtggctgtgaaaaacttggaaacggataccgtgtttttcgtggatgcagactatctggttgtggccacgggggccgtaccgtttatgccggcttttgaaaacgatgatttgcccggggtgtacacggcggctgttgttcagaaaatgatgaataacgaacttacgctgttgggaaagaatatactgaccgtgggagccggaaatatcggttatctgacttcttaccagttgatgcaagcaggggcccgcgtgaaggcgattattgaggggatgcccaaagaaggtggtttccccgtgcaagcaaatcgggtgcgccgtttggccataccaatcatgacgtctcacgtgctgttgaaagcgatcccgaatgctaatcacacgggaatcacgggggctgttattgccgaatgtgagaatttcaaaccgattccgggtacggaaagaatattgaatggtatagatgtcataaatatatgtacggggttgataccggacaatcaattgttgatgaaaggaaaggccgtctttggtgaacattgctatgctgcgggagatgccgtgagaattggagaagggacgagtgccgtgttgcgagggaaacagactgctattgagatattgatggacttgggggctagggtgagttatgatgattatctggtagtctctaaagagtatatcgattctcaacaacatccggttcggattctggaaactccctgtttgccggagacggaacgtatgcacaaacggggattcgtgcaaatggattgtttgtatggttttgcgtgtaatccttgttcttttgcttgtcctcatggggcaataactaaaagttcgacttctaccgtgcctcacgtggattacgataaatgtatcgggtgcatggagtgcgtctatcaatgtccgggattggccattttcggttattatttgcggaaagataacttgttcctgccgatagaatacgaggtaaaggagaaagaggtagtttacctggtgaataattatggtgaaaggttgggagagggaattatcgagaaagttctacataagccgaataaaacgaatattgcccgggtgaaagctttggatgttcacggggaagatttggtgaaggtaagaggtttcgtggtgaaggagaattacccgcaaccgctggatttggaaccgttgttgaaggatcaaccgggagccacgtttatttgccattgtgatgatgttactttggacgatgttttgaaagtcgtgggtgatcgtacctttatttcgatagacgagataaagcataccactcgcttgggaatgggaccttgccgggggaaacgttgtattcctcggttgaaaacagctttacgggcgaaagggatcgagatcgtgggtgacgctacaccgagagcgcccctgtctaaccagttgaatctaggtgaattgtatccgccaaaacgaggtgacgagcatcgtgtggctaatcgatcggatttcaagaagatcgaggtcggggcgttgattgccggaggcggtattgccggaagtgcattattccgctatatggcagattccggtttgaatcccgtgctggtgaatgcggatagaggttcttcttggagaaacatcggaggagggcgtacggcattctctttaccggagctggccgagattgcggagcataatcatgcaatatttaaagaattacagaaaatgtcgaatatcgactacaagacgacccgatatattaatctggctcatgatgaagccactttcaatgccttggatgcgagtcgtgcatggtcggacgcctatatggttgacccgaagaatttccagaaagagatttctccttatttcagcacgaaatctaaacgttatctaggagctttgattaccaatgactgttggcaggcgacacccggtaaagtggttgatttaatccgtaacatgggtatttcatccggagggcggatcgtggaagattgcaaggtgttggaggtgatgaaagagggatcaacatattgtatcttggtattaactcatgataagaagtacgtggaattccgtacggagatattcgtgaatgccttgggagccggtgccggaaagatatgcgagggattgggaattcatgcgggattatacccggtacgccatcaggcatttattactcgtcgtctgcctatgttgggaaagaacggagatagtttggatatgctgatcgataggcaggaatataaaggattctccgctgtctacgggcaacagttagttcacacgggacagattatcggttgtgcttctccgcgggtggatgcgttgcggacagataaaaatctgatcttgaacacgaaggagttcatggaaattatcagtgaattcttcgtggattggatgcccgaattggctggtgtcagtatacaggccacgtggtccggatattacacggaacctcgctatatcgttgatcccgaattaggcctgtttgtcggcatgcggggacatgggttcatgttatctcaatacttggctaagatgtatgttgataaattgatgggacggcctgttccggagtattttgatcgcttgaaattgaacggatcgggattatcggaaaaagcctttaagtgatttagagattttaaatttacgattctagattgccccccacaacttcctgtgctttcaggtagattgtgggtggtaatttaaaatctaaaatcattaaatctaaaattattcctatctttgtgccaaaattacagaatatgataaagttaggagaatacaacatattgaaagtcgttaagatcgtggattttggtgtttatttggatggaggggagtattggggtgagattttgctaccaaaagaaacggctccggctgagtgtaaggaaggtgatgaattaaaagttttcatttattttgattcggaagaccgggtgattgccacgatgacaacacctaaagccattgtaggtgattttgccttaatgaaggtggtgggtacgagtcgagtgggggcttttttggactggggattgcgtaaggatttgctggttccttttcgggaacagcgggaagagatggttgtggggcgtgaatatctggtttatgtttacgtggataaaacgacggatcgtattgttgcttccactagattgagtcgttttctagacaaaactccggcggattatgaaccgggacaggaagtcgagttaatcgttgctcgtcgtacagatttagggtataatgttattgtcaataatagccatgaggccattatttatcgtaacgagatattccaacctataactatcgggcagcacttgactggttatgttaaaacaattcgggaagacgggaaaattgattgtattctgcaaaaaaatgatggtcatgaacaaattgatcgtctggcagccttgatactgaaaaagctggaagagaatggaggagctttgcctgtatcggataagagtgatccggacgaaatataccgtcttttcggttgcagcaaaaagaactacaaaaagacggttggcggtttattcaaacagcataaggttattatcggggaaaaggagctgaaattgaaaaaatgaactgaagactacctcccctaatccctctttacacgggaggggaaaacggacggcaaggatacattcccgtgttttaatgcagcgtatcctccccctgtgtaagggggagttagagggggtagttgaaaagttaaaatagaataaggaatctctaagtttaattggcaaatgtctaaagttcgggcatatatcacgagttttcggttaagaacattacctttatccttatcgggtgtattgctaggctctttattagcggcaagtgatgggtattttaaaacgacaacctttgtgtgggccatgctcaccacggttgccttacaaatattgtctaatctggcgaatgaggtgggggatttaaccaagggaacggataatgaacatcgtttagggcctatccggagcgcccaaagtggagctttgagtatgcgggaaatggtacaggccatgattgttttcggggtaatagcgatcatcactggaagtttgttaatctatgaggcatttcgggatttgttgaattggaaaagtatcgctttgtttattgccggaggtgcgtctattgtggccgccgtgaaatacacggtcgggaagagtgcttatggttaccggggactgggtgatcttttcgtgtttatctttttcggggtagtgagcgtgatgggaagttattttgccatgtctggtgtcttgccttggatatgcgtgttgccggctgcggccatcggtttcctctcttccggtgttttgaatatgaataatatccgcgacatcgagaatgattccgtttgtggtaaacgtactatcccagttatcttgggaatacagggagcaaagatatatcatttcgtgatcacgctattagctgtgatttgtttagtattgtactccatgttgcactcagccggatggacggggtatctctttttgttaacgctaccgttgttggtaatgcatctgaagtcagtctatcggggagaaggaagagctttggattctcagttgaaatttctttcgataacgacattgctgatagcgcttttattaggttttggtcaattactaagttgttagattatgatattaaaaaaggtctgtaaatatttgcagacctttttaatactagtattttccttttagaaaggaagatcgtcggcttccggcatgggaggaatgtcctccactttgtattccggtaccggggctcccatcatcggggtttctgcttgaactttctcaattctccaaccttcgaggttcgtgaaataagatacttgtccgttgttctcccatttgcgtccacgcaaattgaaatacactttaatattctcgttcaattgaatagtctctaaaagatcacaccggtcttggatcaattgaacttttacgaagtcgttccactgtggatttttctcgttttcaacttctatcacgaattctctcttctggaaacgatcactgattttttgtgtagcttctttgtaaattaattttccggtaacttcgtaattcatggtttttctgattagaaacaagcccaagagaccttgggcttgctagctgtttaaatatcaaatgataaattatttttgagcgttcgggtcaacgatgtcaattaattcaacttcgaaaatcaacgtttcgttcggtccgatagcacctctggctccttgaggtccgtatgctaagtttgacgggatgtaaagagtccatttagaaccaacaggcattaattgtaatgcttccgtccaacctttgatcacgcggtttacagggaattcggtaggctcacctctcttgtatgaagagtcaaactcggttccgtcaatcaaagttcctttgtagtgaactctaacaacactagtgtctgccgggatagctccggttccttctttttcaattttgtattgaagtccgctttcggtagttttgataccatctttcttggcgtttgctgccaagaactcttctccggctttcaatgctttttcagctttagccatcatggctttttgagtgtatttctgtaaaaacatattcatttgcatcatgtcggcaggagcgtcttttttctgtaatgcgctgttcattccggcgataatagcgtccatattgatctcttcaataccgttaccggtgatattagaaccgtacatgtaaccgatatagaaactggcagtatcagcttcgtttttcagagatacattcgtttttgtagaagtgttgcagcagctagataaaccgattgcagcaacagataaacctaaaattagattttttgcgttcatagtttttcgtaaattaaattatactatatctaataattcgatatcaaaaatcaaggtctcattcggtccgatagcctgtcctgcaccgtgagggccgtaagctagatctgaaggaatatataattgccatttagaacctacgggcattaattgaagggcttcaacccaaccggcaataactccgtttaccggaaattcagcgggttcgccacgacggatggaagagtcgaacacggcaccattgatcaagcgtccttcatagtggcattttacagtatcgctacttttcggaatagccccgtttccggtggatattactttatattgtaatccacttttcaaggtaactacgccttctttgctcttgttatcctttaagaattgttctccggcttccttggcagccttgcctctttcgttttgcagtttgttaaaatagtcctgcaaaatctggtttgcctcttccggtttgatttccggcatttggcctgcgtagactgttctgatagcgtcaacaaaagcttctgtattaatggtattcacacctgaagaaaggagattacttgcaatacttagaccgaaacaataactcactttgtctaactcttctgtatatttcattgaaaggtttaattaataaataaatattttgttcattaagatgcaaatgtaagaacattgtgcgaaaacacaaacaggttttcgtgttttattcgcgatacgagaaaatcgtaccgaaaggttcattttattcattcattagcattccgtcatttaattttatttgtctgtctgacatacgggctagctccgtgtcatgcgtgacgattacaaatgtttgtccgagttcttcccgtaaagtgaaaaataactggtgtaattcatttttggtacgggtatctaggtttccggaaggttcatcggctaaaacaactcgaggatgattaacgagagcccttgccacggaaattcgttgttgttccccaccggatagttgattgggtttgtggctcatccggtctgccagaccaagaagagtcagtagttccatagcccgtagctctgcttctttttttccagttcccttgatccatgccgggatacaaacattttccaacgctgtgaattctggtaataagtgatggaattggaatacaaacccgatattgttatttcggaattctgatagtttattggaggataaccgggcgatattcacggaatcatacaatagttccccctcgtccggggtatcgagtgttcccagaatatgcaataacgtacttttcccggcaccactagccccgacgatcgttacgatctctttttcttttatcgtgagatcaattcctttcagcacttttagttcgccgtagcttttgactatatttttaatttctatcacctgattaatttcttgatttatgatttagtgattcttatctactaactcatatttattattttgatggtaaagataataattttcaatttcgagtaatcctgttgattatttttatttttaatgttagctgtatatatgcttgttggcacaataaaattatgccgttataataaatccaaggcaagaaggtgattttaaattgatgataaaagattttcttttgcactggggttatgttggaaaataagaccgacggtcgggcaatgatccatttctttacaatcgccacaggtgttgaatccttttgcttgaacacatttccggatttcacaataattgctgcaataggcgaatttagaaccatcgacacggcaacccgtgcaattaatagtttccggtgtgatctccgacgtgttgttcatgacgctccatttttgagcggtttcttctcttaacttgtcatcgttattgatcgtggcgatacgggcatcgcagttttcgcaatctaatccacaacaggcgattaattgtttcataataggtgtatttaatttaagctttagacaaagataagaaatattagattgctacctaggattacttcatgagatttgattaatttatttactgaatggagatagcgattaaataaagagtgtgtatcttagcaatctaaaatcaattacgtatggaatattatatagatccggtcaccttcgtgacgcaaaagagtggttttgagagtagatatattaaaaatttattagggttattggatgaaggggccacgattcctttcatttcccgttatcgtaaagagatgaccgggagtatggacgaggtgcaggtgggacaggtgcgagagatttacgagcagttcaaggaactggaaaaacggaaaaagacggtgttggagagcatcgagcagcaggagaaactgaccccggaattacggaaacagatagagcattgtaccgatttacgagaactggaagatatttacctaccttataaaccgaagaaacaaacacgggcatcaaaggcaaaagcgaagggattggaacctttggcagccatgttgatgaaacaggataacggggatgtgtgggacaaagcggcccgtttcgtgaagaatgacgtggagaatgaagaagaggctttgcagggtgctagggatattattgctgagtgggtcagcgagaatgaccgggcgagaaacaccgtgcgtcgctcttttgaccggatggccgtggtaaaagcgaaagtcgtgaaggggaaagaggaagaaggggagaagttcacggattatttcgattattccgagcctttgcggaggattccttcccaccggatgttagccattcgtcggggggaggctgaaggtattctgaaagtggcgattgaaatcccggaagaggaaacgatcgagtctttggaaagaatattcgtgaaaggtcataacgagagtgccgagcaggtgaccatggcggtgaaagacgggtataaacgtttgttgctttcgtctatcgagaccgaatacctgcaaagcggtaagcagaaagcggatgaagaagcgattaaggtgtttgccgaaaatctgcgtcaattacttttggcaccacctcttgggaataggcgggtgttgggtatagatccgggattccgcacgggatgtaaggttgtttgtctggatgaaacgggaaatctggtgcataatgaaaccatttatcctcatccgccacaaaacgaggtgaaacaagcggctaataagattaccaatctggtcaactcgtaccggatcgaggcgattgctatcggtaacggtacggcaggacgtgaaaccgaacgatttatccagagtttacgttatgaccgggatatacaagtgtttgtcgtgagtgaaagcggggcatcgatttattcggcctctaagatagctcgggacgagttcccgcagtatgatgtaacggttcgcggagccgtgtcgatagggcgtcggctgatggacccgttggccgagttggttaagattgacccgaagtctatcggggtagggcaataccagcatgatgtcgatcaatccaaattgaaagagagtttggatcgggtggtcgagtcatgtgtgaaccgggttggggtgaacgtgaacacggcaagcaagtacttgttgacttacgtctccggattggggccgactttggcagaaaatgtggttacttatatcaaggagaacggggcattccgtagtcgcggcgaattgaaaaaagtgaaacgtatgggagagaaggcattcgaacagtgtgccgggttcctccggatcgagggtgccgaaaatcccttggataattcatccgtgcatccggaatcatacgcagtggcagaacggatggcagaagacttgggcattccgttgaagttgttgataggtaacgaggaagcttgtaacaagattgaactatcccgttatgtgaatgaccggattgggctacccacgttgaaagacatcgtggatgaactcaagaaaccggggcgtgatccccgttccgtggctaaagtattcagtttcgctgacaacattcatacgatcgacgatttggagatcgggatggttgttccgggtatcgtgactaatctgacgaacttcggagccttcgtggatattggcgtgaaacaggacggactggtgcacatatccgagatcgctgataaatatatttcgaacccggcggatgtactttctttgaatcagcatgtttcagtgaaaatcgtgcaggttgataaggctcggaaacgtatcgggctttcgatcaagcaagcgtgatattcgaacttttatccgggccttgggtacagaaccggacgaaaatgatttggataggggaaagtcaagtgttttttcccctattttatagtatctaccggattcattcgggaggctttaaacgcctgccaggcaacggtcagcgtgccaataaagactgccgctataccgataaagataaatgataccggagaaatctcgtttttataaacgaattgcgtgagccactgtgccgagcagtaataggcaatcggcgccccgatacaaaaagcgatcagaatccatttgataaaccgggcgcacagtaacacggcgatctggttttcactggccccgttaattttacggaggctgatctctttccgcctgttttctacggagaaccatgccaacccgaataatcctaagccggctagcaaaatgctgatataggaaaatattgaaagaattttcatgacttgtaactcttcttcgtgaaactccatgtagcgttcagacagactacaagtttttatttcgattgctccgggagcaacttgttcccaaagtgcattaatcttttcttcaactatttttcgggtaccgggttgaatacggataatatgacgctcggatccggtatcactgaatcgaataaataatggagtgatctctcgggtgagtttatctcttggataatcggcaacgaccccgatgatcgtgtaggtttcatcccctagttggaatgttttacctaaaggctctgttatcccttgtttttttagaaaagtctcgttcacgatagcttcatgtaatcccagtttccccggggagaaaagtcttccttccaaaagttgtatatcataaaaatcaaagaacgagagatcggcatccgtacaagccacgtgcatattatctaatccgtaagtgcaattttgagtgatagcactcattgttcggtgtgtgatctccgggatggaaacgagttgatcatagaaagctttcgttgtttcatcttctaccgtgtaaagcccccatcctaatatcaaaatttcattggcgtgtggacggcaatgtgtcgcaaagtccatctggtggtgaatgtttaccacggttgtcgtcaggatgatagatatggtaaactgggtaattacaatattgcgaatgagaatagttttttgtttgttttcattttttagaatctcggatagagaatttttgttgatttttaggatcacgtataaaggaggtatgataataattgtaccgagtaaaagaatcagcaccagcggggtgtatccggcatacaaatccgatagacttaggtcggaagtaatgaatgtattgaaataaggaataagtacatggataataccgatggacacgataaaggaaaacatgacgagtaatccggtttccatgattaactgtttacgtattccttgttttgattctcctgaaataagttgaattccggttgtttttaattgttgtatggtgcgggtcaggcaaatgttgatgtggttgaaacaagcgatgataaatatgagtatggcaacccccatgcctaaataaacgaaagaaggatcacgtttaaagattaatccgtcctcgtataaatgttttgcttttgaaaaatagagttgttcgacaggttttagatagattgttctatccttgaatacttcttcgttccgatcatttatttttgttaggaaatttggagctgtaactttagacgaaagttcgataaaaatgtaaaaagcgaatccggtgacttgtgatatttcttcgtccggtaatcctcgcaatatcccaaaatggagaaaattcttttgtgaatcgtcaataacagttgtgatcgtgcaaggttcgaatatctttttgtagatatttttctccccgtcaaaatgaacaatatagcgccctagcgtgagagatttcccgatcgggttagcgattccgaattgttggcgggcaaaagaccgggtaacggcaatctcattgggggatgagagcgttttgcgtaaatctcccgataaaaggagaagtttaaaaaaatctgtaaagttgggtgtaacagaatatgcgtccatgtagtccggttcttccgctttttcactgaaaagaagatgttcattccggaatacacaataggctttcacttctggataaatgtttttcagttgaactccgctttccccggaaatgaaagcatcattgggatggacgtcttgtttcctttgctcctgaacaagataacagtttttactattcaagatagaatgagcgatattatactcgtgtatcacgaaagtaacgagcagcgtgcaacacgtgatccccgtgatcaagctgatgagagaaatcaaggtgtaggttttatttttaatccaacctcgaaatatgattttgaattgaacgttttgcatggctattcggttttaagagtgtctatcgggttttttcgtgatgcttgccggatttgccagttggtcacgagcagaacaatacaaagggatataacgatggtaagtacgaatatccaaggttgtatttcaattctgtaagcgtaattttccagccatttccgggaggcgtagtacgctatcggcagaccgatcacgcaggccacgagaacttttgtcatgaattgtcggttaaacagtaacatgatttgtcgctccgatgccccatttacttttcgaagggcgatctccctcgttttgctttccaccatgaatatggcaaaagcgaatatccccataccaccgattagaatggcgatcagtgaaaacaggatcacgagttccataaaggccatgtctttttggtataggtctgagtaattatattcttgatattcaaaaataccttccgggtttcgggatcgatgcagttcttgcaggtattccagtacctcttgtcgttttcctggctggtaacgaatcaataaccagtaagtcgagggcggtagaatcatcgtggggcgtatcgggtaatggagtgattgcgtgtgataatcttccgtaatccctgtaatacggtagtgaacagaacgttgctggtttaggatcgttcctagtgggtgatccagtttaaacgtttccacgaattttttatttacccacacgtcagttgtcgatgagtaattattttcaggtgtgggattaaattcaatgggagtaaactcttgatttttaataatcggtatgttataaatatttgtgaaatcttcatcaccgtacatacatacgacatcgacatatttttccgattccgatgggaaatggattctttctgttaatggtgtgccagggtctgggatattgattccattacatacatacaaaatatcagggtgttttagtaattcttcttttagtgcttgataattggaagaattatcaagccaactgatgcgtaacacctgatctgttatgattcctagcggtttatctttgatgaaatgaatctgtgatataataatcgaacaataaaagagtaatgtcgtgaaaataccgatttgtaagatggtcaggatttgtgaaagatttatctgtcgggggctcggttgaagtatatttttcacacccaatcgatttattcgttgtttgaaatgaaaatagaggaaataacaaatactccccatgatacagcaggtaaacacgacaaacaataaattggaaaaactaaaaaacaggaatgggtacacgtgatccggtgataaaacttgaataatgtaagggtgtaacaagctggttaggatgaacgcaagcacaagagtaactcccgtcagtaatccgatctcgctaatcagttgataaagtagatgtgtattactcgccccgtagcacttgtgaatggcaaaacgagaagaatcccggttttgttgggctatccggattaacaggaagttcccggccgcaaggagtaatattaaaagagtgattccccacaacagataagtcagggatagggagccacgcagcaattcgtcttgttcgatatggtccgagtgaaaataagtatctttcaatggttgaagtctgtacgaacaatgagttgccgtttccgttctttgtagggtaatttcctgtaaagctttttccactctttctagatcggttctcggagaaagtcggaaataagtatatactgaacgagaatagcgttcattactgaaatatgggtgccctagacggcaatcgataaaaatatcggtttggagagtagagtttgccggaaaatcttttatgattgcaattacttgacatttaacctctttcttcctgttatagatgggatctttgatcgttattgttttcccgatcgggttttccttatcgaaaaatcgtttggcacttgtctctgtgagtacaatccacgaaaaatcggaggaatcgatattaccttgaatgacgggtcgctcaaataaatcaaaaaaagaaaggtcaacaagagcgcatcgagattcgatcataaaatcagtattgtcatctgtttttatttgatagtcttttaagaaaaaacgggcaatccggtctatttccggtaatgcttgttgtgcgtctaatccgaaaaatgaattattcctacaattccaatttggttcattgaagtttcgattaatcacccggtaaatatgatcaccatttttcaagtatccgtccatattccattcgtttgacgtgtgactgtatatcaaccaagcggcagaaaaggcaatggacaacccgacaatattgatcaccgtgtaaaccctgttgcgggaaagtttgcgtattatgaatttaaaatattgctgaaacatggctattcggttttaagagtgtctattggattttgacgggcggcctttctggtctgccaagttgtgatggcgaggactacaaagacggaagtgaggaaaacaaatatgaataatcccgcatggatttctactttgtaagcgaatccttttaaccattctttcgaggcatagtaagcaacgggcagacctataaaacaggcgagaagaactcttgcgaagaattgttgattaaagagttgaatgatctgccattcggtagctccgtttactttacgtagggcgacttcccgagttttactttcaaccatgaaagtagagaatgcgaaaatacccatgccaccaatgaggatagttatgagggcgaacaagatgatgagttttacaacggcaatatctttgccatataattctgaaaaattatattcttcacatttaaaaacggtattggggaatttctcttggaacattgtccggatgtaacgatatacgttttggaattctcccgtttggtagtgaacgatcatcgtggaggatatttgagggaattcgtacatgatgattgcaggttccgtgtatttgtatagtgggaaatactggaaatcgtccacgacccccactattttgagagggtactcatgatcccataagttgagaatggtttccaacgggtgttctagttgaagagctttcacgagagactggttaacgatagcttctcggatatgattgggacggattcttgcaaattctttcagatcaataggatagttatacttttttaggcatcggccttcttgaagttgaatttggtatgtatcgatatagtcagcatcgccgagaatgatacgagctttaatggttttctccggttggttaggtattgagatcgactcggctctttcgtagcatgggagggggtacccattactggcgttgagtatggcagggtaatgttgcagtttttgttttagggtttcgtatcgaaattcattgtccggccagtaaaaatataagatattttcctgattgaatcccaaatccatgtgttgcatgtagttcatttgccttgatactgcggtggcacagaaaaggagggcgctgaaaattgtaatttgtacaattgtgagtattttttttatatccttatacctgggagcaggttggatggcctgtttgagtccgttatggtttaatcttctatgagtgtataagtgtaatacaaatccggttaagaacatggcgaagaatacaagtaagaggaatcccgcaaatttttgaaaggataggtggaacctatacgggtgttcgggagagagaatttctatgatgtacgggtgcaacacgtaagcgagtgcgaaagataaaagtaaggcacatagagtgtgaataccaatttccagcgataactggagtcgtattgtccggttgtcagccccgaaacatttttgtatgcccattcgggtaatatttttatttatttgggccgttttgatcatgatgtagttgcctagtgccaaaaataggatcagtaaaataattccatagagaaggagagacaaggatatttggcctcgtaaaatggcctcgggatgaaggtggtttgaatgaaaatagatgtctgttaggggttgtaattggcatctgtattcattggctttcaagtaagagttgtttttttcgatcatttgaggtatcattcgttcgatgacggagatgtctgccgttgatgcaagttgaagataggtataggaggaacaacatccccaatagagtatatccctattttttgagatgactcgactgtcaataaaaatgtcggattggatggaagaatttgccggtaaatcttcgatcacagctacaatccgggctacacatccgtggtctttttcggaatccaagtctttgatgaatacagttttatcgataggattttgatcaccgaagtgctgttttgcgtagttttgggtgacgatgatccaatttaatacagtgctgtcgattttcccttgtataattgggaaatcaaacatttggaagaaattttcatctataaaaagacttttgggaatggggatatactcttccgtctcgttgttttttattccgtaagagttactgggcatgattctggtgtaattgacaatgccggggatttcctgtttggcataaggaccgattaggtaggccgtgagactttcccactccttggattctaggtattggttagtaatccggtagatgtttcctgcattggaatgaaacttgtccattgtccattccgtgatcacgtgattcgagatcaataacgtgatggagaaggctatggccaaccccacgatattgatgacggtgtatatcttgttctttttccagttacggaggataattttgaaatattgcttgaacatggctattcggttttaagggtatctattgggtttaacgttgcggcataccaagattggcgaatcacggtaataatgcctatcataattacgagcaatatactcgtgataaaaatccacggggataactcagccctgtacacgaattgcgaaatccatgtgttagccaaataccaagcgattggaataccgagaagtgaggcccagattatccatttcacaaaacgtccgcacacgagcagtacgatttgcttttcagttgccccgttgactttccgcaggcaaatttcttttgtccgacattcaaccgagtaccacgctaacccgaacaatcccatgcaagagagtagcatactgatccatgtgaatacggaaacgattcgtgctgtccggaactcttccttgtgtatatccctgtaaatctcggccaaagaggtaaaaaccaacggtgattcatcaggagcgatcgttttccacaagctctgcatccgggcaatcgtggcctcaacctctcccggtcgggttttaatcaccgagcctctggcgtttacccagtcatccgtctcccggatgataattaacggttcgacctcgttcgtgacttgatcaatagcgtaatccttgatgactccgcaaatcacgaagtccatcccgtcatgtgaaaaagattgcccgactgggttttcgatctgtttctttctgatcagcgattcattcaccagcaccttgtggatcgaaacatcggtagcatgacacaaggaatcccctgccacgagttcggcgtgataaaaatgaaaaaagcgttgatccatctttaacgtgttggcattaaattcccggttagcgatggctccattcatgagcgggagggtagaggtgtagtcaacaacttccgatagcgtgatcacttgctctttgaatgtcttccacgaatgttcgttgggtgtatattcgtgttctatggaaataatcgattccgcgtccgggcgaatgtgcgtgatgtattcggtctgcccttttatcgtgaggaaaagggctagcaaaatgatcgaaatcgtgaattggacaacaataattccggcaatcagcgaacgatgaaacgtgtaatttttccttagaatatcggccaatgctacccgttctgctttgtacaggatataaattgacgggaacaagatcacggcgacaagggtataggaaatgatggatagcgtttctccccggaacaaatcggaaaaagtcagccgagaatccataaaggcattaaacttcggtaacaccatgtaaatcaatgctagtgaaataaggaaagcaaagcccacttggagagctgtttcctgaatcacctgccaccggatttcgttccgggaggccccgtgtatcagttgctgaccggaataaagtaaacgttggaacgaacgggtcatgttaatgttcacgtgattaaaacaagcgataatcagaataagtagtgcgatatacaggctggtttgcagttgtttataatcccggtacctgaaaagtcggttctcggaataatctttcgtgtagtacgcctgttcgatggggagcaggaaaagcggagtggcgttttcatccttttcttgcagggcggatagatcacttcccgcttgtacttgcaccacgttatgataccacgaggtgctgaaaggttgtcgggcaatctcttccggggataacccgaaaagtagctcgtaatataggacacttggtgggcgatcgtcaatgacagaggtgatcgtgtagtcttgattgacttgttgttgggagaccccgtaaccctctccgtccttcacgaatacatctttgtaggtttcgagtgtgagtacctctcccaacgggttttccttcccgaacgtgcggagggcaaaactccgggttatcgcgatttccaaaggctgggatagggtttgttttaaattcccgctgatcattttcggttggaaaagcgtgtcgaaaccgggagtgactttatatgcgttatcaatctcctgcttgtgctttccccggtgcatgacgacgaattcttgtcggaaagtgcagaaccctgtcacctgagggtatttctcgtgtagcttttgggcagccccgaccggggtatcgtatgttttcagttccgagttgtggtaaaaattatctttcgtttgcaccacgtaaagttgatcctctccgggcgtggagtgtgccgtgtgctgttcgtgcatggcaaacccgatcagtaatgtgctacacgtgagaccgataaccagactgaatgtcgagatacagggatatatcttatttttaccccaatgccggaataatattttatattgaaacatccgcatggtcattcggttttaagtgaatcaatcgggttgcggcgtgtggcccggcgtatttgccagccggtgatgagaaccaccagtaacaaggaaaccccgatcacgcaaatggtaatccaagggcttatcgtgactttgtacgcgaaaccttgcaaccattgtcggcaaatcaaataggaacagggaatccccacgatacaggcgattgctaactgtcctgcgaaaatgcgatttagataaatcatgatttgtccttccgaggctccgttcaccttgcggagagcgatctctttggtcttgctctcggcgatgaaaacagaaaaggcaagtactcccatacctccgatcaatagggcgatgcctgtgaatatatacacgagatgtcccagcatgatttcccgctcgtatagttcggaatagggatattcttggtaatgcatcagcgtttccgggtgacggctttcgtgtaattgttgcaggtactggatcatctcgcttcgtttcctttctcggtaccggacgatgagggtgaacgacacccccggaaggtcactgccgatcatgacgggttgtatcggttcatagagtgagcggtagtgaaagtcctgcacgatccccacgatttgcattttggcggttccgtcactcagtagcgttccgatcgggtgattcaatcccatttgccgcacgaacttttggttcacgacgatctctacgatgtccacgggtttgcgggaatagattcccggtgtcgtgactttcgttttggcatcccgtccttccacgagttttaactggtaggtacggagaaaatcttcgtcacacaagagcgagtaggatcgtatgcttttttccggttgctctaccagatgaatatcccgatgcgcccagttcccgatcgggagcaaggctccgcaactcacggccaacacgtccgggtgtcgcgacaactcttccttcagagacgtgatctcgtagggattcggccaatcgaaagaaatcgtgttccggttattgtaacccagcggtttattttggagataatcgatttgtcggagaaacacgatggagaaaaaaagcaacccgcagaagattgtcagttgggcaaccatcagaattttcttcaaatccagtgacgagcgagaagaggcaatcgtgtttttcagtccggaagagttgagttttcggctgatatgtccgtaaataattcccccgacgcatccggcaaacaacaggaaaatgagcaggaagacgataacttccgttccgctcaaataaaatgggaaaggatgcttgggcgaaatgatttgtgcgaaatagggataaaaaatagaggtcagcacgaccgtcaaggcgaaggccgtcacggtatatatgcctatttctaacaacacctgcacgaaaatatttcgattactactcccgaaatatttttgtatggcaaaccgttctgcgtttttatccgctagtgccaacttgatgatgaggtaattacaaaatgccagcgacaggatgagcaagagaattccgaacagaatccagttaaagatccccgacccttgggtgaaggagaggtcaaagtcttgtatgtgatccgagtgcaggtacatttcccgtaacggttgcaactgcaatatttccttttgttcccggatataatcagactcccggtattcaatttgaagtaattgctcttcaaccttttggatattcgccccgtcggttaattgaataaacgtctgtacggcgtttcccatgttgtaccgaaatgaaggttctatcacggaaaaatccagaatcacgtcggcttgaatggatgaacggggtggcatatctttcatgaccccggtaatccggaatgtcgaaacacttccacgtgtgtacaggttttccaagtatgccagttttcctatcggattttcatccttgaaataatgccgggcaatactttccgaaatcactacccagccgggttgttcgagggcttgaatactccctgtcacgagcgggaacgtgaacatgctgaacaactgtcggtctgcgtacccgcaggagatcccggtttgatagtgatcgtcattctcccagcgaattttcatctcccgtgccgtgatgatccgggtatagtcagtcacttccggaagttccgctttggcaatctctcccagcgagctgcaaacctctgatccccagtaagcgtatccgtcggtttgaactgtgatccggtaaatgtggtcaacattcttgtggtacgtgtttgtctgccattcttttaccagaaaagtataaataagtacggaggcggtgagagccacggccagcccgatcgtgttgatcacgaaataaccttttcgttgaaaaatctgacgtcctaccagtttgagatgatacatatcgtgttatttttagccgtgttgcaaagtacaaaaaatcacttgaaaataagtcgttcgttatcgccaaacatttcataacctgacgtgatgatcttttcacccggttgaagtccttccgttacttgataataacggggattctgtttgccgatttttatttttcgccggaaagcctctgttccatcgggagacaacacgtatatccattgtccccccgtgctttggtagaaagtacctctgggaatcagtatcgattcgtccgctgcgccgagttgcaggttcaggtgatacgtctgtcccgttcggatattgggagggacggtagtcgtgaattccaagtcggttttaaactgcccgtccttcacgtcggggtacactttgatcacccccatctggtaatccttcccttgtcgttccaacgtggcagtcagtcccttgcgtacccggtcaatataatgttcgtcgatttgtgtcatcaccttgtaatcgttcagcacgttgatctttccgatttggctgccggaactcaccacctggccgatctccacgtttaggtcgctcaactgcccgtcgatcggggcgcacacgttgagtcgggcatagcgttcctgcgtcaatcgcaggttacgccgggcattctccattttttgcttgagcataatgacctgcgagtgacggcgaatggaatcttttgtttgcttctccgtgatcagttcccggttgtggatggcgtactcgtaatcttctttagccaccagatactcttccttggcgatcaagtcctcctcgaaaagttgtttgttttgcaagtattttcgtttcttcctttccacgtcaagttccagcgttaaccgttcctgttgcaggttcaactcttcccgttccaagtccagcaggctattttgcacggaattctcttcctcggcgaaacgatccttgctatttagtatctccgtttccagattcttactttccagccggataatgacctcgcccgccttcaccatttctccctcttccacgagaatctcctttacgtttcctccttcctgcacggttaactgcgagaacgtcaatggttccacgttccccatgatccggatataatcatggaatatcccttgacttacgtcttctattgtgattttctctttgtctacccgtaacgcagattcatgattcccgaatatggcccatccggcaaaccaaagaataaatatgcccccgatgagataagggatatgttttcttctaattcctcttttttgttctattagtcgatccacggtttaattttagatttaatgattttagattgaactcctccgtcagcttcgctgccacctccttcttcccctgcctgaggggaagtaccccgaaggggggatggagtt

SEQ ID NO: 10728 - DNA, 7313 bp, Unknown
  gut microbiota DNA sequence
tccaagcgggctcgaagcacgtcgtactttgcttcgaggaggctgttggaggtcgtgttcagatcgatgatggtgattagtccttgctcgtagcgtttgcgggcagcgttgtaggagagggagctgaaattctctcgctgcacggcaatccggtagcgctgggtgcaggattttaagtcctgtaaggcttgttgtatctcgttatataatgctcgttccgtctgttggtattgtatcttcgacgattgataattgtgtttggctcgttggaggctggaacggcggctcagaccggagtagaagggaatgctcatgccgatgctgaaccctttcccgatctgattacggtccgtaatttgcgagaagaaatcacccgaacgctggtcactataattcccgaatgagatacttccgctaatactgatcgagggatataacccggctcttgccgaatacacgccaagttgtgccgaacggatttggtaagcggccagcttgatttccggtaatgtttggagcgcttgcgtgaaaacctctttggtcttcaactcgtggagttccgggaggacttcggaaactgatcgggcgtcaatccttaactcctcctccgcgttataattcataatgtatttaagattagcttgtgcgttaagacaattattctgagccgtgatcagccggaactccacggaagcttgttgcgcctgcatctcgaaaaggtcgcttttcggctttttccctaactcgtattcccgttcaatctttttgagacgtagccgggagttttccacttgttcctgcgtgatacgaacctcttcttcggcatacaataacgtgaagaaagcattcattacctgtatggcgatttggttggcttggttctcggtttcttcccatcccatgagtcggcttaacttggcggctcgcagacgattgatattactaaacccggcaaatatggttagactactgcctacgccgaatcccccgaccgacatgtagcgggtattcgtatacgtgttggtttccgggtcaattccccgaccgaaactgtaattgacgccgggagaaatcccgctaacagagggtagaagcgagagtgtggcatcccgcacgtccagtttatcgtttttattttgtagcgtccgttgttgtatggaaagacttttctccacgccgtaatcgatacacgcttgaagagtccattcccggttttgcccgttgacaagtaagccggatgttaaaatgctcagtagaatggaatatcgctttaaaatcatcattttttattttatcttgcatccagaagaacgaatgtcgtgccaaagtcggaaagtgtttgttttcagctgtatagaagaaaatagggaagaatagtatgtcaaaaaataagacacgattgtctaattatttgacaggtgatataaagtatattttggtaatgtattgataattagtgtaaaatgccttttggcatgataatggtacgttcaacgtgaagttttactcgtaaatagattgaatcatgataagaattgagcatttaagtaaagtatttcgtaccgaagaggtcgaaacaacagcgttgaacgacgtgtcccttcacgtgaagcagggagaattcgtggccataatgggcccttccggttgtggtaagtcaactttattaaacatcatcggtttgttggataacccgacatccggaaattattatttcaacgggcaggaagtcgggcatttaaaagagaaacagcggacgcaggttcgtaaggggaacatcggtttcgtgttccagagttttaacctgattgacgagttgaatgtctatgagaacgtggaactacccttgatctacttgaagaaaaaggcgtcggagaaaaaagaactggtcacgtcgattctcgaccggatgaacattagtcaccgggtcaagcacttcccgcagcaactttccgggggacaacaacagcgggttgccattgcccgtgccgtcgtggcagggcccaagctgatccttgccgacgagccgaccggaaacctcgattccaaaaacggggcggaagtcatgaacttgttgaccgagctgaaccaagagggaacaaccattgtcatggtgacccactcccagcatgatgcctcgtatgcccaccgggtggttcatctctttgacgggcaaatcgtgaccgagttggaaaaccgggacatcctttaattaaaaatagaacgattgccaaccgggaaattttaaacgagacgggaagaatttagaactaaaaaataaaaacttatgaaaggtaaaaacttgctcttcggattatgtttgtgtctctggacatcattgggttggggacaaaaagtgatcaatgtcccgtggtacgaggcgacaaacacgtatatgttcgatattgtaaaaatggagttgaccaacgaggctactattatcacggggcaagtgaactatttccctaatgaatggtttcgggttgtggggcgtacggtattaagaggggagagtggtaaagaatataaacttttgaaagcggaaggtatcacgctaaatgaacagatatttttgccggaatccggtcggatgacttttcaactctattttgaacccgtggatgccggggagaaaaaggtagattacgtggaggggaaccacgagacagactggcggatccggggaatcatattggatgagaaaccgcaaaggctggaacaggaaagcgattgtctgattcgtgggaaggtgcagggacaccttgcgagttctaggttggtgctgatggggtacaaggatgacgatcggattcaggagccttatgctataatacccattcggaatggtgagtttgaatatgcgtgcagattaggggggtgtaaaatgtattggctcgtgtttactgatgagttagcaagagcagcctttcggccggtgagtttttttgttgaaccgggggtgattaatatctcgattttgtctgaaaattcgtatgtagatgcggaaattcatggtgggaagatcaataaccagtatcaacaatatcaaaaattaagtgaagataaattccattttagtgatttgtataatcgatacgaggcattaagtaatcagaaactttattttacacctagagcaatggaattgcaagaattgatgtctctatattctaaagataagatgaaatcggatagcttgtatgcaatttatcagcaattagaaaaggataaaaaattatatactcctcaactgatggcgttaaatgaggaaagcaaaaatctgaagaagagagaacagaaatggaaggaagaatatatggcggaacatccatcggtggcaacttattttttgttaatggatgatttgatgagtttggtggattatcaggtgcatggttttcccgaggagtttgatatgttatcctttaaaaatgtacaggatttggagagtttatacaataccatctataaacccatgttccccgaacattcatatacaacgttggttgcaaccatgcttcagtcgttaaagcaaattgaagtggggggacgttatatagacttcaccgccccggattttgagggaaactccgtgactttatctgaacagataagagggaaagtggctttgattgacttgtgggcctcttggtgcggcccgtgccgacggtcggcgaagagtatgattcccgtgtatgaaaaatatgaatccaaaggtttcacgatcgtcggggttgcccgtgaaaaaacggtacaaacggcgaaagctgcggcccttcaggacggttacccgtggttgaatctcgtggaactcaacgacgccgggaacatttggtttaaatattgtgtcggtaattccggtgggggaacttttttggtagatcaagagggtaaaatattagccatctgtccgacagccgaagaagtggagcgtattttagaaaagatgttgaagtagaaaaacaagatatatggcgaaacagggaaccatactggtcgtggacgacaacaaggccgtgctgaacgctttggagatgttgttggcaggagtattccgggaagtgatcacgctcagaactccgaaccagatcgaagccatcctcgaatcgggacgggtagatgtggtgttgttggatatgaatttctcggcgggtatcaataccgggaacgagggactttactggttgtcaaggattaaggaatatgctgcggagatttccgtggttttattcacggcttacgcggatattgatttggcagtgagggcggtgaaggaaggggcgacagattttgttgtcaaaccttgggataatgccaagttagtggccaccttgttggctgcctatcgtttgcacgaatcccgacgggaagtgaaacaacttaaagcaaaggaagaggtgctgaaagggcagctttcccccgaacggacagtcgtgtggggagagtcggatgtcatgcgtcgggtacgtcaattaattgaaaaggtggcggtcacggatgcaaacgtgttgattaccggggaaaacggtacgggaaaagagattgtggcacgcgaaattcacgccctctcgggacgaaaagaggaggtgatgatctccgtggacatgggagcgatcacggaaacccttttcgaaagtgagttgttcggtcacgtgaaaggagctttcaccgatgcacgggaagaccgtgtcgggaaattcgaggcggcaaacaagggtacgttgtttctggatgaaatcggaaacttgtcatacgccctgcaatccaagctactggcaaccctgcaaagccggaaagtgatccgggtgggatcgaataaaccgattgatgtcgacatccgtctgatctgtgccacgaatagcgacttaccccgaatggtcaaagaaggcactttccgggaagatttactttatcgcattaacacgatccacgtggaagttcccccgttacgggaaagagggaatgacatactgttactggcagaggcctttttacgggattatggcaggaaataccggaaacccgatctgtccttttccggcgagactcggcaacgactgctgggatattcatggccgggaaacgtgcgggaattacagcacaccgtggaaaaagccgtgatcatgtgtgatcgacaagtactcaccccagaagatttcctgttcaaaagcgaaccgggcgagatggctcctttagaaacccttgaagatatggaacgggagatgatccgcaaggctttggaacggcacgagggcaatttgtcggctgttgcttcccggctgggaatcacccggcaaaccctgtataacaagatgaaaaaattcaatttgtaacaataagatatgataagaaacatcaccttgcgagtattggcgtatttgctacttctgatcgttctggtcgtggcgacctgttatttattgtcggaaggtgagtatatcccgggtgttgctacgtcaatacttgccgtggggtgttgttttcgtgtcgtgtggaatgtccgatccgtgaaccggaaactggcttacttctttcaagccttggaaaacgacgattattccattcattttccggaatatggcggtagccattccgagcgttttctgaacggggtgttgaaccgtatcaaggatattttgcagaatacccgtttggagatacaacaacgggagcaatattacgagttgatcataaacagcgtgagttccgggatcgtggcgttggacgaacggggattcgtgacgcaaaataatcaaatcgctttaaaattgctgggattggagatattcacacacgtcaaccagttggaacgagtgtccccggccttaaaactactggtgacggaaattcgccccggggaaagtcggcgggtgactttcacgaacgaacggggctccgtgcaattattcgtcagtgcctcccgcattttattaaaagacaagcccatcaccttgttagtcatgaatgacatcgagaacgaacttgacgagaaagaaattgattcttgggtacgcttgatccgggtgttatcgcacgagattatgaattcgatcgcccccgtaacttctttgagcgacacgttactttccatgcactctgatccggaaatcactcccgacgacttgaaacgcaacacggaaaacgggttgaaggtgattagtgaaacgggcaaagggttgatctctttcgtggaatcctatcgtaagtttacccgtattcctcggcctgaacgggaattgatcaacttaaacgaatttatccagcgggcagtgatcctgagcagcacggaaccgaatttcccggaagtcacgattgatgtttgcattgaaccggaagacctgaaggtttttgccgatccgaaccttatgggacaagtccttttaaacttgatgaaaaacgcattttacgctttgcggggtagggaagatgcccacataactctctccgccgaacacgggccgacgggaaaggtgttgatccgggtacgggacaatggtcccggtatttcccccgaaatcatgaacgagatattcgtcccgttctttaccactaaagaagagggatcgggtatcgggctaagcgtctcccgccagattatgcgaatgcatggcggcaatctaaaagtttcatccatagaaggtaaagaaacggtcttcacgattattatctgaagatgatgatctgtttttgtttgaaatcttgtcgagaatcaatgtatatccgttgaatccgacaggatggatatattattggaaaagtctttcgaaccaggttagagttcaggagaattttaacacttgtttctattacaataattaacaaaatttgtaatccatatttagcatctagttatcatattgtgagccgctcccattccgctcctattccagtccaattaaaatagaaatggaatagtaaatatttagtagatataaatgaatttttacatagttaataacaaatatatagatagaatatagtttgtagaggtaggaaatggggtgttccgttagcatttcttctcactttcacgtcgtagagaggcgtggtcggttctatgaatctgcccattaacagacgaaattgtcgtgagagtgcttgtcgccattgtacctgctaccgcaggtgtagttgaaaggcaatataaatggcaaaaatacgttatcttgatacagaatattttcttcgtacattaacgtataaagtcaattcttcgaataaaaatacaaaaaatgcattaacacgactattgacatctgaatattgtttgttaaactcattataaataataagattaatattatacatattat

SEQ ID NO: 10729 - DNA, 8097 bp, Unknown
  gut microbiota DNA sequence
cgaaccggttcttcgattaggctggacgttctaattcctagcaataaatacataaaataagcgagccaaaatcgtttggctcgcttattttatttaaaacctttatcgacaatagcgattaatataagcattcacgcttgttacccccagcgatttagccttccgccaatcggcacatgcctccttacgctttccggtactgaaataagcaattccccggttcgcgtaaatagcaccgttatccttgtttagcttgagagaataggtataatccggtatcgccttcgcaaattcacgctgtttcaagtaacaattcccccggttcaaataataagcatataccaactcgtactcttccccatttttcttggcatactggattgccagagaatactcctttatggctgccgcgtaattctgttgattctggtaaatatttcccaaataataacaaagctcatcatcttcctcaaatatcccctttcctttcacaagaaactccttcagcaaagaaatctggttcgtgtgagtacaagccgtattcaaggacgagtaaacctccctcaatttcggattcaatcgattagccgcgatcaatttttgaacagcatctttataatctccattttcaatatccgtgtttgcctcgttcaacaactcgatcggtttattgaccgcactcacatcaacctgaccaaccgcaacatgagtcacagcaaccaaggtcatcaacaataaagtgacttttctcatagtttggatataaattagcgtttgcgtgtttcgaatcccaaaaataatgaaaaggaattaaaaagcaaatccacctcgctaaaaaaagtctacatagtccactaaattcataaagcttgtaaggtttataaaccttacaagctttatgaactttcctccctctatcagaacgacaccatcaagcgcatctgcaactgatggaaattcttatccaacgggaaataaacattctttaaattactatactggtactcacccatcaccttcacgtactggttgaacgtgtagttcacgccaatcgtggccgcatgtaaccgtcccccgccaatactcgttgacacggccgggtaatctgccaccactcccccgggataaaatacctgcttaccaattaaaaagaaatcacctttattaatgtcattcaaatccgtgtaactgtaacgggccacaatctccagatctcctctctcgttacttccccgcaacaatccgtactcgtcgtcataaccgtatccttcaccgcaaagcaagtaccccatttccacgtacgccccttggaacttggaacttctcatcgggtttccagcctgccaggaagccaaggtcgtccagctccaaacgcctcccaactgattctcgaacaaagcctcgtcatttcttttcttgtacaatctcttgtaaatatactcgccccgcaaaaacatattactggtaaccaccagcacttccggtcctaccgtgatcgtgttcttcgcccaaggcacctgcgcattcaggaattccgtcgtaccgtccacgtaagtctgcatattcgactccaactccacattcgtcttgaacacgttattcaccacctcgcccgtgttaatccgagagtaacgaaaagaagctcccacgtgcaaagttatgaactcattattaagcggcttgtacaaccagcgtccactcaagcttactccttgaaaaccggaaatctggtcattgtacttgttctccgcaaaaagcccttgatccgcaaagaaagtggcatcataatacttgtaggtaatccccaaaccacgtccggccgataaagccatggccggagccgctcgggaaataaaatggtaattatacaaactcgcgttcagactcatactcgacggttcgttgaaataacctgccttcacgctatgaatcccgtacgccgattcgtggaaattatatcgcacgaaaatattcttctgcttgaaagttcctttcgaaaaatcgaaatcagcgtaaaaatacaacggcccgtacgtcaacgacgtccgtatacgagcatccgtgagcgctgcccccgacttcatcggagtgtactccgaatgataataagccacgtcagcaaacaaacgggcgcctgccgtgaaacgaattcctttatccttattgatatattgcaaaagaggattagcaacatcctcagcctgagctttcaccatattagacgacaacacgagggcgactaatacaacagggaataatatatattttttcatactggtctgcatttaaacaattatttagtaacctaatctctccaacaccacctttgcgtcaaccaatgtctcggaagccggactctttcgccagccttgagtaatcatgtagttgatactcatatcagaatggttcgtaaacaatgcatccagataaggtgctttatatttcccgtcaatctcgactccgaaattatattgtccgaaatacttggccatctggtcatacgtgtcaaacgtgtagggatgattcttcattcccgccttgtgaatcaagtaatcctgccacggttggttcagctccgggtaattattcggggctccggcaatacacggtccgataaaatgagccttgtacttcacacccaaattaataaacgaggcataacccagcggatcgtcatacgtgatatccgtcgctcccgtacctttccacaataggaaacacatcgggaccttgccctcaaaatgctcggctaccctcactaggctctccaacgagaaagtctgcagaatcaccttgccattcgtgttccccgtattcaccttgccattcacgtagaacgggttgctttccggttccggttgcgtgataatattcatgcccaaacgatccagttccttgtaaaccatttcctcgaacccggtaggattcagccacggctccttgaactcgatataaattcccggacgattacccgtgtcttccggatcatccacgtaaccaaacgtgtacttgatcacgtcggccgtaccgcttaaactcttgatcttttccccggtcttctgtcccatcgtgaacactcgttttccctgcgcatcccgttccagcattttccccttggaataagccacgagatcctccaatgtagaaatgtattgattttgtgaggcaaaactcgggcgagcctgttcgatactcgtttcattaaaccacgttccagcatccagcatcatcaactcctcgtaggtataataagccggaagattcggtacaaaattcttggcatcctctttcaccaacgcctctgcttctgcctccgagtaaccaattttctggtaatacgcttttctaatctcgtaagggatagtctccccgaacacgttctcaatatttgtggttcgtttcaagttgtcatcatgcaatgccaacaccactccatctttcgaaacctgcatatcacattccagatagtcagccccgatttctctcgcccaacgatacgctgcttccgtctcttcaggggtccagaacgtcgatccccggtgagccacaacagcatactccggcacgtaatcccgcactttaatcatatcgggagtcaaatgatccaattcaaccttgtcgacatcgacatttatattgttgaatttttgatcttcacacgacatgaccaaggctatcaacccgcatgccatcactgcatgaaaaaactttttaatcataattttgaattttagagcgtttaatgtttgttagtactctcttttaccagatattgttcttctttcactgtaaatgccgtaaaaacaaatgctagagcacaagccaccagcaggataatgaaactccagtcccatccgagatgatccaccacgtaccccaacatgatatttgccaacaaagccgttccaaagaaataaccgaaaaaaccggtcagtccggcagccgttcccgccgcttttttgggagccaaatccaaggcgtgtaccccgatcaacatcaccggcccgtaaattaagaacccgatagcgatcagacatatactatccatcaccagattatgttccgtctgccagtaaataaacacgaacagggccaccaacaccatgtaaatcatcgtcgtgatcgcccgtcgtcccttgaacacgtagtcactcacgataccgcagataatcgtgccgggaatggctgcaatctcgtaagccgaataaatccagcctaccgctccgctatcgtaccctttcacgtctttcaagtaagtcggcgcccagtcaagcaccccgtatctcaccagatagataaaagcattagcgatagcgatataccataatattttgttattcaaaacatatttgaaaaaaatctcttttgccgtcaactcttcctccgacttcgcactgtaattcttcgggtaatcattacgatattcctcgatcggcggcaaaccacacgattgcggcgtgtcccggatcaaaataaatgcgatcacggcaaccaccaaggccacaacagccggaaaaataaacgtggcagattgccaggatccgaaccacaccaatcccacggagaacatgatcccgaccaaactacctcccacattatgggccacgttccagattgacattttggtcccccgctctttcaaggaaaaccagtgcgtcatcactcgtccactaggtggccagcccattccctggaaccaaccgatcaaaaactgggtaataaacatgaccacgattgaagaaacacccgcacttgtacccaaaaacaacgtcacaagtgccgataacaccaatcccaacggcaaaaacttacgggcactactccggtcggaaacccctcccatcaaaaattttgatatcccgtaagcgatagcattagccgaaagagccactcctaaatctcccttgtcaaatcccaactcctgcaaatagggcattgccagagtaaaattcttacgtactaaataataccccgcataccctataaatatacctaaaaagacctgtaaacgtaacttcttgtacgtggggtctattttttctttaggcaataagggtttgtgaggctcaggcttcagaaaactccacatgatattaatttttaataaatattatattgattccaatctgattatcgtaaacgtttccattacgactcgcggctttttccggatgaaatacaccgggctaagatcaaaacatgatcttagccgcgatgtaattttctgccagctcagtgaactctttcacttcttcaccaatccatacctgatccttcccaagttctttcgccatcacttctgccaccagcggggctgccttaatcgcctctctcgcatcaacaaacaacaatcgaaccctccgtgcaagaacatcctctacctctctggccatctcctcccgaactgcccaaacaacttcggcaacggtataatcatatttatctgacagtttctttccgtattccggattttcagcaatcaacttcataatcgcatcctgatcactaccataaacgtacatatgatctttcaggttcgggttcttccggtacccgtgtatatggaattttttcgtcacgcagggtctggcatccaccagtttcatggcaatcgctttatccaccgtatcttcggccatcaaacgataagaagtccatttacctcccgtgatcgtgattaaattattatcagaaactataatcttgtgtccgcgggaaagttctttcgtactctttccctcgtgtttcggggctgccaacggccgttgccccgcaaacacggattcaatatcagcatacgtcggggccgggtccatgtataaagaagccgttttcagaataaaatcaatttcttccttcaacggtttaggctctatctccggaaccggacgcataatatccgtcgtacccacaacaaccttattgtgccaaggtacggcaaacaacacccgtccatcactcgtcttcggcaccatgatcgcataatcgctctgcaaaaacttcatatctaacaccagatgtactccttggctcggtgtcaccatcttactatgtccaggagaatccatcgccatcaggtcatccacgagaattccacaggcattgatcacactcttcgccttcaactgcatctcttttccggactccatatccacgaacttcaccccggcaaccttcccgttctggtcatgcacaatcccggaaaccttcgctttgttaagtatcacgcccccattatccgcacaggtctgagctaaattaattgccatccgtgaatcatcaaactgcccgtcatgataaacaatacctcccttcaatccttttttcaccgatgtcggtaaatacgccatcaccttcttggggaaaataaaacgacttcgcccgtacccgaaaccaaaagacaacaggtcataaagcgtaagcccacagaaatacaggaaattatcccagtatgtataattcgatattacaaaagcctgatccttcacgagatgcggggcattagccttcattcgccctctctcctttaatgcttctaatactaaagcgacatcgcctttttgaagataacgtacaccaccgtgtaccagtttcgtactccgactggaagtactcttggcaaaatctgccatttctaaaagaacaacgctatatcctcttgttgcagcgtcaaccgccacacctaaacccgtagctccccctccaaccacaaccatatcccatactttctcaggttcctgaagtttattcaacatatcttttcgattcataacacaattatttatgtattcaacaatctataaaatcccaataacgttccgcaagcatactatatacttacaaaccgaaacttcattttcctaaattccgttctttgttattggtctctatggctcatttcgcattacgaatagtgccatatctttctttggtattgatcttaatctacggaaactcagagcaaaagtttctattttttaagaaatatatttccccagtttaaaattaattacaacacttgataagtaatattcaataaaacagatgtatatttgcagtggtggaaatatgattatcgaaacaaaatgaaaacattatctctaagtgaaaggcacaactacatattagaaacattacgccaacaaggttccgtttctgttgttgatctcgccaaccaattaaaagtatcttctgtaacgattcgcaaggatcttaccttacttgaggaaaaggaaatgctctatcgcacacacggtagtgccattttaatcaacccttatatcaatgatcgccatgtaaacgagaaagaaaagtcctatcccgaagaaaaacgactgataggtagatatgctgcaagtctaattacagcagacgactctattctcattgcatctggaacaacaatgcatgctttagcccgggaaatcgtgcctcaaggccatctcacggtaatcgctgcagctataaacgttacaaacattctagctcgtaacaagaacatagatataatacaactcggaggtttcgtacggaatagttctgtctctgtcgttggaaattatgcagaaaaaatgctggaaaacttttcttgtagtaaactcttcatgggagttgacgggatagacctagattatggattaacaaccacgaatatgatggaagctaatttaaatcaagtaatgatacaagctgcgcaaaaagtagtcgttctggctgactcttctaaattcggacgtagaggtttcggaaaaatatgcgatctggatgccgttgatcacatcatcacggataaatatgtacctagtaaaactctcgagggattgcgtgaacgcggtatcgaggtaactgttgccgaataaaaatatcaatttgattcaaataaaaaacccattgatttctcaatgggtttcattttgtagcgagatccgggattgaaccggagacctcatgattatgaatcatgcgctctaaccagctgagctacctcgccataaaaatcgctgcaacaagttccagcgattttgaaaattcggcatcgacctactctcccacctgaaggcagtaccatcggcgctgacgggcttaacttctctgttc

SEQ ID NO: 10730 - DNA, 21907 bp, Unknown
  gut microbiota DNA sequence
cttcatctacggcccggtgatgcttatcggggtgcaagcgcttgacctggctcccaagaacgcggccgggacgtcggccgggttgaccgggttcttcgggtacttcttcgggacggctatcctggcgaacgtggtgatgggatacgtggcggaaagttcattcgggtgggacgggacgttcgtgctgttgctcgtcgcctgcgccttgtccatcgttttcgtcagctttacttacaaggaggaacaatacctggtgcaaaatagaaaataatgaataccaaataattcaaatttaataaattatggttaataaatcatggagaattgcaatggcatgtagcatagccttggctttcatgtcatgcgaaaatcagaaatttaacgacacgtttgttgactctgagcgtgtacatgtagacaccctatcaacagaattacaaaaagtgcgggattacgttccccagtatgcagtagtagctcaccgtggctccacgtactggactccggaagaaaccgaagcagcttaccgttgggctcgtgaaatgggtgccgattatctggaggcagacttacaagtttctaaagatggtgttattctagccttgcatgacacggacttaaaacgtaccacaaatattgaagatgtttttggtgaaagattcccggaaaaaacaagaagggaatattatgaccttttaggttacagcgcacaaaagatcgattcgttgattgacgcggataaaaaagcattcgttcccaactatccctgttcttatacttactatgaattgatgcttttggatgcaggaacttggttcaatcaagatgctgttagtcaagaacaagcccgtataggattttctagaaatcatcaatacatctctacccttcaagacttgatcatgtattccaaaggattcaaattggaaagatatgctcaagatgccccacaacccacgggtcatgtaaatatctggggaaatacttaccaaaatgaaagagtcgtaaaaacgatggttgcaacgaatgaagaattcagtaatccggtaaacttcggtgtaaaagataaagttgttcgttatggattcggctatgttaaagatgatctcggcacgagtggaaacatccccggaatttatatcgaattcaaagagccgtggttaaatccatctaactttgaacaaatggtatacaacgagttaaaaatggaaaatgtaaccggattcgctgaaaagcttaacatgaacattatcgccggaggtgaagaacctgaaagcaatcctttctacaaagacggtaaaattaacgttggtaacacgaatggaaaagttattcttcaaactttctcgttacaaagtttaactcgcgtatgcgacctatttgatggtcaagttccgatgtgtttcttgttatggaaaggaaccggagcaacagacttaacttacgatgatcctcaaggatatgcctctttcatcaacttggcagtaaaatacaaagcacatttcattggaccctgcattgccggagccccgaacaattatcctgaattaaattacccgtggcaacacaacttgattcaccgtgcaaaaatgaagaatcacccgtattcattcgatacttatgaccaaatggctaaatatttcggccaatacaactggggtagtgatggtggttcccgctacgaagctccttacttggatgcattcttcacgaaccacacggatatgagtcttcaatacatggttgactttggttacagaaaatctcccgcaccaacagaaattcctgatgctcgcgaggtactggataatttaggttacgaaaaataatttttaatcgattattgtaatgaaaaaatacatattattacctgccatgatggtagccgcaatgttatctaccactgcagtgaaagcccaagaagatgtaaatcctttattgaaatatgtcaataaagaaaacgatcttaaagcaagcatcggtggtcgtatgtttgcagacgtagcttattatcacacggaatggaccccgatgaaatccggtgctgccatcacggacgctcgtattcatgcctctttaacttacgggaaattgtttatctacgcggacttcggtttcgggaatggcgagttcagccaaaaaaacctattcgcacaatataccttcaaagaaagtttaaaaggtattcacttggtaaaagccggttattataacgagccgtcaagcatgagcatgatgactagctcatataactatcactttatcagccgtccgtcagtttcccaagcattggatccgggccgatcactgggagctacttacaaattcttcaacagacatttctttgccgatcaaggtattttctctcaactgaaatacaacgagcaagaagaggggtaccagggattcagcttaagtggacgttggttatggaaacccatcaacgataacaacatcaccttacaattcggtacaggattacgttaccaaagaattaacggtggagaggtttaccaagatggcgtttataaaacgaacatgcacgtggcagccaacatgcaaacttacgtggatgaaactactaaatttttaagttgtgaccttccttgggccaaagatgccttcaccatcagtcccgaattcttattcaagagcgaccgtgtatttgctcgcggagaattcatctggaaaaaagtatggaaagaccgtgatgatcaaaccttatttgaaagtcaattaggtggccaacaaagttggacaaatgttgaaggatggagaagtggaaacaaattacgtcccacaatcatgaacggtggttacgtagaattcggttacctgctctgcggtaaagcttatacctacgatgacgaatacggtttattaaaaggcatgggagacaaaggaggtttggaactcgtagctcgctactcttgcacgaacttaacagatattaccgacggggacattttcttgattggtaatcacaagttctacccgaacggaaaagttgtagactacccctattcttctagtattgacgggggtaccatgcactcggtaacacttggattgaattattctttcaatcaatacattaaaatcatgggagaatatcaatatgctaacttgagtaacgtatatttcccggatgacgagaattttcatcaactgcaattacgagtaatgtttgcattctaattgtcaggaaaattttagaaaaagaaatcacaccagaagagcgtgtccgcatggcacgctcttttattttaaacccggaacaaaataaaggggaagtaacggggaaataggccactccaaatatctcacaaatattctatctaaacagcaaagccagttgctaaacgggtttaaaacctaggggacacgtcaatccctcttacttgataacttaactcccccttaactctcacttcattcaaaatataatcaacaaaagtaagggtacgaaaggaaatatcaagccgataaaagtatgacaattcaagtcatctcacgccaatatttttctttagaacgggtaaccgatcgccaagtggaaccttaagccatccttgaacttcggaatattataatatcccgacttatccggattcttgtaaggagtatgcaaagcaattcccagatcaccccggagtacgataaaaccaaagtcataacgcaagccgaaacctgttcccaaagcaatctcttttaacaaacctgctaacttaaactctccgcccggacgtttcgggtcattccgcaacaaccacacgttaccggcatctaaaaagatagccccattcagttgatacatgattttgaaacgaagttccacgttcccttccaatttaatatctcccgtctgatccaaataagccgttttgttatcgctttccagatgatagctaccggggcctatcgaccggatcgtgaacgcccggatactattcgctcccccgatataaaattgctcgctatacggcatcacccgggaattcccgtaagcacaaccgatgccccccataaagcgggttgccagaagagaggtttccgttattttacggtacacgattacttcagaggttaatttcaagaattgcgagtagatattaccgaacaattttttgttttgcccctgatgatttcccgtgatatattgtacggcggaaagaatgttacctgctgacataatcgtattctgccagtacaatcgattgggattccgtcttgttgccgccctgtcataagtgtacgaataggacatggaagggatcaactggttcttaaaactcatcgctatcgcaggattattctccatcgtttcatcaaactctttcgaagtctgcaacaaatgggtgtacgtgatcttcaaaggtgttatcgtatggaacactcgccacgagctttgaaaatcataactgagagatcccgtgaaagaaagcatccggaaaaaagtatggcgattcaaaaaatctactccaatctggaaattcgtacgttcggcaaaatctttactacttttcaagaagttaggtactagcaaccgaggcaatgacaaaccgacgttcacacctaactcgtaagaattgattaacccggaatttgaatttgtctttttatccccaacttcccactcgtaagccccatttaacttaaaggtcaggttctccccgccccggaataaattcttattcgttattcccaacgacaaaccaggcccgagcaaattattggatttagaggaaacatctacttctatttccgtctctatcggtaagtcgtacacggcattaatactaaagtctagatttccgaaaccggactttttcacgctatccgcccgggtcacgttcaggttggtatatttaaaaattccaagccgggccagactcgtttgcgttcgattttgtcgccagaacgaataagtgtctccgggaagtaaatgcatggaacgagcgagaaccttgggcttcacgtccaacggtttcgtatatttcacctctatccccttataagacaaggcatcttgagtttctgactgatcggaattttccagtacaagttccacgtttcccaccttgtacggttgcaaggctaccgccgggataccatgtttcaaagcaatacggacatctgctacccgtctttcccgtgtcgtgtcgaccaaaaattcgatataatccgattggaaataataatacccactattccggaacattttagttatccgggttcgctcatcttccatcgtgtacaaattatactctgccccggattttagcaagcaaccccgttgcgttctctgtatcagactatccattctccccgtccagccccaaaattcaacagttcccagcaagtaagcttccggcacgtaaacattataactgattttcgctttcttgggattccgtttgttcggaataatctcgtaactggatttcaccccgaaataaccgtattcactggcagcattctccaccactttcaagcgtagttccggttgtacatcagagattaacacgggtttcttggccaattttttgtataaccaatgttttaatcccttctcttttttcacgttccaattatacacccacaacccaaccggaaacggggaacgtatgtaaggagcatacaacgggttattaggcgggaaacctaacggcccggaaatagccgaacttttcggtccctccaactttacccctttggcagtctctatattcatctttttcaccccggtgtataacacctcgccttcggtcaacctcttcgtctgagaacaagagctacccaatatcatgaatactataataacaaataaactatttcccagacttttcattttctatcggttctattttggattctacttgtactttctttttacggcggaatatatccatgaatttttggaaattttttcttaataccacaccgataccggtttgtgtcacttctccctccaagacgctctcgtagcccgtgtgccggaagatcttcagaaaaaagttcggattctttccaaacacgtactcgatggcaatgtcatccacaagattctcctctactcccccggccgcggggtcattatccgtggagattcgccccccgactttcacccgtaccttattattaaacaatcgtttcgaaaattgataagaataatccgttttcttagattctcctgcctctgacacttgattataggtattaataccaaacgtcagatccatgttcttcaaatgtttccgagaccattgattcaattcgttttccacgaaattattcagggcattatcagaggcattggactttgccaccgtccccggcccggaataagttccgtaaatcatcatgttcatcgcctcctttgaacgctcctcggcagtcatcgctgccaattggttctgtatcgttatatccccttctgcggcaagatcaaacgtgatgtccagtttctccaacgtgtttgaaatcttgatcatggcattgaacgtcactaggcgggatttctggctatcatccgtcacgctagccgaaattgtctccgcagccgttatattcaaggtcgggttagccaggtccccggtccattccacgaaactaccatcttgtatcttgaaatccttctgcccgatcaccggcaaaccgtaagaaacgattccactcgtcagaacgtatcttcccacgaggcgggtctctcccaccggattcaatgtataagtcagatttcccccgccatttattgctacccgattctgcccattcgacgacagcaacacattcaacccaactaacggtgcgatattcacggacatgagcaaatccagattcacggaactaacctgctgcaactcatcagccgcggccaattgagtcgtgtcgctgaacgaaacgaaacgcacaacatccgcactccggtccgtcaattccaaaggcgaagatttcaacgtgtaatagacttcactattatccaacaagttaatatttcctctgaccttcagattatccagcattcctttcaaggttgccgagagatcaacaaacactttcccgtaaaccatggtctccgtattttctttcaccttcatggcctgaaaattcttcgcttgaacagaggcatccatttttatggccgagaaggatgcgaaatcaaccgttcccaatagttctaatcgctgtttattaggagcaatcaacccgaaatgattaaaatccaaaagattatcatgaatcacgatagccgaagaatctatcttaaaagtcgtcccgatcatcaaagcttcaatggttccgtccttgaaacgcaaatctccatttatcaacggttgattcatctgccctttcacttgaaaagccccgatcatgtctccatccagcttcattatacccgggggagtaaaggctcccgcaacacgcaaagggaatttaggaatgtctatatccaatgcaatatctttatcttcactcccggtcattaatttacctttggtcaaaagtgccttcaccccatctaccgacaaggaaaaatccacgtcatgctcagtctgttgcgacaatcgatatttaatgcctaatcccaaatctcccacatgctctttcccataataaaaatcatccacattgaccgccccgctaacatcaatcacgtcattcttgctatacatctgcacatcaacccctaacaaaccggatatatccggaataaacgaaagtgctttagataaaccacccaaatcaacacctttaatatctacaatcaaggaggccggtttgtgatcagcatcttcttccgaaattaaacgaatccgcttgtctccattcagcatttgcaaattagccgccggaatttccccttgcttcaggcgaataaaattgccccggttaatttgccatgaaacatatcccaagataaggggatcgggagaaatactcacgctaaaagaactgtcttgcaaagcgacattagccccgatattgaatatttccccattctcgttcgcatgttcacgtattcttacatttatctgatcatactccacgttcccttccaccgtcagttgagccaatccttccaattgatccttagccccgaatacatccacgccatagcgcaaagccacgtccttctgtcttgcatatatcaatacactatccaaaacaatcccctcgatattcaatccatacacctttgaacttaccccgaaatcacgtgatacatcggttcctaaatcaacattcattcgttcaaagcgtattccgctgcttttcaagtaactattcaataaattctcttgctgggcgtctatcgtcaaccggaaatcaggtagcagttcgttcaatttttccatgttaaaatcatgtttctcgatctgctcaaccaacaatccgctagcgacactaaaacgatcgactaaagcgtagcctccaccatctccctcaaacttcatggtcaggtctcccgctttgacatccaacaatgtcttgttttgcaaaccggagaaagtgacctccagatttcccaacttacgagtggcaaagtcctgtaagacgatattcgaaaaaacagcctgtaaagatgatgtactgtccgactttaattctgcattcacgtccagtcccaaagaaaaagccatgttttccggcataaaatgcaatcctttcagatctacattttcaagatctccattcaaacttatcttgtacgcgttctcgtcagcacgtaaccggaatttcattcccaaatccaactcctgattaccactccataattccccggtcaattcttgatctttcaatgccgcatccaaaatcacatttttataatcatacccgttataatataaggatgctaattcaaaatccactttcgccatcgcctctttccaatcaagcccccggcccgaagccaaaagattggcggtaattgcccctaacgaatcattcggcatgaatttatccaaagcaaaatctttcaaatgcacttccgcttgataggtattttctttccaaccataaccggcaactgcacgcaatacgccttccccgggatttaactccacatccactttcaccgcttgatccgcaatatgcacacccgtctctaatgataaatgatccgggataacaaatccggcattcccattctccgataacaatggtacaaaatactcccctcggtcgacaacaagagctagattcaattctcccgcgattctttccatatccgtcacgaaggccacgttcccctcactcttcaaagaaaaacctcctgctgctcctatatcaaaatgagcaatattcaactgatcgaccttacctcttaccaatccggacaaagaaaaaattttattcgataaccaatcatttaacagaccattagaatccggcataaacaacaacacgtcctgcccggcaacattcccctccatggataattggaaaggagtttccatgccaaaatcacttattccggcttccgcccggacattcattttcaattggctattaatcgttttcaaaatcagattcgacacgttagtttgttcacttcccaaactaactcgacaagataaatctctcaaatccaatccatttccttccttaaaacgcaaattttgaataattgccgtcacctctgttccccgattaaacacactatccaccttcaacgaaagtgctgatatacgaaccgtttcggggaaccgctctgcgtcaacagggatagtcatcggtttcatcaaaaaacgattatcctccagctctaccgtcccgacccgaacttcccaaggcatactttccacggtagacatttctgcttcaacctgttccccggtagattccgtcatcagcaaatcgcaaaagccacgtaccaacgtgatcttttccaaatcaactgtttgtttttccaaaccgacatcaatccctttcaagcgagcctctcccatcccggcatggaattcacccatgggaagtccctgtaactgataatcaacactatcaattgttatctctccaatcttaaaacgccagcgcataggctccccgcccccgactgtatcaaccgcagactccccaccgcccaaattcatccgaatctttcctccttttaaagcaatgaaaggaatctcggcctcttgtcgcgacagattcaatcgatccacccgaagattcagttcctccaaaaccagattcattttcaatccggaaagagaatcctcgaaatgaaccgctgcattttccacgaccaaacgacgaacttcgatttctttctttaacaattctgttaatgcaacattcacctgaatcacgtcggcatacagcagtgtgtctttttccgtctgtcccagataaatattttcaacggccagatcaagcggaaatttcaacaagattcgacctaccgacagtttcatatccaaattacgattcacgtactgttccgccttccccttgacaaaattctgaatagcaggaatatacaaaagaatcatgacaagaactaccaacgtgaaaagcaccaagataattctcaatgtatatttaaaaagctttcgcaaaaatctcattttcctttcttcatcaaagattaatcaattacaaaactacaattatttctccaattcgaccaccgggaacaaggcttttaccttacatttcccgataatactttttctcaccccacaaactgaacgattaatttaacgaacaatccaaccagagagttacggacttgtatgaatttatatgctgaatataatctcttaaaaccctatccgacaacatcttattcacgatcactcgaaatagtatttttttcttcatttctttttcgtaattttgcaaattggttggtggaatctaacgtcagataggatccatcatttacaaataaaaaataatatttatgtcacttaaaagaaatgttcttgatttaagaaagagaaaagaaattgttcttcaaggtggtggcgaagaggcgattaagaagcaagctgcaatgggaaaattgacagcccgggagcgtattgaagcaattttggacaaagactctttccatgagtacgacatgttcgttgagcatcagtctaaagattttgatatggataagaaagttcttcatggtgacggtgtcattattggtaccggaacaatttatggagaaccagtatgcatttacgcacaagatttcacggttgccggaggttcactaggcttgatgcatgctcgcaaaatcaccaaaatcatggatcatgctttaaaaatgcgtgtacccttaatcgggattaacgattcgggtggtgctcgtattcaagaaggagtagactcactagccggatatggagaaattttcttccgtaacacccaagcttccggagtaatccctcaattatccgtaatcctcggtccttgtgccggaggagccgtgtactctcccgccttgacagactttgtgtttgtggtggacaacatctctaaaatgttcattaccggaccggaagttgtaaaaacagtattgggagaagtcgtgaccatggaagaactcggtggagcaagagtacacagtgaaatcagcggtaacgcccatttcttcgctcattcagagtatgaatgttttgaacagataaaaaaattgttgaccttcattccctggagtaacgaagcaaaagccaaaccgttcccttccaaacctccaagaccggaatacaaaatcgaaaagattattccttccgatccgacccaaccttacgatgtacgtgacgtcattcgcgccgttgccgatgactctgatttcctcgaagttcaacaagaattcgcaaagaacatcgttgtcggatttggacgaattgatggagaaaccatcggattcgtggccaatcagccatcggttcttgccggagtattggattgcgactcttcagacaaagccggacgtttcattcgtttctgtgatgccttcaatatcccaatcgtaactttcgaggatatgccgggatatttaccgggtgttgaacaagaacacatgggagttatccgtcacggggcaaaagtgctttacgcgtatagcgaagctacagtacccaagattaccgtaatccttagaaaagcatacggtggaggttatatcgccatgaactcccgtcatttgaaagccgatttcatgttcgcatggccaaccgcagaaattgcggtcatgggaccggaaggagctgccaacatcatcttcaaaaaagagatcatggctgccgaaaacccggatgaaatgcgtaaaatcaaagttgccgagtatcgtgagaaattcgctaacccttacgtagccgcttctaaaggttatatcgattcagtgatcgaacccgaggaaacccggaaaattttgaaacactctatcgaggtatccagcaacaagtcggtattaaccccggctaaaaaacatggaattcctccattttaaaccaaaattataccacgatgagtacaccaaaatacgattcattagaaatcgacggcttgaaatacaaaacccagtttaccgaaaaattcattaatcggaaaaaatgggaaaaacccgatccgggagccgttatcacatacataccgggatctatcatcgatttgtacgtgaaagaaggtcaagaagttaaagctggagatttactttgcctcctggaagccatgaaaatgcacaataaaattcaagctcccataagcggtacggtcattaaaatccatgtcaacaaaggagacaaactccctaaagacgctttaatgtttgaaataaaataactccaaaggctgcccaatcgggcagcctttgacaaatacccgattatgagtttcttcaaagctttgaacatcgtcaaaacctacgccaaccacaaagcattggatgatgtgtcaatcaatatcccggagggagccatctatgggctactaggacctaatggagccggaaaaacctccttaattcgaattatcaatcaaattacagcccctgattcgggagaaatatttttcagaaacgaacacctgaaaccatccgatgtcaaccggataggttaccttccggaagagcggggactctacaaaaaaatgaaagtcggagaacaggctgtttatctggctcgcttgaaaggcatcagtaaacacgaagcgatcatccgtctcaaaatgtggttcgagaaatttgaaattgaagcctggtgggataaaaaagtggaagaactatccaaaggaatggcccaaaaagtacaatttatcaccacagtacttcatgaaccggaattactgattttcgacgaacctttcagcggtttcgaccctatcaacgttgaattactgaaacgggaaattctcgaattacgcaaaaaaggaacgaccataatcttctctacccacaatatgggatcagtagaagaaatttgtagtcatatcgccttaatcaacaaatcgcgcaaaatcatcgaagggccaatcaaccagattcgtgaaaagtatgccagcaatacataccagctcagttgccgctacaacccggaattctctcccgaacaaacgatcggttctgaattcgagatagtatctcaacgtgtcgaaggtgaccgtcaagatattattttgcaacaaaacacctattgcccggcaaacacccttttgtcaagagtcctgcctcaaacagacatcatctcttaccaaaagatcattcccagcatgaatgacattttcataaaactcgtaaaagagcaagcttaaataattttagatttacgatttcaaatttatgatattcaattaaaatgaacaagatactcatcatcataaaccgggaatttaccacgagagtccgtaaaaagacctttcttgtcgttaccatttttgtcccgatcctgttcgccttattctatgcctttcttatgtggatgttattgcgagacgacagtcaggagcgaataattgccgtgatcaacgaatcgacattggaaactccacttcaaaaaatcaataacacaagtttcacgtatgtcgatcaagacgtaccggaagcagactatatcgattttctgaagaaaaacgattattacgccattacccgcattccggtcaatgtcatgagccatgccgaaatcccggtattctcaacttctcaagttcccatggaactgaaaaacgagatcgcatcacaattacgccagaaaatagaatccgtcaaacgtgctgaagtcatcgctaaaacacagatgccggatttggaagccgaattggatgcgaccaaaactcccgtacttgtgagaacgctacttgtcacggacaccggagataccaaagaaagctcgtctgaaatcacgtctgtcatcgggctgattgcgggattaatcatctatttctttattttcatgtacgcctctcaagtgatgaaaggcgttatcgaggaaaaaacgaatcgcatcatagaggtgttggtttcctcggtgaaacctttccagttcttgctgggaaaaattatcggggtggcagccgtgggacttgtacaatttttgatatggattgttttaggaggaggtatcatcttgatttctcaagctttctttatgccgaatattgatttggaagccttaaagaatgccaacgatctgaatatgtttgctcaaggtacggaaattaatccggagcaactagccattatccaaaatctggtaaaaaccattgatcccatgtttatcctgaaattcgtgggtgccttcttattctatttcatcggaggctatttattatacgcatcattgtttgcagccattggagctgccgttgacaatgaaacggactcccagcaattcatgaccccgctgtcaatcattctggttgtagccctttacattggtatcgccgcaatgaaaagtcccgaatctcccatggttttctggagttcactgatcccgttcacctctccggtcgtcatgcttgtgcgcattcctttcggggtccctgcttgggaaattatcacttcaatgggattactcgtcggttccttccttttcttcacttggttatccggcaaaatttacagggtcggaatcctgatgtacgggaagaaagtcacctggaaagaattatataaatggcttcgctataaagcataaaaaaagcgactcgaaaagagtcgctttttttatcgagattaaatcttctgattagatcttgtgaattaccattcctgaacgaagtttaggctcaaaccaagttgtcttcggaggcatgatattaccggtatcggcgatattgatcaattgctccatagaaacaggatacaaagcgaaagccactttcatctcgccattatcaacacgacgtttcaactcacccaatccgcggatacctcccacgaaatcaatccgtttagaagtacgcaaatcttggatgtctaaaatatcagccaatacatgattagaaaggatcgttacatctaataccccgatcgggtcattatcatcgtaacttcccggtttagccgtcaatttataccatcttcctcccaaatacatgctgaattcatgcaatttagccggatgataaatctccgtacccatatcttcaaccgtgaaatgttcgcccaatttagccaacaattgctcttcggtcaaaccgttcaaatcttttacaacgcggttgtaatcaatgattttcaactgatgatccgggaaatgaacagccatgaagaagttatattcttccgtaccattgtggttcgggttctttgatttgaactcggcaccgatacgagcggcagcagcagttctatggtgtccgtcagcaacatacgtgtaaggaactttcgtcgcgaataattcctctaaacgtttgtttgtctccgggcagttgattgcccagaaatgatgaccgaatccgtcttctgccacgaaatcatagtcagctttcttgctcttcacgatctcctcaacgatagcatcaatttccggaacagccttgtaagcgaagaataccggttccaagttagctttcacataacgggtcaagatcatacggtcctcttccttatccggacgagttaactcgtgtttcttgataattccgttcatgtaatcctcacaagcggcacaacctacgataccatattgagttcttccgtccatcgtctgggcgtagatataaaatttagcttcctcatcttgaaccaaccatcccttttcctggaacatgttgaagttttccacgctcttgttataaacagtctcggagtggatatcggttcctgcagggcagtcaatctcagctctggtaacatgtaataatgaacgaggttttcctgcagccatttgtgcagcttcctctgaattcatcacgtcgtaaggtagacacgccagttcctcacaaacttcctgagatggtgtacgtaatcctttgaatggttttactattgccatatataattttagattttagattttagattttaaattagaatcacccaatttaaaatctaaaatttacaatttacaatcttatttgtttactctgaatttctcgtcacctttctcgatgaaattcacaatctggtgagcggcagccaatcccgcgttaacattagcctcttcggtttgagcacccatctttttcggggtggcgaagaaacgaccttcgaatttgctgaagcaatcacaatccggtgcgatatccgtgatatagtggaagtcagctctttcttccatcaatttagccaaaccttcttcatcgataacttccttacgagccgtgttcaccaaaactgcacccttgggcatgtctttcaacaaatcatagttgatagatttcttggtttgttctgttgccggaatgtgcaaagagatgtattgacacatcttgtacatttcctcagctgaatgtaacggagttgcaccggcatttttgatttgttcgtccgtcatgaacgggtcgaaagcgtaaacttccataccgaatccacgagcgatacgtcctacattttgtccaacgtttccgtaagcatggataccgattttcttccctttcaactcagaacctgatttcccgttgtagaagttacgagccatgtaaaccatcataccgaaagccaactcggccacagcgtttgaattttgtcccggagtgttcatcgccactacattatgagcagtacaagcagccaagtcgatgttatcgtatccagcaccggcacgaacgattactttcaaattcttagcagcctcgattacttctttagtagctttgtcagaacgaatgatcatagcgtcaacatcagcaacagcagcgatcaactcgtcttgtgaagtatatttttctaataaaactaactcatatccttgagcttctacaatttctctgattccgttaacggcaaccggagcaaacggtttatctgtagcaattaatactttagtcatgataattacaattttaaatgaaaaagatttacgatctcagaccatcattgctttcatttccatgaaagacaatcatacgtccgaaatcgtaaaccgtcaattattagatatgttttgcttcaaattcttgcattgcagcaaccaaagctttcacgtcctcgattgtacaagcgttgtaagtagaagcacggaatccacctacagaacggtgtcctttcaatcctaccaagtttttagtcttagcgaaatcaaggaattctttctccaatgactcatatccttctctcaacaagaaaggaatgttcattcttgaacgagaaccttcttttacaaccggacggaatactttgcttctttccaattcagcgtaaagcatatcggctctttcgatagctaatttttccatagcttcaacaccacccatagctttcacccatttcaaggtttcttttaccccaaaaatattgacacatggaggggtgttatacatagattctttatccacgtgagttttgtatctcaacatagtcgggatcattctgtcagcaaccacgttgttcaagaaatcatttttaatgatcacgaaagtaacaccggcaggtccgaggtttttctggcatccaccatagatcatggcatatttagacacgtcaaccggacggctgcaaatatcagaagacatatcacaaatcaaaggcaccggagaagtcggatcatagaaaatttctgtaccgcggatcgtgttgtttgaagtgatgtgcatgtaatccacgtctgaaggaatcgtgaattcaggataataagtaaatccatcagcctcagaagaagcaacgatttcaacctcaccccacattttagcctctttaatagctgcagttgaccaagttccggtatttacataggcagctttcgttttcaagaagttgaaggggatcatgcagaactgcatgctggcaccaccacccaagaaaagaacagagtatccttccggaatattcaatacttctttgaacaaggcaacagcctcttcataaacagcttgaaaatctgcagaacggtgagacacttccatgatagattgtcccgtgttaccaaactctaataccgcttttgatacattttccaatgtagaatccggcaatttacatggtccggcattaaaaatgtgttttctcatctctaaaatatttaagtagataattaattaaaatcttgtttgcaatcgcattacaaagatgcaaaataagtctatataaaagacttttttccgtaatttttattcgtttttcttacagactaaaaatcaacgtcttaaacatcctcgaaagcgtttttactcctatataaaaacgaagcacccgtttccgggtgcctgtttatcgtctagctcaaaagcacccgactaaaagaacggggttttgacaattttagctttcaaagctttatttcttacacgaataaagatctcggtatccagtttatgaaaaccgctcttcacgtatcccgtaccgatagattttccagtccaaggagaaacagttccagagcaaaccaccccgatctcgtttccttcggcatcctcgattacatatccctggcgagcaatacccttatcctgaagttcgaatggtttcatgtaacggctcggcttatccgctttcattttttcatgataagcacggttaatgaaatcatttcccggcacgaatttcgtgatccagcccaaaccagcctcgatcggagaatggtcgtcatcgatctcgtgtccgtacaagcagaaacctgcttccagacgcaaggtatcacgagaacctaacccggcaggcttgattccgaattcagctccggcttcaaacacggcatgccaaagtttctcggcatctttcacgtacgcgtaaatctcacaaccacctgctccggtatatccggtcgtggagaagatcactttatcgattcctgcaaacgggatctcttggaaagtataatattccatatctaccacgttagccgtggttaatttctgcatagcctttaatgccaaagggccttgaacggcaagctggcaaatattatcagaagcgttttccaaatcggtatccacgttcatacccaattctttcgcccatttcgtacaccaagcccaatctttatcgatattggccgcatttacaaccaacaaatatttctcagcgctgaaacgatataccaaaaggtcatccacgatacctcccgtttcattcgggaaacagctatattgaaccttgccatccgagagagcagccacatcgttagaagtaagcttttgtaccaattcgaaagctttcgggccttttacccaaaattcacccatgtgagaaacatcaaatacacctaatttttcacgaaccgtgttgtgttcatctttaatacccgtgtattcaatcggcatattgtagccggcaaaaggagccattcttgccccaagttcctcatggaaatgtgtaaatggagtagtcttcattttttatatcgtttaaatattcattatattataaagtataactataacactccgcaaagttaaaacttttattgttcttgcctaccctttctaaaaaaatattagcacgtcgattgaatcttcgaaatcagaaacgaaccgcccgttaacttatttgcaatctcggtaaaaatgattacttttgttcaattcaacggtgaataataaatttactacatattaatccttagaaactaattgaacaatgattctaaaagtaacagaacaaaatggtatcaccattgtcgaattcgtagacgtgactcgtttcacgttagcgtcggctgacgaagtgaaaacggaactcagacctttgttaaataataaagattgtcgaatgctcttcgactttcacgacattgaatttgtagacagtagcgccatcggttgtatcatcgctcttttcaaaacagcgaaaagtatcggctccagcctgaaactttgcaaccttacgccggaagtgttgaaaatatttgaactattgcacctgcaagtgatcttcgacatcaccggaacccgtgaaagctgcatggctgactacgtgaaataaaaaatgaagcctcctggaagggaggcttcatttttatcaagcaatcgtcagacaaacgctatctgatgcagctttttcattccagttgtatcacctgcccaccctacccgatcaccacgtgaaccgatgccctcacgtccagccttaccaaaaattttgcagaagacattaatttggaatgtagaatttaatcccatccccttttagtttttagtttaagtcgggtcaacactttgaaaagatacaagaaacgccccagaattaccctagttatacctataaaaaaagagttgtacccccttcggatacaactcttcaatataagatcaagcctaagcttgtaaaacattagtcacctaaagtagcaaccatcacggctttgatcgtgtgcatacggttttcagcctcgtcgaacacgattgaattctctgattcgaaaacatcctcggttacttccaatccgttcataccgaattgtttgtaaacgtcacgacctacttgagtttccaagttgtggtatgccggcaagcagtgcatgaacttgcaattcttgtttccggtcaattccataactttagcgttaatttgatacggagtcaataatttaatacgctctgcccatacttcagcaggctctcccatggatacccaaacatcagtatacaagaagtcgcaccctttcactccttcttctacattatccgtgatggtaacagtagcaccggtctcttctgcaatagccttgcaagtagcaaccaattcggcatccggttgtaattctttcggagcaacgatacgaacatccatacccattttagctccacctaccatcaatgagttacccatgttgaaacgagcatcgccaagataagcgaaagtcactttgttcaacggtttgtcggtatgctccatcatggttaagaagtcagctaaaatttgagtcgggtggaattcattggtcaaaccattccataccggaaccccggcataacgagctaactcttcaacgatatcctgtgcaaaaccacgatactcgataccgtcaaacatacgtcccaacacgcgagccgtatcagccatagattcttttactccaatttgagatccggaaggaccaagataagttacatgagcaccttgatcataagctgcaacttcaaaagcgcaacgggtacgagttgaagttttctcgaatatcaaagcgatatttttacctttcaaacgaggttgctcggttccggcatattttgctttcttcaaatcagcagccaaatccaacatgtatttgatctctttcggagtgaagtccaataacttcaaaaagtttctgtttctcaaattaaaagccataattttatttgttttagatttatgatt

SEQ ID NO: 10731 - DNA, 8878 bp, Unknown
  gut microbiota DNA sequence
caaaaacctgggcaacaaaatgttgcccaggaacttataaaaataattatcaattatgttgcggaattaaggtttatgggatttaaatggatggtttatgttgcacttgcccttttatggagtggctgcaaaggaaaaaaggacaacacgtatcaggatattgtacgtcctgtgagagtggtaaatgtggaatcattgggtgctatcaacaagttgtacaccggtgtcgtggaggccgaggagtacagtaatttggcatttaagttgtccgggccgctgatcgcgatgaacgtggatgaggggcagaaagtgaaaaagggacaagtggttgcagcagttgatccgttggattatcgtttacagttcgaggctaacaaagcggcttatttgacggctaaatcacagttggaacgtaacaagagattgctttccatgcaggcaatttcgcagcaggagtacgagattgcagaggctaattatataaagggtaaatcggcttacgaaacgtcggcaaacacgctggaagatacgaaattaagggccccgtttgacgggttcgtggagaagaagttcgtggagaattaccagaaggtgaacccgggcgagtcgattatcaagttggttaacccgaataagttggcggtgggttttacgttaccggagacgagtgttgacttaactcgtacccccatgacggtgaccgtggagtttgatacctacaaggggatatggttcaaggcgaaagtgaaagaatttattgatgcctcgcccgatggaacgggtatcccggtgaagttggtgattgacgatactcgcttttctagggacaagcataatatatatcccggtttttcctgtaaagtaaatttgaagatcgaaaccccggtggaggatagttatattgtgccgatgagcgcattgttcaagaatccgaccacgggagagacgtgtgtttgggtgtatgacccgaagacggagactgtgaccagccggaccgtggagatcgggcagttgtttgggagtgataagatcatggtgcaaaagggactcacgaacgaggatacgattgtcgtggcgggagcgaattatataacagaaggtcaaaaggtgaagttgcttaaatagtttaatatgatgaatatagctaaatattcgctggaaaatacgaaggtggtttatttctttttggccattttgttggtagggggagttttatctttcgatctactggggaaaaaggaagattcgcctttcgtgatcaaaacggcggtcattataacaagatacccgggtgctaccccgagcgaggtggagcagctaatcacggagccgattgaacgggagattcaatccatgcgtcgggtatataaaatcaaatcggattcctattttgggatgtctaaaatacaaatcgagttgagcccggcaaccccgccggaggaaatgccccagatgtgggacgagttgcggcgaaaggtgctgaatatacaaccttcactaccacagggagcatctacgatcagcgtgtcggatgatttcggcgacgtgttcgggatatattacgggctaacagccggagagggtttttcttatcacgatttgcgggaatggggacaaaaattgaagacccaacttgtttccgtggacggggtgcagaaggtggccttgtacggtgaacagacggaggtggtaaatgtgtttatctccatgtcgaagttggcaaattcgggaattgatctgaactccttgatacagacgattaagtcgcaaaattcattgattaacacgggagagaagcgggcaggaaatttggaattgaagatattggccgacgggacgtacaaaacgttggatgatattcgtaaccagttgatcgtgacacagacgggacaacaagtacggctaggggatattaccacgattgaaaaggggtacatggatccgccaggcagtttgatgcgggtgaatggtaaacgggctattggtataggaatctcgaccgatccggagcgtgatgtggtaaagactggggataaggtgaaggagcgattgagccagttggaggagttgatgcccgtgggaatcgaacttgtgactctttacccggagaacgagattgcacgggaagcaaacaatggtttcctgttgaacttggtggagtctgtggtgatcgtgatctttattattttgctggtgatggggactcgtgccggattgctgatcggttcatcattgattttctcgatcggaggtacgatgctgatcatgcagtttatgggagtggggttgaatcggacatcactggctgcctttattatagcgatggggatgctggtggataatgctatcgtggtgacggataatgcccagatattgatcaagaagggtatgcgtcgacgggatgctttgatcaagggagcaacggttccgcagtgggggttgctgggggctacgctgattgctatattttcttttttacccttgtatttggcgccttcttccgtggcagagatggtgaaaccgttgtttatcgtactggcggtttcgctgggattgagttggattctggcgttgacgcaaacgaccgtgttcggtaattttattctaaaagagaattccggagattcgagtaaagatccttacgatacgaagttctacaacaggtttgtttctgtgttacggggattgatcaagcataaggtgatcacgattgtttcggtggtctgtttgttcttggtgtccatgtatatcatggggattatgccacaaaatttctttccgagtatggataagccttatttccgggcagattgtttcttgccggaaggattcagtattcgggaatcggaggatatgatgtcagatattgaggcttatttgttggaacaggatgaggtggtgaacgtgtcggtaacgatcgggggatcgccattgcggtattatctggcgagcacgtctttcgggccaaaggcaaatttcgggaatttgttgatcgaggtggagaagaaggagcagtcgccgatcgtggaggagcgtttgaatacttacgtgcgggagaattacccggatatgttgatccgttcctctttgttcaagttgtccccggcggtggaggccgccatcgagattggttttatcggggagaatatcgatacgcttgccgccttgacggaacgggcgatgaatatcatgcgggaatgtgatatggtgacggatattagaagtagttggggaaatcaagttcctgtttgggaaccggcctactcgcaggaacgaggacaacgcctaggaattacccgccaatcggtggcttatgccttaaaaatagctacaaacgggttgtccatcggggatttccgggagaaggatttgtttatgccgatattgctgaaagaggatgggtttgatagtaagaatctggataacatgaagacgctgcccgtgtttgccacgtcggggttcacggtgcctttggcacaggtagtggatagttttgcctacgattatcattataacgtgatcaaacgatataaccgggaccgagtgatgatggcgcaatgtgatcccaaacggggtgcgaacacgaaagcggctttttcggaagtgtggaacaaggtgaaaagtatgaatatgccggaagggtaccggatgaaaatattcggggaagatgagagtcaggtggagtccaacgaggctttggctgccaatatgccgttgacgtttatcttaatgtttatcgtgttgctgttgcttttcagaacgtaccggaaaccgacaattatattgctgatggtgccgttgatttttattggggtggtcttcggtttgctggtgatggggaaaatgttcgactttttcgctttactgggcgtgttggggttagtagggatgaatatcaagaatgcgattgtactggtggaccaaattggtatcgaacaggagaacgggttggctccgctggatgccgtgttgcaggccacgaaatcaagaatcgttccggtggcaatggcctcgggtacgacgatattgggtatgctgcccctgttgttcgacgcaatgtttggcggcatggctgcttgtatcatgggtggcttgttggtagccagtttgttgactatcgtggtgttgcccgtgacgtattgtttgatattcaggataaaagcggagtgattttagattttaaattttagattggaaatttagcgatcacgattaaattttttaagtcaattcattttcaattattatgaggatattatttagtataggaattgttttgttactggtggggacggttaaggcgcagacgttgacggtagaggagtaccgtgcgaaggtgctggattataatcaggacatcaagcaatcgagagaggcagtcaaggcggcaatatacgcgttgaaaggggtgaaaacgggattctttccgaagttacaattaagcgggaattattcgtatcagatagaagacgtggaatttatgcaaggggttgatctgaaacacaataattattcggcagaggcagcattgtcgcagaacgtatatgcggggagtatggtacgcaagcagcaggaggcggcaaaattacagaaagcgattgcccgtctgggggaagagttgacgacggataatattgtttacgcggctgacgtgagttattggacgttggcggctaacgagagtctgttttatatttcccaagagttcgtgttgatcgtgaaggagttggatggaattgtacaaaaacgttttgacgagggagcgatcagtaaaacggacttgctgatggtgaagacccgattgaaggaggcggagttgcaagagtctactcggaatatgaattaccagacagcgatgcagtcgtttaaaattatgatgggggttcctttggaggaaaagtgggttattatagactcgatccagaaaccggtgatcgttccgggtttgcaaccgttggaagtggccttgaaacggagggccgattaccagattgccgtgaaggattttaatttgactaagcaacagactaagattatacgttccaaatatttgccgcaatttgccgtgggggtaaaggagacgtggggtacgccgttgattaatgtttccggtgatgagaaatttgcgacagtggcttttgcgaagttaagtatgcctattttcaactggggagagaaacgtcagtacgtaaaacagaatcgtgcgatggagacaagtaaggagttagccatgagtaaagttgaggatcaagtgaaagaggaactggcaaatgcctgggtgaagttaaacgagaactggaaacaggtggagattgccaattctacgttagaaattgcccgggagaatttgaagttgaatacttttagttataacgaagggaagttgcctattttggatgtattgtcttcgcaggcgacttggttgcaggcctacacgaacgtggtttcggcgaattaccagtataaggtggcgtatgcggagtatgtgagaattttgggaggacggtaggatttatgattttaattgtaaattgtaattcataaatagtgaattgattcagttataaattaagggtttttcccttgtttttgtgatttttgagagatcatgagaacaggggaaaaattatgttgttttttttcgggtttagcggggatttatagcaagaaattgtatttttgcagatcaatggataatacggtattaaaagtttgagagatatgacgatagaaaaaatgcttactcagcaggtgctggaggccgtaaaggcttgttatggggttgaattaaccgagaaagacgtacagttgcaggaaacccggaaggaatttgccggtgatttgacggtagtcgttttcccgtttacccgatattccagaaaatcgcccgaagaaacggctaaagagctgggagagtatttgaaacaaaatattgaagaggtggaaacctacaacgtgattaaggggtttttgaacgtggtgatttcttccgcttactggatcgaggtgttgaatgacgtggcaaaagaggaaaaatatggttatgcgaaggagcctagcgggaagacctacatgattgaatattcttcaccgaacacgaataaaccgctgcatttgggacatatccggaataattttttgggatggtcggtttccgagattcagaaggcaaacgggcataacgtgattatggtgaacttggtgaacgatcggggtattcatatctgcaagagtatgatcgcgtgggagaagtttgccaacggtgctactccggagagtacgggaactaagggagatcatttcgtgggggattattacgtgcgttttgacaaggagtataaggcgcaaatcaaggaattgatggagcagggcaagacggaagaggaggcgaagaaggaggccccgatattgttggaggctcaggagatgttgcgtaagtgggaggccggggacgagaaggtggtttccctgtggcggaccatgaacgattgggtattgaaaggttttgacgagacctataaaatgatgggtatcttgtttgacaaagtatatttcgagtcacagacttacaagaaaggacgtgatctcgtgttgaaaggtctggctgacggcgtgctttaccggaaagataccggaagcgtgtgggctgatcttaccggtgatgggttggatcacaagttgttgctgcgggatgacgggacttccgtttacatgacgcaggatattggtacggcatacgatcggttcaatgagtttaacatggatcaagagatatacgtggtaggtaacgagcagaattaccattttcaggtgttgtcactggtttgtaagaagttgggattcgattgggcagacaagatcaagcatctttcttacggtatggttgaattaccggaggggaaaatgaaatcccgtgagggtacggtggtggatgctgacgatttgattgacgagatgatccacacggctcgtacgacttccgaggagttggggaaactggacggttacacgaaggaagaggccgaggaggtgtaccgtaaggttgctttgggggcgctgaagtattttatattgaaggttgacccgaagaagaccatgatgtttaacccgaaggaatcgattgattttaacgggaacacgggaccgtttatccagtacacctatactcgtatcaagtcggttttgcgtaaggcggaagaggctggggttaagattgttccgggagatattcacacggcattaaccgagaaagaacagaatttggttaagctgattgctaaattgcccgctgtcgtgaaggaggcaggagataattatagcccggcgttgatcgggaattatgcttacgagctggcgaaggaatttaaccagttctaccatgattattctatcctgaaggaagaaaacgagcaagtgcgtaatttacgtttgctactggcacaacaatgtagcgtggcaatagagaatgccatgggaatgttgggaatagagatgccggagagaatgtaatgattttagattgtgtgattccggctacttgaaaccggtagttggtaaaaaaatataaaatatgaaaaagattgcaccgaaagatatagataagaacgtgatcaagttgatcgggcaggattggatgctggtgacggctggggatcaggagaagttcaacatgatgacggctagttggggatcgatggggtatttgtggaacaaacccgtggtgatggtgttcgtgcgaccacaacgttatacgttcgagtttacggagaaaaaagatgagtttaccttgtcgttttttgacgagaagtatcgtcatgcgttgaatgtatgtggttctgtttccgggcgtgacgtgaacaaggtgcaggaaagcgggttgacgccctatttcacggaggccgggaacccggcttttgaggaggcaacattggtgttggagtgtaaaaaattatatactgacttcttaaaggaagaggcttttctggacaagaagatcgtggatagccagtacggtcagaaggatttccacaaagtgtatgtggccgaaattgttcatgcttgggtgaaggagtaactgatggatttgtgcacttatcatagtcattgtaatttttgtgacgggaaagccccggcggaggattttgtgagggcggctatcgaggcaggatttcatagttacggtatctcttcgcactcaccgcttccttttgagacacgttggtctttaagcaaagggaacgtggaggcttatctaatggagctaaagcgtttgcaggagaaatatgcgggacagattgagctttacgtggggatggaaattgattatctgaatgatgattggggcccagcagtagagtattttcagcgtatgccgctggattaccgtatcggttctgtgcatcttgtaaccgaggaacagacgggagagattatggacatggatgggaagtttgaggattttcgggagaacttgcgtatggtttttcgtgatgatctgaaatatctcgtggaggcttatttcaaggcgtcttcccggatggtagagttgggtggttttgactttgtggcacatttggataaaatatccatgaatggttcactgatggatagcacgctgacgaaacaagagtggtataaccggttgttgtgggattatatgtccttgatagcggagagaggcgttatggtggaggtgaacacgaaagcatacacgaagaagggaatgatgtttcctaatgtaaagtatttcaagtggttgaaagagttgaatattcccgtgatggtgaattctgatgctcatttgccccagctggtaaatgacaatcgggcgttggcattcgagtggttgcgggaagtcggaataaaaagcacgatgcgt

SEQ ID NO: 10732 - DNA, 22619 bp, Unknown
  gut microbiota DNA sequence
tcgaacccccggtacctcgcagtacaacggttttcaagaccgccgcaatcgaccactctgccacctctccaaatgcggatgcaaagataaaggaaaatttaaattcacaaaagaaagaatttgttttttctcaaaaatatccgccccgattaatacagtttaaaatcccgatcccgtaaactcttgacggcaaacttctcgtgtaaaaccaaaggagctaactcttctcctgacagacttgattttgccggaataaaaaccgtatggggatagttcaaaataagaccatgtagtaatttcacccgctccatgtgaaaatcagaagtaacaattaacaacaaatccggcctttcccgctcgattatcggttttgacatccggaagtcctctaccgtattcgtggtcagtgcgaattctaagaaatcactttcctttactcctcgctcgatcaaaaaacgttttgaataataggcatgaggatgattggtcgtgttgaatgattcaccaaatcccccggtacaaagaatcttcacatcatcattatgaagataaagccctaatgtacactctagccgatccaccgccatcgggcttaaatttccctgttcatcattcggtgcccccaatgttaaaacgatctgtttcatataataccccggttagttcaaatttacgattccaaagttaaagaatattcattatttttgtaaacaagacaacgtattattaacacaggcaaaatgacagaatcatggatggaaaattaagtatcaacacggaaacctgcataaaatgcggaaagtgcgcacgagtatgcccttcacagatcatcacacaggaaacaaaaggctccgcggtaaaagtacaaaacgtagaaaactgcatcgtgtgcgggcattgcgtggcagtatgtcctacaaactcggtacttcattccgaattcccgcctgaaaaggtacacgcattcaaatacagtgactaccccacccccgaacaaatgatgctcgtgtgtaaagcccgccgttcaaacagggcattttcaacccgaccgattccaagagagatgctagaacaaatcatcgaggccgcccatcgtgccccaacggcaagtaatatgcaacaagtatacttcacgctggtaaccgatcccaaacaactggacgcaatcagtcgtttcacgctagacgtatttaactcggctgccaagaaattgaaaaacccgatactaaaacctatcttgaaacgaattatgccggatgcctaccgttacttgcccgtgttcgaccgtctgaaacgggagtatgccaacggacacgacatgattctgcggggagccacagccgccctgtttatccacacgccaaaaaacagtcgtttcggaagtgcagatgcgaatctagcttaccagaacgggtcactcatggcggaatgtctcggagtaaaccaattctacatgggattcgtctgcaccgccatccaccaggaaaacaaggggactctcgctaatatgctgggcataaacggcacgattcacgccgccatggccctcggaatgccagaattccgtttctccaattacattgacaaaaaagacacgatagaaacagacctgtaatttactatgcctcccaaccgggacttactgctctgccaatagtttctgcaactttgccggagtaagaacttcacgggtataaaatttcccatccacgaacacgctatacgtggtaagcggcgcccgatgacttcgtgccatttcacgagtcattatcgggtgtatccgtacgggaacacttctatttcggaatttcccggacaacctgacaaggatttcccacggcaaccacgttagccggaatatcctttgtcacgacactccccgcaccgatcaccgtgttagcaccaatagttactcccggtacaatcgtcacgtttcccccaatccagacattgttcccgatatttaccggataagcgtattccaaccccgaattacgaatctctgcatccaaggggtgacctgccgtgtatatgttcacgttcggagcaagcatcacgttatcaccaatcgtcacgggagccacatcgagaatcgtacaccccacgttcgcgtagaaattctccccgacgcggatattatacccgtaatcacaattaaacggctgttcaatcagaaaatcgttcccagtacctcctaataattcccgcaagatacgttccctgatctctttctcggaaggccgggtatgattataatcgtacaacaactctttggcccgaatcctctccgcatatagtacggggtccatggcattatatagctccccgccaagcatcttctctttctctgtcttcatcattttttttactttatacaaagaggctgttcggaaagtcattatgaaatgaatttcccgaacagcctctttgactaagtatatttctctctatcaagcgtctttcttggcatactcggacaattcacacccgaaagtatccatcaggtaattatccagctcatctgccttaaacgccatattcgtgatatttttctgtacctcgtctgcaaaatcagagaagatatcggagatatgaatccggtaagacagataaatctggttgccgtccaatcccaattgataaggtttcacctctgcattcaacaagtacgtcaacacgggttcgagattcttcttcggtaacacgttgatcggtgaagtacagaacaggtaagaacgctggtacacgaacatacgaatctcagaacttcctttgtggaacacccaactctcgtaaccgacacgggctaacacgggattaattcccatagcctgaatagcttcctcgcagaaaacagccaagtcggtcaatgaacgttcttggaaaacattcgacggcaacttatccccgcatgacgggcaatattcctcttcatcggaaataaactcgtcacaactgttacattgcacgttatatacacttgtatccagatcaccgatctgttccaataactcacgtaaagccgtcaccggaataccgaatcccatattatccgcatccgtgatcttgctagccgtgattgctaccagttcatcctggtcgttgaacatcggtcccccgctgtttcccggattcacagcggcatccgtctggatataataactatcgttaatcaactgccttggggacgacacggttccctcggttaccgtgaacggcatcccgaacgggtaacctgccacgttgatcttctgcccgatagacacgctatctaacgcagataaagcgatttccggtagagcagagaaatccccctcggcctttaaaaaggctatatcctttgccgggttcaccaacacaactctagcgtaaaaacgatttttgtcgttatcttgcagggcaacctcgcggaaaccgtccaccacgtggtaattcgtcacgaacaggtcataatttttcaagtaaaaacaactgcctgaccctccggcatgattgaccttatatacagtattaaaaatattctgttccataatcattaaatttcattattgttgctgaccattccccatataagtggcggctaactgttgtaccttcaacatataatcttccatactcacctgtccggcagctaacttttgctgcaactcctgcaccttctgcatatactccatcattccaccgccctgttgcatggcttgtgccgcttgctgcattccttgttgcatcatttgttgcattccttgcatcatctgggacatatcaaattcatcttcctcgtcgtcgtcatcatccggttccaactctccctccataatattatccatggccgcatgcaagatcggagctgcctcatcccaaggtttggcagaagctttttccaaggcacgcaccacaaccgcattcacgtcatcctgcacgttattataatagtacatctcgtagaatttgtatacaatcatcaagcaacacgtcatgtaatcacccgtttcaaacgcttgggtggcacgattgtatgaattctcgaaattctcctggatattcttcaaattagaacgacgtttatccgaaataaaggtctccacgtagtacaaatcctcagcccattgctctttcgtcattccctgcaagcgggcaatgacagacttcccgtaattcaccacttccggcagcggaatatcttcccgatccatctcggaaacggccttattcaagtcgttcaacaactgtccctgcgggtgagcgtaatacaatatcttcaatatcgtcgtatccagcacgttccacgcgaacccgtatttccggtccacctcgaaatctttcactgcatccatacactccttgcaactcaattgtaccacctcataaaccatattcagcgtctcatcgtcaaaaggggttaccttcggttcatatatccgttgggccccgaacttggtctcgaactcgtcgtcatatttgtctcccgtgttacaaatctcctgaagaatataataaatcttgtaaggatttgccagtgccagtgggcaagtgtactcgaatgccaatcgatcctttttcaactcaacttgagccaagtccatagcgttaaaattcaagcctgcaacctgccgtaacaagggaatacgattcttctccggcaaagagagaaacggtgcgtgaatcaacaaccgaccatcctcgatctttatattcaccacgatcgaaccatgaggaatattaaattccgttcctttcgcatttccgtatttctcacggaattcgtcgttcacataatccaataaagcatagaacgactgcaaatattctccattatcgaacgcctctacgctcgtatcgaaataatcgaccttaattttactttccgtagaagcgatcgtggaaaggttaaatgtcaatgtttgtttcatgacttataatgtattaaataaataattatgattcacgcactcactcgtgccacatccacacgggaacgctataaaattatacaattatcagagaaatccactcctagacttatgaaaataggttataaacaaaaaataatcatcaaatttctcataatcaatatctcaaaacatataatttatcataagcaatcaaggccgcaccaccagtatacaccatatcccgaccaaaccttctttccctaacaaataatttttaataaaaagtttgaaactgcacctactcttttatcgtatatacagaaaacttataaactcaaaaacactcaaaacatggaaattacacataataaaaccagacatatgttcgaattcaccgaaaacgggaattcggccgtcgtagaatacaaatcctttaacgagggggatcaacattttacacacattcgttcccaaacctttgcaaaataaaggctacggggctaaacttgtgaaagaaacgttggattatgcacgggaaaatcacttgaaggtcatcataacctgtccttttgcccgcatatacatggcccgtcataaagaatacgaagatctactttaatgcaatcttctctactggcaaacacctgcacatcagaacgaaaaacaaaaatatcacaaaaaaggagtgtttgcgacagaatatttttcccaaaaatatagaaatttataattctatccttgggaacatcggtaaaatttaacaactttgtggtgaattacaagaagtgtgtagcatgaaatattacatcattatcgcaatactaatatgtgttatcctgtttattttatacaagtatatacaggcgaaacaaattattagcgacaaaaaaggagaaatcaaaacttctgaggcactattcaattttattttacaacacataaagtcctacatccttgttatcgacaggaactttatcgtggagaaaacgaactattacgcaattacagacaccgaggactccggacaacctaaaagagtcggggaactactcaattgtgtcaattccctgaataaaggttgcggcaacggagaactttgcaaggcttgtcccatcagacaggctataacggaaacatttaaaacgaaaaagagcttttctaacttggaaactacagtaagcctgcgtctatcagacaagaaaaccttcaaatgtaatgttgccgtttccggttcatacatgaacattcacaaccgtccggaaatgttaattaccattcatgacatcacggaactcaaacaggctcaaattcgcttacaagatgctttagccaaaacagaacggattgaaaagtcaaaattcacatttctcgaaaaactgagtaatgaaattaacgaccagttaaactgtatcttaggctggaccaacctggtaagcacggataaaacgttgacacctaaccagcaaaacgagtacatgaatcttatatacgaacactccgaccaactctcgcatctgtcaaacgacgtgttacggctggcccggatcgacacgcacaagatcgatttacagatgacaaccttctacctgcacgagttttgtcaggatattatccttcttcgaatgaacaacacccacccgaacgtggaattgtatttggaaggagacaccccgaatctcttggtgtacacggatcaacaaaaattatatcaggtaatactcaatctcctgtccaacgcccagaaattcacgaacaaaggacacatcaaactcgcttattccgtggataaagaacaaaatatgataaacttcatcgtggaagacacgggcttaggaatgccacccaaaatacacacgtatctcttcgagagattttacaaggcaaacgcctttaccgacggccccggactgggcctgtctatttgtaaggcatacattgaggcgatgggcggaaccattcaatttacctcttctgaaggacgtggaactcgtttccatttctctataagaaaagaaccgatcccggcaggtgatgtcgcgctggatgtgtacaagtaatacattatccgccgccacgaccaagtgtttgagtttttaatataatttacaagaccggctcaaaccttatccgggaagtttccgtttatcacgaaaaaacgacacgaatggaaacaactcaaaagccaaaagagatcatcgggcatctcatggtcttgtcaacaattgtcatatatagctttaacacgaatttcatgaagatcctcatgccggaatggatcggtcctcatggcctcgtgttaattcgttgcacggtcatggctttcggtttctggatcatctccctcttcatcccggcaaataaacaacaggcaaaacccaaaagaaaagacatcctcatgatgatgttgggtggtctgctcggtatcgggggtaacttactgttatacatcaacggcttgaacatcactggtcccgtggatgcttttgttatccgtaccgtgcaacctattatcgtaattgcactcgccgtactgattcttcacgcagacttcaatcgctacaaagccatcggtatcattttggggcttgcgggaactctttacgtttcaatcaccccgcacaccggagtggtgaaagactcattcacgggagatgtcctgatcttcgttgcctcggttttcaacgcactctatctcatattaatcaaaccctacacccagaaattcaattcgattatagtgatgcgctggatgagcttggcagcctttatcctcgtacttcctttcggcttgcatcaagccctcaaagccccgctattcacgtcagaggcccccgtacatatttggttggaactcggcttcgtgcttattttagccacgatgatagcctatttcctaaacttgaaagccctgctatacatttcgcccttcgtggaaagcgtgtatatttacctcctccccatcactggagccatcgtgtcaatatcgctcggcctccagaaattctcatggcacgacccgatcgccctggtattaatcattgcaggattcgcattgataaacaaaaagaaaaaagtgaaagttgttataaacaaatcttgaaatcaaactataaaaacactttcatactctctgataaatcggcaataatacccttatgtttcttcagaaattcacatattttcattttggactcgggattctgtaatatttccggggattccagcaccaaagtcaccacgttcagcaactcgtttgtctccttgacacttgttgccaacatctgcatgaaaaacactcttttctccttatcctcgaacagaatttcgatctctttccgtaattcctcaccattaatattcgccaatttatcctcactcatcattgttttatctttttaaatttccagattttaccacaatcaaaactttactcatactccattcttattatgttttgtattctcactttccccacaaatacccggacacaagttagcatattttcattacatttccaaacatgtcgcaataatattccattttattccaataacaaaacaaatcaacacaatattgtcactctatcccttcttccacaactgccaacgattgatactattcttcaatggaacataagcggcaggtcctaatgatcccaccatgtcggcaaccgctcaacacccgatcacaaattgtccgatacacaataacaacgcggcaaaagcgattaatccgtacccctctcaacgcaatagtaggtttctccaacttgttggctgacacgagcgacatcgaagaaagggaacaagtgcatccaattccacgcgtaagactcgggcatcgggatctcggcaaagaatcaggaacaaatcttcgatcgttttataaaattaaatacctttgcgaaaggtacaggcttgggtttgtccatctacaagagcatcgtctaaaaactgggcagggaaatcggggttaaatccacactaggatgtggctccacgttctggttctcgctcccctacgatcctttgtacaaagcaaagtcaggcgctaccggccattgataatttgcttaacacgatcgaatatgccattaaatcccgaaatatcccgtttcatccgggagcatctggacgacaacccggatcaattactatggaagaaaaacgagtacccggatgatcgtgtcgtggtggccgtggaacaaattcaagcccgggagaatatcaaggaaaaacttccctcatggtatgcctgccgggacatcttctacccgtccaagctatccaccgaacaatgctcatccgagacaacagctccctacaaggctcggctcaccacgggtaactccctctgcgacctcacgggtggcttaggcgtcgacacgtacttcttttcccggcaagtcgataaagtgacatacgtggagcgtgataaatcgtactgcgaagctgctcgtttcaatttcctagcgctgggagcaaccaacatcgaggttattcacgctgacgcaacaaccgtggccaaccaagttattgccgacacgtactacatcgatcccgcccgccggacaaccgataacaagcgggtgttcgccctgaccgactatgctccgaacgtactggaaatcaaggaaactcttttgcgacaaggtcaacgcctgatcatcaaaatctcccccatggccgacctttccgcagtcctgcaactcctacctgaaaccaccgacgtgcatgtggtttccgtccgcaacgaatgcaaggaacttttattcgtgctgggtaaaaaacggacaagtcaagcggtgaacattcacaccgtgaattttgctaccaacacggagcaatacttttccttcctcttggaagaagaaaaggacgcacaacctcgctacacgagtcatatcggctcctacctttacgaaccgaacagttccgtcctcaaaagtggggcctttaaactcgttgccaaccgttacggactggagaaactccatcttcacagtcatctctacacctcggatcatcttgttgaagactttcccggtcgtgcatttcaagtcaaagaaatactagacttttcaagcaaactgctaaaacagatttcccgcactatccccaaagcaaacatcaccacccgcaattttaaactatctgtcaacgaactccgtacccgaagtaagataaaagacggtggcaccacctatctttttgccaccaccctcaatgacgggcgagccgtgatcgtgaggacagaaaaatgaagtttgtatgaatcttttcgcttgtctctcccgtatagtgcagaaaactaaacaggaccaacatgaaaatacaaaccggccatggcatgatcacgctcacggcactccttgccatctattccatatcgatggtaacttcattacccggcttggccatctcgccgattctcggtgatctcaagaacattttcaaggatgccagcgatttggagctacaaatgctcgaatcgctgccgtcatttatcattgtcccgttcatcctactggcaggacgattatctttaaagattaacaaaaaaagaattcttattatcgggttatcaatattcttcgggtgtagcgtgatttaccctttcagtaattccctgtggctgctactggtagtcagcgcccttttgggcgtcggggccggaatgatcatcccattttccacgggacttatcgctgacaacttcacgaaacgttacaggacccgccaactgggaatcgcctcgtcgatcaccaatatcacactggttctcgccacctttcttgctggcgttctcgccaacatcaactggcattacgcattcctcgtgtactgcctgtcggggatctcgctgttgttcgcttttaaactgaactctgcccctccggcaacacctcaaagagccaaacctacaaacgatatccccgtatcgacaaaccacaactggccggtagcactcatgtttctctattactttatcacgtttatcgtgctgacagtcccttttaacctatcgatctacatggaaacgttgaaattcaaggatccggacatttccggcacgtatatttccgtctttttcctcgccatgacaattcccggactttttatcaacaacatcatcgggtggttgcgcagttacacgaacgtgtattcctccgcggccatcgccctcggtttcgtgcttttcctcgtgaaaggtgggccagtactgctaaccatcggtgttattcttatcgggttggggtatgggtgtatgcaacccatcatatacgacaaaacatccacgagtacggccgaatcgcacgcaacattcgcactggcactggtgatggccatgaattacatggcaattatcacctacccttttattctcgaaattttacagggaatattctccacggatgcctcctatttcccgtttttatttagcacgatactggccgggatatttgccgtgttcacctattttaaacgaaatacgagtactttggagatacaaattcaacgttaaatatggcgcaagaaagaaccttcccgtcttttctcccgtatttaccccatgcaaacaagacagatataactaaccaaaatttctagattataaattctaaactaaattaattcaagatgacaacaaattcaaacacaaaaggaaccgcaatgaaactcggcgtgataaccctcgcgattatgaacgtcgcagcggttgtgagtcttcgtggcctaccggcagaagccgtttatgggttgagttctgcattctactatttattcgcggccattgtattcctggttcccacggctcttgtggcagccgaattagccgccatgttcgcccagaaagagggtggagttttccgctgggtaggtgaggcgtacggaaaacgtttcggtttcctagcaatattcctgcaatggatcgagagtacgatctggtacccgacggtcctgacattcggggccgtgtccatcgcgtacatcggcttgaacacctccgaagatgccctgctggcatccaacaaaatcttcacgctggttaccgtgctggctatttactgggttgcaacctttatctcgctgaaaggactaggatgggtaggtaaagtttccaagatcggggccatggtcgggacgattattcccgccgggcttctgatcattttcggtattatttacatttccacgggcgggcataataacatggacatgagccaaggtttcttccccgacttaaccaagtttgacaacctcgtgctagcctcaggaatcttcctcttctacgccggaatggagatgatgggtattcacgtgatggacgtgaaggaacccgcatcgaagaactacccgaaagcgatctttatcggtgccgggattaccgtggttatcttcgtgctgggtacgttcgctctggggttgattattcccgcaaaagacattaatctgacacaaagtttgcttgtcgggttcgacgggtatctcaaatacctgcatatcagctgggcatccccggtaatagctatcgccttgatgttcggtgtgcttgccggagtgcttacttgggttgcgggtccgtcaaaaggtatcttcaccgtaggtaaagccggttacctccctcctttcttccaaaaaaccaacaagatcggggttcaaaaaaacatcctgttcgtacaaggaggagttgttacaatcttggcattgttattcgtggtcatgccttccgtgcagtcgttctaccagatcttgtcacagttgaccgtcttgttgtacttgattatgtacctgttgatgttctctggagcaatcgtgttgcgctacaagatgaagaaagcaaatcgaccgttcgctatcggccggaaaagtaacgtcgggatatggatcatcgccggattgggattctgcggggctttgctggctttcgtgttgagtttcataccgccttcacagatcaacgtgggtagtaacaccgtttggtttgccgtgttaatcatcgggtgtatcgtggttgttgccacgccgtttatcatctattccttgcgtaaaccgtcatggaaagacccgaaagctgaaatcgcaccgttccactgggaagaacaaccagttgccccggccacttcagcgacttcaactagcccggccactccggatgcaaaaaaataaaaacgtaaagactttcccccttacacacggggagaaacgaacgcaagaatacgtcacaatatttcaatgtagtgaatcctccccccgtgtaagggggagttaaaagggggagtcttttattctaaattttaaattccaaactataattacaggtatgaaaaaaacaattacaagcaatgacctcaagaatctagtgaacgaggctcatgcacaagtgaaggatttgaagggtgggaaaaacgcaaattatattccattcctggacaaaattgattctaatttatttggcatatccgtttgtctcccgtcgggagaagttatcgaggccggagacacgaattatgttttcggtatcgaatccgtttccaaggtgtacaccgcaattctagtgttacgccagtacggggcgcaagccgtgttagacaagatcggagcggatgccacggggttgccgtttaactcgatcatggcaattttactggaaaacgatcacccgagtaccccgctcgtgaacgccggggccatcagtgccgacagtatggtgaaacccgtgggtaacagcgaggccaaatggaaggctatcaccgacaacatgcgggaattaagcggcagcgatctgaagttactggatgaactctataaatcagaatccgaaacgaacttcaataaccgttctatcgcatggttattaaagaatttcaaccggatttacgacgacccaaatatgtcgctggacctgtacacccggcaatgctcgatgggggtgacggcaaaacaattatccatcgccgcttgcacgattgccaataacggtttgaatcccgtgacaaaacaacaggtattcgacccgtcgttatctcctaaaatcacatctctgatcgctactgtaggattctacgaacacacgggaaactggttgtacaccagtggcgttcccgctaaatcgggagttggtggcggagtactcggggttgttcccggcctgttcggtatcgccgctttcgctcccccactggacgaggcaggaaactcggtgaaagcacaggctgccatcaagtatatcgcacagaaattaaacgtgaatgtcttcgggggagatcacgtggaagtaatcaattagttcgtaaagttcataagtttataaggtttataaagtcatgggtgtccttcggaccgtgttttggaacagcctcgacaagactttatggaccttatgaactttataaacccattttctatgaaaagaagtaaagttttcgagcaaatactcaacgggcttgtattattgggtagtttggcgattatcattgttgcctctatcgagttgctggatgggaataacgcactcagcgagactttcatattgaaattccatctttgggtgtgcgggcttttcctggctgactttttcgtgcgctggtacacggatggatggaccgggcgtttttttaatcataacctctttttcctgctggtctcgattccttaccttaacatcgtgtacggtttgtcaaccactatatcccattccacgtggctaatcctgcggttaatcccgctggcacggggtatttacggggtatcacttattgtgggctggatgacacgtagccggatcacaaacttattcgccacctacctgacgattcttttcacgacgatctatttttgcagcatcgttttctactacatggaacacgatgtcaacccacccgtgaaaacatactgggacgctttcgactgggcgctgatgaacgtcaccacggtcgggtcgaatattttcggggtcacgaagatcgggcaaatccttgccgtcattctcgccgccgcaggtatgattttcttcccgatattcacggcttacgtcacgacgatattccaaaataaacggcaaagtagcaaaaaagcagagtcgtaacaatttacaagtacacgatttccacgccttccgggatctcgtaaggcgagttaatcggcctaccggcctcgtcttcccagaagacacgaatctctttcaaatctttattcggaatcacgactagctttcgtaacttactatttccagaaatatcaagcactttcaatgacgttcccccggcccacaattcgtaaagagactccgcaccttgaaggttcaaggtcaccaatagggaattacccgcgcaatttaaataccataattttgtcagcccgctgatatccaaccgggtcaacctagcctcggaacaagttaaagcctccaaagcgtcggcccccttcaccacgagttctttcaactgctcgcatccgccgcaactcaatgaagtcaaatgcttcaattcgctcacgtcaatcgtgctgattcccgtttgccaacaatccaatttctctaaagcctccgcaccgttcgcttttatacttttcagcaagggtgtttctgtgcactccagctctttcaacgcttttaaagcactaatatccaggctttccaaggccgttttgttacaacgccaatgggccaacgccggaaggcgagtagcatccacggaagtaatacccgtctccgaacaatccagttgaaaaagactctcggcaccacttatcacaagccgggtcaagcgaggattatcaagacaaaacaggtattctaaccgtgttaactcgctaacatcaagcgaggcaatatctccgtgctcacaattaatactcttcaaagcctttgccccgttcacggtcagacgggtcatccgtctgtttttctcgcacgaaagcttctcaagcttttcaagttcactcacgtccagcgaactaaccccggtctggttacactctatatttaacaaagcccccgcaccgttcaccgagatagtctccatgtccggattcaaattacaggataacgtggtcaacttttcgagggcgctgacatccaaggaaccgattcccacctcgttacaaaccaacgtgtccaacccgtcggcaccgttcaccacgatcgaactcatatccggatttaacgagcagtccagtctccgcaagcgtttcagctcgctaacgtccaatgcggtcaatttattacgggaacagtccagtacttccaatttatcggcaccgttcaccgtcaaggtctgtaacccgccgttacaagcaagtctccgcaaagacttcaatccgctaacatccagcgttttcaacgtttcactccagcaagacaactcctctaaagcatctgccccgttcacgacgagcgaacccaactggtccttagaaaaaccgcaataaaggtgttttatcaatttcaaatcgctcacgtccaacgctttcaaggacgtggaactaatatccaattttaataacgcattcgcaccattcacggtcaagctctccaaggattcgcacccgctgcaaatcaacgtttcaagactcttgcattcgctcacgtccaatgttttcactccaatccacccgcaatccagttctctcaaagcgtcagccccattcacgacaagttcttccagactccggttcatgtaacaatcaagcctccgtagcatctttaacccgctcacatccagccggggaacactgcgttccctcacgctaaggaattccagtttgtcggcaccgttcacaacgagcgtgtccagtccataacacgcattacactccaggtaccgtaaagacttcatcgcactgacatcaagtttcttcagttccatcatttcattacaccgcaacgtgtcaagcgccggaaaagaagtcaagtccatcatcgagcgaatccgcaggtcggagacatcgattgtcttcaccgcagcagcttctcccaccgataacttcccgtccttatccgtgtcaaactcgtccaaacagtattcatgaaacaccctgtcggaaataacaaaagcaccggaagaagtcgggttaccctcctgcatcaccttcacggtcaaaatgtccccttcctcattccgcacgtataactccatttcccgctcggtgatatacgaattttcggaatttactttcagtgtcacaacttgatcatgcccacgtttcccctcggaaatcaacgcctgacaccaagactcctgccctgccatataaatataccatcccgaattcgatgtcacggtaaacgttttcccccctgaatcgttccacacgaaagtgatcgggtcatccgcattcacctcaaatcccaagtcgaccggatccttcttacaagaaaacagcacgaaaaccatgacaagaaacacgcccacattcaaacaatttttcccccacatattgcacgagttaaagttaccttacaaatgtaagaaaatataatcaaaaatcatacgactttctcccaccaatccatcacttccttaacacttcttcttctccaccactcctccaccacttcataaccactcttccacctgtatacatgtggtgaaagacagcatgttagctatttattttctattaacataaaaaaagacaaaaaagaggaccgccaaggcgatcctctatgtagtaaatagttgacaaacagtatgtttatctggaatgattaaaacctctcggtttctgcggttctttctttgcccacatcagagcgctatttgtcggctctttaagagcatccaactggttcacgcaacgtttgatgtcctccatcaacagatcggccaaatcaaacccggttccctgtcgaacaacaacacgcatgattatcacgtcctccatcgctttcggcatcgtgtaagcaggcacctgccatccctccacgtgcaacgcatccgacaaatcgtacaaagtccatttccgatttggatcatctttcaatttccagatgaacaacgggttcggcatatcattactgaagaactcgaaaatacccatctttttcaattgctctttcaggtagagacaaacgttcaggcaattttgctgtactttcttgtacccttccttacccaagcgcatgaattggtaatactgggccaatacctggttacccggacgagagaagttgattgaaatactcgggatattggctcccaaatagttcacggcaaagttcatttcctcgggcaagtattgcttgtctttccaaaccacccagcccacaccgggatataccagaccgaacttgtgacctgaagtactgatggaaagtacccatttcaaacggaaatcccaaaccgtttcgggatcgataaacgggtgaataaacccgccggtagcagcgtccacgtggatgcaaatctcccagcctttctcggtgttcaacttgtcgagcgcatcgttaatctccttcacgttatcattcaacccggtaatcgtcacaccctgaatcggcaccacgcaaatggtgttctcgtcacaagccttgataacatcctgtgggtcaagcgtgatcttctccgccgtcacgggaatcatacgcatctcgacgtcccagtagatagcgaatttctcccaaaccacctgcatacaggtagagatgatgaaattcggtttatcgataggaagaccttttgccttacgtctcttctgccagcgtttcaaggcggcgataccacccagcatacaagcctcggaagaacccacggtactcgtacccgtgcaatacggtttctccggcgagttccacaacttggcaaggatattcacgcatcgacgttcgatctccgccgtttgcgggtactccgtcttgtcgatcatgttcttatccatgttctcggtcatcacttttctagcgtaatcatccatccatgtagtcacgaaagtcgccaagttcaaacgtgaattaccatccaacatggcctcgtcatgcacgatttgataagcaacttcgcccggcatcataccctccggcatctcgtatttcggtgccacccgggcctcttcatccgtcccaaaaaccggtgtgataggattttctgtcttcataatttaattagtttagtttatttagaaaatttttaaagggcgtgtctgtcaagacactcgtaaataattacgatgtcgcgggacgaaagtttcaacctcccgtcacatttaacaacccttgtactttactgacatcacttacacatccttgacaaccagtcctagatagcgggttaaatccaacgcctgcacgggcgacacgatcacgccacgtaaatcccccacacccagccgcaggccttccaaccgcgaggatgttaaatctatgcccttcaatgaagtacgggaaaattcagcctccacgagactacacgtgtcgaacgccaccgcctccagccggcaactctccaaggcacttccctgcatatcaccgtgggcaaaaagtacttgtttcagacgccccatcgagagattcatgtaacgggcgttacaatgctggaacaacacgttattcaacacgccgtccgataggttcgtccccatcaacttgcatgaacggaattccacccggaacaacacgctccccgataggtccacgttcgacagatcacaattctcaaacaacacatccgtgagtcgagcctcccggaaacgacaaccgggaaacgagacgtgatcgaacacgcaggacgacacgttcacctccgacaaatccaccccgtcaaccacttcccgactgaacgagcgacaatctacctcgtcatcattcaccagtaactcgcagaacaactcactcccggcttccacgccccgtaagacgggcggcacaattctcacctcgttattactttttttcacgtgacctgattttttgtttcacgcaaatatacacaaacctcttcctggataaaaataaacccgatagaaaaacatttcaagttaattctcagtataaataagagaatattaattatataatgttatggaaacgagcttcttgaaacttatagaacacagcataaaagaacactggcaccttccttccctaacggattacgaaggggcagagcacaattataaagacgtggcacgatggatcgagaaactacacattctcttcgagaaaagcggcatccaaccaggggataaagtagcgctatgcagtcgcaacacgtccaactggggaatagccttcttcgccacgctaacttacggggctgtggccgtacccatccttaacgagtttaaacccgatacgatccaccacattatcaaccactccggcgcccgactccttttcgtcggaaaatccgtgtgggacaacatagaccacgaaagtatgccaatgctcgatgggatcatcgccatggctgattattccgtgatttcctctcgcaacacagtactcgcagagatcgcaccccaattagaaactctgttcaaagccaaatatcccgaagaactacgaaacaaggacatacactaccgcacagaacaaccggaagaactggccatgatcaactacacgtcaggcacaaccagctccccaaagggggtgatgcttccctaccgcagtatgtggtccaatctccgttacgcccttgaccaaatgggttacgcaccgggcgaaaaactcgtttccatcctcaccatggcccacatgtacgggttggccttcgaattcatctaccctttcgccagtggaatacatatctacttcctgcaaaaaatgccctcacccaagatactgggggaagtctttgccgacatccgcccgcacctgatcgtcgccgtgcctttaattatcgagaagatcatcaaaagccgggtactcccgcaactggaaaagtttcatatcaagctgatgctaaaaatgcccatcatcgggggaaaaatccgccacaagatcaaacggcagattcttgatgctttcgggggacaattcaagctactcgcagtcgggggagccgccctcaataaagaagtcgaggccttcctccattccgtgaaattcccctacaccgtgggctacggcatgaccgaatgcgggcctgccatcgctttcgatcactggcaaacgttccgtcccacctcctgcgggaaagccgtggaccgcatggaaatccgcatcgactcatccgatccgttcaaccaagtcggggaaatcctcaccaaaggcatgaatgtcatggacgggtactacaacaacccggaagcatccaataccgtgctttctcccaacggatggctccacacgggggatcttggtgtgctagacccggatggatatctctacatcaaaggtcgtagcaaaagtctcattctcggccccagcggacagaacatttaccccgaagagatcgaaaacctgctcaacgcccagccttatatcgcggagtcgctagtgattgaacgggaaggtaaacttgtggctcttgtctatccggatgccgaggccatgaaacaaaacaaaatatcccgcgaggtacttctcaaaatcattcacgagacccgcaaacagatcaaccagcaactcccggcatacagccagattgcccggatagagattcacaacgaggaattcgagaaaaccccgaaacgaagcataaaacggttcttgtaccagtagcgaggacataaatttgcaaatatcccttatttttactatattgtgaatccattcagcgaattatggctcgtggtacatgatttgctatatattaaaatgacatttatattcacgaaaaaacaacaagaacatgaaaacactgaaaacaatcattccaataggaatactcctttttacctgcctcttcacgatgggtgaaaagaaacagaaaagtgacaccgcaggtatcgccaagatcgaacaactcatgaaaagccgtgaattctacatcgaggtcgaccaagccttcccgacaggtaacagtagcatcaccatcgactccaaatacgggcaaaaacgcattggtggcgaaggctacgtttcgctggcaaccaacgaggggcaactctttatccttgacaccatagccacgggacgcctgccattcttcggacgggcctactccacggaatacggacaaggtggcgggatcgagttcgagaaagcaaagatcgaaaacgaatcattcaaggtgatcaataaacgcaaaaaacattacatcgaatacaaattcaacgtgagaaaccgcaacgatgtcttcaacttctacgtggaagtttacggcaacgggaaatgcagtgtcaacgtgaccagcaacaaccgggcaagtatctcctatggcggtgatcttaccccgattccggaggacaagagaaaagcactgggaatataactaaatccatagagtttgtaaggtttataaaccctacaaactctccctacttcatgaacttacccccttcatctcgaaatatcgaaaaatattcgtaactttgacatttgtttgatagtatactgacaaatggaagaaagttttatatattatatcgagagtagtatcaaggaaaactgggatcgtccggcactgaccgactatcacggaataaattgtaactacaaggacgtggcccggaaaatagaaaaattacatattcttttcgaacacgcgggcattaaaaaaggagataaaatcgcattatgtgggagaaattccacaaattggggaattgcattcctcgccac

SEQ ID NO: 10733 - DNA, 34360 bp, Unknown
  gut microbiota DNA sequence
ggcatcctttctatttttctgcaaaaaactactttttcaacgtttcttcagctaaataatcttcctattgagaaaatagtaaaacttaatctataacttttccattgtaatattttaaaaagccaacttcgcccatgccttttaagagttcttgattttcaacaaaattctgtccatactttaaccaacgtttggcaaatcctttaaatttggcacatggaaaatccgtacattggaaacaatgtgttatccctttctccaagcaacataaatgaaatgttttacatttttcacaacgagaacgattcaagtcggctccttgacaaggtctttcttctctcatgtacatcggacaacctccacaaaagacaccacaagctggaatacgtcccttataaaatttcatttcgtctcccccttggccatccaaaaatttgtaagagaaagtaaatttgccttgcgcttctgctctttctcgacaatataacctcttttttcaaagaacggacgagcagttaaactaacttctgacataatccgcataattccggttatatttgcatactgttctatttcatctaaaagcatcgaggcaatgcctctaccttgaaaatctttgtgaacgaacatggaatacaaatatccctgttttgttatagatgaaaagccaacaatttgcgcctgccgattaacggccacaatgaaataatgtgtcctaatcatttcttctatacgagagagatcattaccacatgacgcccaatcttccacttctgcctgtgaataatctcgtttgtttattgtgaggactgtattttgaaataagtcgctgagttctgcggtatcggactgccgagcagttctgattgtaaaatctgtattcatttcctattcattatattcacttcttcgccgcctgcaacatctgacgaatctgatttcgtacattaatctgtgcactatctactttcgcccgtttggaagggataaacaggttcttgtatttagccttcgtgatcttgaatttcatcttctccatagacccataaatgtctactcctaatttgaaaggtaccggcgacttcagcacggaaatatgataattaaaggtcatatctattttatgctctccccccacggcaaccttataacgatccacctcgactaggaaagggaatacttcaatcatgccatcttttatacgaaaatccacggccacgctatcaatcagattacgttctttatttttaaacatcaacatcttggaaatctccgagaacgtctctccatccatcaataccaaatccttaccatcaatgtaagccacggctcgtaacgtcggcaaatcaaccatcatcgtggaatccagctcagtctctgctgccatatggaaatttaccaaaccatcgaaagaacgtaacatcggtacaatagagtctagggaaggcataaaattaattaatgctcccacatcaatatcatccattcgcaaatcaaaaccagtgtacgctttctcttttccggaagccttatacagcatcgtggtcttcacatctgccgccatagaacgcatactcaaatcagacaattcaatacattgattttgcatcaccaccttcccgtgaatactatccaattccaatttcccgtataacaccttttttatattcgtttcaaaggtgaaatcaacaccgggaggaacaacaaagacagacatggtagagtctgccacgtacgtggaatccgctgccaaattcacatcagacaattcatcctcactcaactcctcttctgttccccacttcatgttcattcgattggcagccccaacctccatggctttcatcaattgattgcaattgatcatattcgatctcaccttcaaattagctttcaaatcctcctgtcgcaaaaatgcacccgccagattgtatacttccccggttaacagaagatcagaacgtcccatcttcaactttgcaccattcaatttaatatgtccgggacttaaagtaatcttcgtccccggcatacgcatccgcagaggaaacaagggggtgtatacccgcatatcctgaaagccaaccacaccactgacaagccattgacgtttatttttccggtctggaactcccgaaagatcaaatccggcattcgccaaccgtaaactattccctctagctcttacccgtaaactatccatattgaccttcgcttttaccaacgggagctttttatcttccggtgagggagccaaggcaaaattagccgcactatttcccatccggaaccgcagggagtcacccatcaccaagtcaatccacccgaaacgaatgtctgccgacatagaagcgacagccgtggtatctcgcaagggagaagtttttaccttcacgtaagaagtatccatgtgaaaggttaaagcattcttccactgtatatcgacactatcaaaacaaaagattccattcaacaggttcttttcctgcaagatagtcttatcttccatgttggttccgaatcccaatatcacagattttgaacgtaatttcaaactatccttttcgctggctaacaagacattctttaattgacaccctcctcgaatatccagttttccatagtttttattctttatgtcagccaataaaacatttccttttagcccggcattcaaacttcccgttaacgtcaccccctcttgtatcgggaatatttggggcaatatagaaaaatcgacatccgctttcacgcttgccgtaatcaaaggattagaaagtaattgatccacccggccatttaaatccacatccacatctgtccccttcacgtaaaaccgattcaatttcaagaacgaaggttgttctttctgtaaatcaacgacaccttccaagtcaacatccaacttatccaacgaataaggcatcccctcatatttcacggaaccttcatttattttgaaacgagcatccaacacgggaactcgatcctttccatattttcccttcaacgatccccggcatagcacctctcccgatactgtcacgttttcatcatgtttaagtactgtttccggaacaaggtcaagcagagttttcaaagaaggaacctttatcccaaaggtcaggtccacgtccaacaaatgatttaacgaatctgcctgcaaacgtcctccgaccccgaatttcattctattaaccctcataacagctttatccaacacgtaaagcatagaatctcgatccagacgcattcctgtttgcaatccaaaccgcaaacgcttcacgagtaaattaccttcctgccaaaaaagaatattctttgctttcacatccaactgcaagtcagccttccgctccataaaatttccatcgattttcaatccgaccccctccaatcgggcataaagtttattcgcacgatcatcaaacacgagttttcccccctcgatacgaatgttacgaatatctataccctcaatcactttttcttgaatcgtatccgtctccaccatgaccacggaatcctgttcagcagactcccgcattacattccaaccgggtactccgttcgtgtcaatataagcgtatatttgcggttcttccaaacgcaattctttcacgataacttccttccgagacagataagccatcggattcacaatcagccgacaacgcttaaaactcatcaatgaatcagtagcggcgtaaacattctcctgtttcaacgaatcctgaaagactttcgtcaccacgctaccatttcgcatctcaagcccgaattccgggaaagtcgagaaaaaggttaactcgatcgcgtcaaagtgtacttccgcattcaaaaattcattggcacttttctccacaataggagtcaacttctccggggtaaagataaaattcaatacgatgcctatcgaagcacacactaatatcaccaatactaacagtgaaataaagaaatactttaataaacgccacatcacgattttagatttaatgatccgattaacttacaattttagattaggtgattacctcccgctaaccacgtcttctcaatcgtaaatcaaatacctttctctcactttcataaaccctgcaacctcatcctgccatccggctcgaatctcttcttctgtcgctccttctttcaattgtcgctgcactttatcgttccctaccaacttattgaataaagcattaaaaaagggttccttgcctttatactcttgataagcctgcaataaccaagccaaattcagacgtttcatttttaaaatagtgtaatattcccctcgcaaatccatcccgtaacaggtttgccccttacatttgggctgcatactcatacccttgatcgggcgaggcacataagaataaggcatccccttcaaactcggatgcccgaacacttgaaacggatgcaatgtcccgcgcccttcgttaattaccgttccctcgaaaaaacaagttgacgggtaaagtatgatagaaactgaatccggtaaattcggagacggggcataaggcaacgtcacgggctgtttccgcttccatccctcgcaaggaattacggtcagattacaaatcacgttatctttcaaccagccttccccgttaatcattccggcatattcacctatcgtcatcccgtacacgaccggaaccgggtgcatcccgacaaaagatttaaactctttctgcaggaccgggccatccacgtaaaaagcattcggattaggacgatccatcacgatcagcggaatatcttgttccgcacaggcttccatcacgtaatgcaacgtggacagataagtatagaaacgtactcccacatcctgcatgtcaaaaatcatcacgtctattcccgacagatcctccggctgcggtttctttttcttcccatacagggataccactttcaagccacttcctgcatcaatataatctcccactgtctccccggcatcggcagttccccgaaacccatgttccggacaaaaaatccgtaccacgttaatacctttgcccaacaagaaatcgacaccatgcacagtgtccactcgtgacgtatgattggccacgataccaactcgcttaccttccaccaaattccggtaagcctcaaaccgttcaatcccgtctcgtacattcacggaaatagcatccgtacacgcggatgctatcaccaaaaataatatcaaatatctcatcgattacttcgtcttctcttctttatctttataatcaatcaccatggtgttcaggatagcatccacttgtttcatcatgtcccgtttctcctcgttcgggtagtacacgtaccccatcatataaatcacccgctgatattcttcgtccagcaccacattcaactcgtacggtcccgccatgaagtcattttcaaccatccacagcccccggaacaacacggcataatgcccgttatacttgtattgcacggcagtataaggcacctccatatccaatgccatatacgatccctcccgcggaccgggaatatgtttcttcaactcctcgttcacccgatcaaaaataatcgcataattaaactggctttcatgttcatacttttcagtgaagaatatgatacctttactatttttcgtggtttcgctcgacatccacacgaaatccgtcgtgtccttgttcacgtaataccccgtaggacaatacaacagtatattatactttttcttgaacaagttaaagatacgggtatccgccgtccgcttgtaaaccgatatcaaccggtcacgctcggccttggcgtatataccaaggattttcaatttattctcatcaaacaacttaaaaaaggttttccgatccggggctgcaatctttatatacttctgtgttttagcccacgggctatctgcataccgcacgtaagcagagtctacggaaggagaaatcacgacttgcaatacgttacggtgtcctttcatgttcttgtcgaaatacttctccggcaaattcaacacgtcaaaaataggttcagcctgaggtaatccatcctgatcttgtccaaagaattcccggatcgtgtcacccacggcaccatcccacatatttttctcggcaataaccaatacctgattgatttttcctgtcacggaaggcatcaggttcttcgtggcatccttacaagaacctaacattaaaaccatcacgaaaacaaatacgatatttttcatagtaatcaataattttaattgctaaaacttactattggcctcatccaagattcctttcaccgatcccacgataatcttggcctcaaccatcacgggaatacgatactcgtcatcacttacccataccttcatattctctccccctttaaacacgtcaccggccacgagcaagggagaaaacacgtgacacatccgccgtccgctatccgttttcactttctctttccccaagtaacgaacgtataaatcgtatactttatcgtccagtagaatacgtatcgggatctggtctcctttcttgtagttatcaaaatccaattcccttgcataccacgccacggacaacatatcgtacgtgtccggcaacaatttaatcgtatctttacgctggtatttcccgatccggtgtatattagcatgaatcaccccgctatcataatcccacacgtaatcgaacgttttatggtaatttccctcgtgcgcttttctcgaaaactcgtaaggtttataagtcatgctatcatgatgcgaaatcaacgtatctctcaacttgaacacccaatcccacgaagggttggaataccccacggcaaatatgcactgggcattcggatacttatcggaaggctgtacggtcatttccaccgaacccgcgttaatccagataaagctccagttgtaatagcccctgtaagtcagtttctctatcacattagacaacttcttctgcgatatggcaggaaggctcacaaacaatgtaattatcagtataatcgctctcatcgattagctctatttctttttttatctccttctgtatttttccttttactcggatcttccctcttatacgttttactcatgtcaaagtcttgctcaacatcgaaattctttttcaattttatctccgtgggcaaatatttcacctcttccggctgcaaatgtttcaggtaattacccgtatcccatttcccattcccgttccgatcaagaattgcccggatcatgtaagttccctctcccaagtaatcaaacacgactttaccatttcccttgatcgttcgttcctccagcaccttaatatccttatcaccctgataaagttgtaagataatcggggttgttgcctcacttacgttcacgataatattcccgtaatcctcaaccgctttcgttttaaaatccttcacgagcttgttattatacaacccgtaaatactatatatacccatcgaatcaatcgacaaccggtattccgtttccggtttccatttataccccaaataatacttacgaattttcagactgtcatgtttcaagctaaagtcgaccggggtcaagacggaatccaccatttccaacaactgaatattcttcaacccgtcctccacgatcggacggtcaaactccagcgttatgttcttattcaaatccatcgtgctaccgacgcccgcactaatctccataaacttgatcaccgggatggaatcctgttccttcttacgtttccccttgggttccggtttgtccttgtaatagaatttaatcgtatccgcaagcaacactcgcttaccgagcgaatccgtccgcaaataactggcctcagccacaagcgaatcgatcttgtacaccaaagaatcctttatccacaattgaatcgtatcccgaccggcagaacgctcctcgatataccaatcatcctgactaaccttatccaacaaatgcagtccaagcaatcgtacctttaactgatgttcagccggaatactgaaagtaaaatccaatcgctctcgttccttacgagcctcatcaaccagatataattgagtcttttcctcgtcaaacatcgggataaataagtttgtcggcccaaacatggtgaaatcacgccgaacaatcgtgtcttttgacaccactttgaactccattcccttcttcgttctccgtccctcgacaaccgttgtgtccgggtgaatcgtatcgtaaacagtcatggggaacgatatagtctgaatcaaagaatcaatgaaacccacttttgtctctgaaggcacaaacaaataatttcctctcgcatcatcgattgccattacccgataagtatcatccttaatattggtcacccgaaacattccggcactatccgttttagccacataactcggcaaatctgtcaacggaacggaatcagccgtattctgatagaacatcacggtggctcccagcacgggcaactgcgtttgcatatcaatgacctgtcctcctagctccatcgaatccagttgcggccccgtggaaaacacgtaccgatagaaaccaagcgggttcccttcgttattatccacgattgcgtcagcaaagtccagcgtgtaagtcgtgttcggtttcaaagaatcctgaaacgtcacccgcacgtattttccccgcaagctcacccgggctttcttcttcatcgggggagacatcacgaattttttgttaatatcctttaattgaacatattcgtcgaaataaatatcgatctgctttcccttgaaattcgttgaaaaagattccggaacctccttgataacctgagggggtgtcacatccttctctcctccctgcgggtaacccctgtttgcacaggcatatataatcaacgccacgataatagcaacaaaacagaatccgttccaaaaaaatttattcatagtcctcaaaaatattaactttacaaaactagggaaaaaaagctaaaatcctttcaattttagatttaagattcaagtttttttagatgctgccggactttcctagacaagcaacactcacccgcacccccttgattttactcaattcaatcatacacgcccggatagtggccccgcttgtcacgacatcatccaccaacaacacgtggcatccctctacacaaaccgtatcccgcaactcgaaagcctcggccacgttatcagcccgctgtccccgctccaaacctgtttgcgaaggagtgtttaccactcgactcaacacacccgactccacccgaactcctaaaacacttgcaatccccatgccaatcataaaagcttggttaaaaccccgttccttctcccgttcgggatgtaacggtacgggaataacacaatctatccctctgtcatcttgcatccgttctcccagcatcttcccggcccacacgcctaactctctattggaacgatacttgatagcatacactaatttatggaaatcacttgcccggtcataacgaaacaaccagtacaaatacccgactcccaaatcattcgcaagcgcctcatccgcctcctcatcaaccccctcgttcaaaggtaaaccgctcaaacaagctgaacacaaaaaaggttctccatcaaccagaacgtcaccgcataccacacacgcccggggatacaacaacctgaaaaagctggaaaaaatagaagaagtaaacaatgtcattgtttgacaaaattatacgtgatcgttcccgcctgtcgttccggggctttctcatcagcgttaaactccgatttcaaagccacatccacggccacctcccgcaaagcgtcatctttatcggactccgtatccacgacctcggctttaacaactcgaccctgtcggtttacgactaccgctaccacgattttcccaccgaactcgcatttatacacgggaatcggcaaataagtcttgtaacgcccttttatattatacgatacgctacttttccccacgtataccgtggattgaagtgaatccaacatccgttccttcttatctcgctgggctcgaatactatcctccttgtaatgcttgtttttattcgcccggtaacgccctccgtaatcactatcaatttcttcctgaatttgttcgatatactctttcacccgttcatgaggcgggggttctgcatttttcttcaccacatcctcgttcacggccaacgaacgcaacatttcatttacctcctcgtctgcactttgacgaagaatctgctctttcttttcctgttcctcctgtttttgctgaacaatttccggctccggcatatcgatctcgatctccattctctgttgtgaatccaaccgtgaaatcccgacacaaactaaaaagatagcaagcacgagatgaaaaatcaccgtccccatcacaccatgacgatgttccctcaaccaatccaagagagaatctctaataacgcaaatatcatttttcacgttcataactttactcgaatttaatcgccttcaccgggttgatcttggagatcagcatagtcggcacaatcagcattaaaacggttaccacaaccacccctacattcaataatatcacgtacccgagactaaaattaattggaaccgtatccatataatatgtcacaggatcaagatgaatcacacggaatattgcttgaattcccgccaaaagaaaggccagcacatttccccacaacattcctttgataatcaatcccgccgatatatacagaaacaattttcgcaaggaaacattcttataccctaacgccttcaatatcccaatcaacgaagtcttatccaagatcaaaatcaatagtcccgacaccatattaaaaccggccaccacgacaatcaaaatcagaatcacccacacgttcatattcaacaaggccaaccaatcaaaaatctgcggggccacatcggcaagcgtctgtacctcgtaattcccgcttgcatcatacacgacattctccacaccctttaccacctcatttaatcgctccacatcttccagttcgatggctatcccggaaacctcccccggtccccagtcattcaattttgccagatgtcgttcgtcaaccaacaccatcacgtcgtcatactccttgaaacccgtgtcgtaaattccggcaacggtaaatactctcgctctcggagggtcctgcacgaaatgggccgcaactttttccccgacaccgattcccaacatatccgccacagatgcggagattaatatctcgttcgatgctctttctgttttaaaatcaggcatttcccccttcttcaagttctcccgaaaaaaaacgacatcataccccatatccacccctttcaacacaaccccgtgaatttcctccttgctcttaaagattgcaggtctctctatatacccgtacacgttcttcacgccttccacctcttccaagccttttagcaaactctccgatgcccggactacccccccctctcctacagaaccgggaacaaaaggcaccacactcaagtgagccgtgaaacccgacaacttttctgtgatctcgtacttaaaaccagtgataataaacaacgacaataacatcacgcacaaccccaaagcaatcccgacaatcgcaattctcacgatcggcaccgacacggatttcgtgccgtctcctctcaacaacctatgcgcaatgtaccattccagattcataacaattgaaaattgaaaattgaaaatgtgatgccctatcaacatctcaattttgctattatcatcgtgcaaaactacgaaaacaaaaacagattcgaaagggtgtgtccaagaaagtatttaagaatcacgaaatacatccatctatattacacagccatccttcacccattcctataacgtacaaatacaactataataacctccctattccctttcatcaccctttcaacgcccatgcatagcccattgccaatagagcaacaacgattacaaaaagagagtaaaacattgaggacagacttttacagtaggaaaaccctattattgctccccctgaaaggatactaaacaagaatacatcgaatcatttgcaggacacaagaaaaaacgaaataatcaatttcagaatcaaactaaattagacactccacttcaaatttaaaacgatttcggaatatataatgacaattttttattaaactcgcgtacatgctgagaaaaaatagaataaatcatataaagtagtcatgcaaaacaatctaattgataaaaaaatcgttgaccagaagctagaaacttgcgggatcagtgacatggaagacgccacgatacgcgacatcgtgaaagtggttaacatggtggaagccgaaagcggggagaaattcattcgcatggaaatgggtgttcccgggcttgccccctctaaaataggtatcgatgccgagattgaggcgctacgtgccggatgtgctcaattctatccgatgctcgaagggcacaaggaattcaaagaagaaggttctaaattcgtgaagaacttcgtggacatcgacatcaaaccggaaggcatcatcccgaccgtgggttctatgcaagcttgcttcgccgcattcatggctgtaacggaatgcaagaaaggaaaagacaccgttcttttcattgatccgggattccccgtacagaaaacacagatgcaagtaatcggcaaaccgtttgaatcatttgacgtatacaattacaggggtgaaaaattacgggaaaaactggaagaacacctttccaagggaaacattgccgccattctgtacagtaacccgaacaacccggcctggatatgttttaccgacaatgaactgaaaattatcggggaattggctaccaaatatgacgtgatcgtgctggaagacttggcctatttcgccatggacttccgccgggacctttccgtaccgggtaaagctccgttccaaccgtcagttgggaaatacacggataactacatcgtcatgatctccggttccaaactattcagttacgccggacaacgtttgggaatcatgtgtatttctgacgctttatacaacaggaaatacgacaacctgcacaatcgtttcgggggaatgggaaccttgggttacactatcgtgaaccggattatctacaccttatcatccgggaccactcactcctgccagtacgccatggccgctatcctgaaagctgccaacgagggacgcatcaatatcctcgacggggtgcgggaatacgcggagagagcccatgccatgaaagaactgttcaccaaatacggtttcgagatcgtatatgaccgagatttggaagaacccatcgctgacggattctatttcacgattatctacccgggcttctccggaggggacctcacgaaagagattctgtattacggtatatcagccatcccgttgcgtgacacagggtccaagaaacaaggtcttcgcgcttgtgtttctcaaaccggactcaactggatgccggaactggaagaacgtttgaaacgattcgcggcggatcatacgaaataattgaaattgaatcgggaaaagctccggtataatcgccttaacatgaaagtaaaacaatgttaaaatacaggaaaactatttcatgattcaatttaagtttgtaattttatcccgtaaatgtgttacaaagtataaggcaaaaagagaatttatttataaatcataatcaattcaattatggcaaaatttagaggcgctgtcgtcgttgacaaagaaaaatgcaaaggatgtaacctttgcgtggttgcgtgtcctaccaaaactcttgacttggcaaaagaagtgaatggtaaaggataccactactccgagatggtaaatccggaagcatgtattggatgtgccagctgtgcgttggtatgcccggactcggtgatcaccgtttacaaaatgaatgtacaataagaataaaaactaccgaaaatggcagaagtaaaattaatgaaagggaacgaggtattagccgaagctgctatccgttgtggatgtgatgcttattatggttaccctattaccccgcaatccgaagtcatggagactctcatgttacgcaaaccgtgggaggaaacaggaatggtcgtattgcaggccgaaagtgaattggcctctatcaacatggtatacggtgccgctgcttgcggtaaaaaggcaatgacatcatcatccagccccggtatctcgttgatgcaagaaggtttaacctacttggcaggagcagaacttccctgcttggtgattgatgttgtacgtgggggcccaggattgggaactatccaaccggcacaaagtgactatttccaggcaaccaaaggtggtggtcacggagactatcacttgatcgtacttgctcccgcttccgttcaggaaatgaacgatttcgtaggacttggttttgacttggcattcaaatatcgcaacccggccatgatccttgccgacggcgtgatcggacagatgatggagaaggttcaattaagcgaatacaaaccccgttggacacaagaagaaatcgacaagatgtctgataactgggctttaaccggtaagaaagcacatcgtcctcacaacacggtaacttccttggaattggattcttacaaacaagaggtattcaaccacaaacttcaagagaagtacaaaatgatggaagaaaacgatgttctttttgaagaaatccaatgtgaagatgcggaatacatattcgtggcttacggatctgcatctcgtatttgccaaaaagcagtacaattatgccgtgaaaaaggaattaaagtaggaatccttcgtccgattaccctttatcctttcccgaaaaaagaagttgcacgcttgtctaaacaagtgaaaggaatcttaactgtagagatgagtgccggtcaaatggtagaagacgttcgtttgaacgtggccaataacatcccggtagaacacttcggacgtttcggaggagtaatcccgacaccggaagagatcgttgaagcacttgaaaaacaaattataggagcataagctatgtcagtagaattaaaagatataataaaagaggagaatcttgtttacaagaaaactcccgtgcttaccgataacgtgatgcactactgtccgggatgttcccatggcgtggttcacaaaattatcgcagaagtgattgaagaaatgggtatccaagacaagaccatcggtgtttctccggtaggatgttctgtactcgcctacaactatttggatattgactgggtagaggcagcacacggacgtgctccggccgttgcaaccggtgtcagccgtgttcaccccgatcgttacgtgttcacctatcaaggtgatggtgacttggcatctatcggatgcggggaaatcatgcacgcttgtaaccgtggtgaaaacatcgtggtaatctttattaacaacgctatctacggtatgaccggaggacagatggccccgaccacccttttgggacaggtaaccgctaccactccttatggacgtgacgccaaattgaacggattcccgatgaaattaaccgaattacttgcacaactggatggtacttgctacgtaacccgtcaatcggtacataccccggctaacgtacgtaaagcaaaagccgctatccgcaaggcattcgagaacacccggaaagacaaaggtacttctttcgtggaaatcgtaggtacatgtaactccggttggaaagtaaccccggtagaagccaacaaatggatggtagataacatgttcccgaaatacccgttaggagacatcaaagacatttaataatttgagattttagatttacgattttagattatcagaatcgtaaatcccaaatcataaatcgtaaattaaagattatgacagaagaaatcattatagcaggattcggtggacaaggagttctttctatgggaaagattcttgcttactccggaattatgcaagatcaggaagttgcttggatgccttcttacggtcctgaaatgcgtggcggtactgccaacgtgaccgttatcctgagcgacgagcgcatcagctcaccgatcttaacaaaatacgataccgctatcgtcttgaaccaacaatccatggacaagttcgaaagcatggtaaaaccgggtggtaccttaatttatgacccgaatggtattactcacgaaccgaccagaaaagacatcaatatctacaaaatcgagggaaccgccattgccgcagagcaaggtaacccgaaagtgttcaacatgatcgtccttggaggattcttgaaagtaaaaccgatcgtgaaacttgacaacgtggaaaaaggtttgcaaaaatctttaccccctcgtcatcacaagatgatcccgatgaacatcgaggccatccagaccggtatgaacagcgttgaagttgtgaaccaactataaaataaatacccccgccggaagcgggggtatttatttctcatttcaatcaaccattttctctaacacctctcctgcatccaccattcctcctaccatccttgcaaccacaatcccgttcggatcaattaatactttagtcggaaaagaagaaatattaaacaaccggatcatatcacacgtctcccgtccctcgttattcaatatttgagtccatgtcatcccgtcttctttcaccgccgttctccaaagtttccgggcttcattcaaatctctcgtgttctcttgggccacgtttataaaaataacttgctttttgtatttctcgtacaattctttcaaatgaggatgagactcccggcaagggccacaccagctcccccaaaaatccaacaacacgtatttcccccgcaacttctcaagagacaccgttttcccgttcatatctttcttctcgaaattcttggcaggcctccccgtcctaaaatcccgacttctttccaaacgttgagcaataacacgaccataaggatttcctttcaaattctcggggaaacgactgtaaatatcctccgcttcattctcgtcaaaccaaatataatgctcggccaacttgacaagagcaatataactatccggattacctcgtataaattccatcgttttccgcttgtttgcatcaaacgatcgctgaaactccctgggataatcacgaatatctcccccttggatgacattatcaaccattaactggttgtaccccgcttcttccggggtcaacaagtcataattcaaccgtacgaaatcacgggaaacagagcctcccctctcccatttcaccacgggtacttttcctttttccaaaccaagtttcaacacggcaaattctcccggcacaatcataaaactgaaatgcggattttgcttagtacctctggcggtcggcgttgccaactcatcacacaaaaatcttacccccgcggataaagtatctttccctgccatactgatatccagcacatgattatcaaactcatgttcttcctgcacaaatttttccttagaaaaataagacacaatcacttttccctttttcacggcatcaattgcggctcgtaaacggaactccttctttccttctaattccaacatgatcgagtaaagcacccgattattcaatccttccgccacgtttagattatcccttaacaaatccgctgcgatctgtcgaatttcttcatcctgttccttcaaaaaaccaaaccctaccaatatcgagaaacgatctcgttcttccagttgtgggaactttttccgacagatattcaaataatccttcatgttatttttcaaccgtacttcggcgatctctcccaattccaccagtccctccccgttcgacaaagccgcatcgcggatcttctctttcaaccgtatccattccccttcgtttacctccatacccgaaattatccgggccgaaacaaaaggcataacctgctgtctcaaccagccatacagcaaactatctactttctcccgcccgttctcttttacaaaacgatctttattggcaaacatgtagtccgctttcggatcccggtaatttaaggcataacgagtataaagaaaaaaattttccggtttcacccttcttttatctgacaacctatcaaaatactcccgtaccacttgatttcccagctcgccattccccgtttccatttgtaacaaggcatattcgttcaccaactccggggtacgctctccttttttataacgacgagttaacccctccggcgaccacttgggatcaatccctttacgaattttgtcgacaaactcttccgctggacgagccccggatgttctataaacctccgtcccgtccgctttcaataccacgaatgtagggtaagccttcacctggtattttttcgccagttccactccctcccctttctccgcatctactttcaaattcacgaactcccggttaaaataggccccgacctgctctcgcgtaaaaacttccgaagacatcattttacacggcccgcaccacgtcgtgtagaaatcaacaaataccatttttttctctttctcggcaagagttagagcctcttgcatcgtcaactccttaaaatcaaccccctgggcaaaagacgacagcggcaaaattgccgctatcatccaaaacaaaactaattttatcttcattctattgaacaccatttttccaatcaatatctttcaccttcaccaacccgttccatttacacttctcgtccggttttaactcgaacgtgttctgatcagttcctaacacgtacttttgcaaagttcctcgcgtagtactattataagtcgccacgtataaatcgttataatctccatatcccgagaaaatatcaaatttaaccatcgtgatctcgtcttccagctctaccgaatacttcttctcgtaccctcttttgtaatcataagcatgcaaagttttacccaccacatacagtaggatggaacgatttgaggcgaaagcgaataactcggccttgtctatatccgtagcgagcgacttatttacctcgtatcctgccaccttctggccagcagccttaaatttatagatataatacccgttcgtcccggcatctttcatcaaggcgaatgaattaccatatcccccaccctcggtatccatggtattctccccgtacacgagcgtacgcccctcgggttgcacccacggaaaagcatcgtcagccttatcagataaagacgaacaagttgtggaataactcgtataccttaaaaattgattattatcggtatcataaagtattcccccggaagcgtatcccaaagaagcaaaaatataagggtacgctttaaacaaaacgttgggagaaaccgttgtccgatttatcggatctgcatattcactacttgacaaaaaactagatatatggaacacgtgtccttcttcacaaacaaccgttctcgaactattcatcatgccaccacccgctgctttagtaatcatgtacacgggattcaattgttccggtaactcaaaatacgagtaaaccaacggttcaaatgtacttgacagatctccctcgaaggttgatggattcacgtgatatgaacgttccccggttgcaatccacaatctctcgtggggtgcgtaagacgacattcttacacgtcccgtgtacacgacactcttgggatcttttaaccgtggtaaaccgttattcgataattgattatataacacaatcgtatcacccgccatggcaaccatatccaaattcacaaatccttcggcatcttccccgataaccaaccatcccaaactggtcgcagttctaaccacaagcgaagtataattcatccacaacaaaccggtgaccttatctctcaccttcaagtaaagagtataagttgctggttccaactccacgaaatattccaaattacgttccgtaccaatcacttcacgggtaagttcctcggtagacgtacttgggaccaccagccactcgtaagcgtaacgatccaaggacaaactatcttcggtaaatttcagcaggggagttattttcaacgtgtcttttttaaagatcacgctatgtgattttcccagactgtccacttcaatctcgttcacctccttgtaatcgtaagaacccttgtcgtcataacaagccacggccaaacaaatgaacacgctcgttaaaaaaagtaatataactcgtttcataattatcagatttacattgttcaaccattattctgccgggatccaaggttgccccacgattgatttccatgatacccccataaaatacatcgcacgcccatcttcctccaataccggagtacccttgtcgtaaagttcttgcaaataattcacgaaataattcgcaatcattgtccgtttggcattcggcatcgtcacctccgaggcaaaatcatcatacgtcaaattaaacttttcgcaaatcaaatcatatttctttcgcgtaaaagccccccaaagtcccccttcagtttgccctggcgcataatcgattgccggtatccaacgagccggtcgaacgagaaaatcattcatggtaatcttgtgcatggaagcatcaaaatcatttcctccagtactagaccacaacccgggaacctctccccaccagttaatcccaatcccaaaatcctccgtcggctccaacttcaacgttaaaacccgttcttcggtttgaatactcttatcccgcttcaaacgaatcaccaaatcagcataatgacttccggctttaaccacctgaaattcatcgaaaggatcataattcaccccttcgacagcagtagtcgaatccttatccacgacaacccggaacgttctgtcataccctttaattcttccggttgtcatcacccgtaacttcacatcgtggtaatcacccgtgcttttaacaaactctaccggggtaaaagactggctcgcccaaatagtagtatccccccattccggtccgtactgaacgtagaaataaaccccttcccgtccatcgtaatccttaacttctttttcacaactcgccacgccgcaaacaagccatgcaagagcgagaacatataatatttttttcataaccattacttattcttgtgaaacattatcttgtgattccgcacgttggcttgtctcgctatccggtaacgggaagacgtaattctccaattgcatgttcatcgtgccacttgccgttgcaccatcgggaatggtctgtaaaccgttccgcttataatagaaaaacaattgtccttccccgataaactccctcacgtattcagaacgaattaacccttttaactcctccacggatgatgcattttggttcacgcaattccgggcaaaacgcaacttgttaaaatacttttcaagagccgtcggaacatccggttcacactcggctgcaatcaggtataattcactaacccgtaccaaaggtatcatataacgataatgatatgcggaatccgcctccgtttcatctttatacttattcaaataagtcacctccttactattggatattgtggaagcccacattctataacgataatcatccttatcatcatacgtcccgttcacccgtcccgtcgaaagatttccggccatagtcaaaattctggctatagacaaggaaggatcaaaaaaagttttatacactttactctcgcgagaagtattgtaaagagaaaacaacacctcaggataaaacaccccgtccggcgaattctttgtcatataatcgacatctactaacgggaataaaggcttatcctcgttactcactttctcgatcacggcccgagcacattcccctgctttctgtgtatttcccatccacaaataagccctggccatcaatgcattcacggcaaaataattcatacgatattgtctgtaatacaaatcattcgcaccttgcttcgaatcataattcctggctccttccgtgataacgggatcaactgttgaaagtaaacttgacgccatttccaaatccttgataacataatacatcacactatcggcaggcaacaacggttgcacgctccgatccgctttcgtcatatacgggatacattttattcccttgttttcttccgaataaataggcccgaacatacgtaaaagatcaagatgcatcattgcccgcaaacctaggacctcacctttcacaaggcgataataggtatcagacaaaacaggattcccatccccacaatggacaagtatagcattacaatttgcaatcattgaatataacccggaccaaatattatccagtgtacttttaaaccctttttccgtgtatgaataattcgcatagacagaataatcatgatccgtaaaactgcaattataatactgtgccatcacatcaagcattcccatggttaaattagccccatacaatttaggatcattcatttccgagtacacgccattcaaagccgcaagaaaaccttccctgtctttaaacaaagaattatccattattctatcgtcaggatcaacctccaaccatgaattgcacgacacgagcaacaacatcacaccagcaatcaaacctgattttatatttcttactatattcataaacaaactctttaattcattaaaacgttaacccaagagaaaaagccacggtacgcgcgaaaggataatccaatccccgttcattctttaccgtggaaatccggaagatatcattcatatacccccgaatagtcatcgaggatgccccgatacgatgcaaccacttggcttgagtttcatatcccaaagaaatagactccccgctcaaggtattctcatccgcgataaaacgagacgacatcggggtcgcgtccgtcaacgagatagacttatatttactcacgtcacccggtttttgccaacgatcatacaatgcccgtttatcttgattatattgcaaggcattttccgaaatattctccaccttgtcgtataaagtcgacataaatatttgtcctcccaagcgataccgcaaattgacagaagcagaaaatcccttgtaatagaaagaagtaccgattaccccttccaccttcggatccgaattcccgacaacaacctcgtccgcgtaatcatgctcgaatgtctgcgtcccgtcttttttaatgaatatctctcgcccggaagccggatcaattcccgcggaacgcacggcccacaaatcggaaggacttcccccatcgtaatatctcaccaaattagaactcctgttctcctgattaaacttatccaaggcggtcccgatattccggtactcgtaagtaatatgacgagcattaaaattaaaattccaactcatattctctcgctgcaggatcatataattcaatgttgctgtcaatccctgagaaacttgcttacccaggttcatcggaacagtagaggttccggtagaggtcggcgtctgaacataaaccaatagaggatcggtatttttatagaaataatcaaccgtaactttcaaccgattattcaaaaaagccaaatcaataccataattctggtcgattgttttctgccaatccaaatcattatttccccaagtcgaaacaatagcacttaccccgaaaggattcgggtaaccagttgcgtacttgtacacgttcatggaaatataagcatcaaagttttgatttccgggattaccgatagaaaaacgcaatttcaaaaaattcagccagttctgattctgaaaaaagtcttccttgtgcacgttccacgccaacccgatagcccaagttgtggtgaattgttgagacaagccgaacacggaggaaccatccgaacgaagattcacgtccagcagataacgatcatcataagcgtaaccggcattcagataataactcgccgaacgcttctcgctcgtgaaatacgatggcttacctcccgtaggataccctgaagaaaaagaaggatttgaataacggtcatcgataaacccgatagacttgtaaccactggattgtgatttgctcgaagccaaacgaattccacccacggcattcaccatgtgtacctcgttaaacaatttagcgtaggtcacgttaagatctccatcataactcaaattctcgtctattgtctcctggtaagacccgcgttccgttgaagcggtttcagcataatcggaagcattgggagatttaaaaacttccccccgatccgttgactttgaaatactaaaacgacctttcgcccgcaaaccatcaaacacctgccaatcgatctcgaaattattcgtaaaaccaaaagaggaggtttcatcggaagagcctaaagtcatatcatatagaggattataattctttaattcctgaagataagtaggagaatttgcatcggaatcagtgtaaatctctaacacttgctccaccacaccatcctcgttctttttcctgtggtacgggttcgcctgtgaaaattttgaaaacgtgaccttctctcgtgaagacatcgagtaatccaaattcaagtaattcttgaatgacaatgacttgtagcgatacaacaattgcacgttgccattaatcacatcccgatcagatcctttcatcacaccttgcgtcttgttataactgaatcccaagccgtaacgcatcctgtcatcccctccttcggcgaaaaggttgtgactatgagaagttgcgaaccgtaacggttcactcatccagtaggtatccacccctcgtttcacctcggccaaacgctggtaatacaaacgctggtcatattccgacacgatttccccgttagcatccaaatcaccgtaatacccggccaaacgttcgaattccaatttttccttagaattcatcaaattataatccgataaatcagcaaaagaaagatttaaatttccgttatacgttaaccttaatgttccgggagcgggagccttcgtctccaccaccacaacaccattcgccgctttcgaaccataaattgccgtggctgccgcatctttcagcaccgtaatactttgcacgcgatccatactcaaatcactgatcgtctttaaagttgtctcgaacccatccaaaataaacaagggctgattcggatcgacctcgtactcctgtgtcaaaccgatcacgctggttttacccctcacgttaatatccggcagacggttcggatcggatccgaactgattgttctccacgatcgcaaacgagggatccatcgttttcaaactctgaagcacattctggttcccgatagttttcaattcctttgccgtataggttgttgatgatccggtaaaactctcctttttacgagaataaatacccgtaacaacaacttcatccatctcctgtacatcatccttcaaaacgatcgtccactcccctttaggaatacttttataagggattgtttgagacaccataccgataaatgaaaatacgagttcagccttggtcgtatcagtaatcacaatcgaaaaatcaccctctcccccggttgttactcccaaagtcgtaccctttaacaaaactgtaaccccgggtaaaggctgtttcttctcatcaaccactttccccttcacggttaccggctttctctccgtctcccgggcctgctccgcttttgatttaatcaccacgatattatcttcaatgtaaaaatcgagagatgtcccttccaaacatttagccaagatatactttatatccgaagacgtaacattaacagaaaccttccccacattcttcaccacttgatcattgtacacgaatgtgtatcccattttctgtttaatttcgttaaaagcaacttgcaaatcaacattgtccaatttgatcgtcgctcgttgccccaacgctgtggccgtcaacgagacaaacgtcatcagtaggaacaacattgtcaacctcatcatcaacaaaaaattcccatggattcgcctaaagaacccactcgttctgatttttttcataactttgtagaattaaaattttacattgtgccttaagcaccttacttaaagcgggggatgatccagatctcccgtttttttattttactgtcacgatatgtccatccaccgagatggtcaccatacctgttcgctcaattaatctcaacaccttgttaaaatcatcaaaccgctgcatctcgatcgtaaaacattcttccctcactgccggattctcaaacacaacctctacatcataccaacgcgccaactcttccattatactattcaacggggcatgaacaaaatagaatttcccctcatgccatgccacgtaaggagcaacatcaacgtcaagcactttaatgttacgagttcctgacacttcgagcgcttgctgtcccggagccaacgataccgtgttacccacacccctcacttgcacgcatccttccaccaaagttgttaccacgggaaaaccgctgtatgcccggaggttaaattcggttccaagcacccgaaccgagtaatctttctccacttctactataaaaggttttgtatcatcgtgtttcacatcaaaatacaattctccttttgcatacacttttctttcctttcccgtgaataacgtcgggaaacgaagtgacgactcggcattcaaccacacgatcgttccgtccggcaacacgaccttatactctcctcccctcggtatccgaacttcactgtattgcgccactttcacctccgaactatcccccttgtaagtcaatgtaccccgttcgttcacaaaacgtcctccctccagcaactgtaaatcacacacactatccttaccgagatcgaccacgttaccatcaggcagataaagttgtgccgtagagattcccggaacaattcgttccaactgtcgccccggtatttccgggataatctgacgttcgttcagatataacacaccgatcaaaagaggaacaatcaatgaagccgcaatcgaccaacgacgcaacacgactcgacgacgcaatccgatcgcccgttccaaacgattccatgtcttttccctccctttatccagtcgatcaaaatagaacgacttttccagcatattctccttgttacagattttctcgaacaactccctatgccttccttcacgtaaccaggattcgagcatttcccgttcagatgcggagagttccccacgtaaaaaacgataaataacaagctctatcctaggatcaattttctccatttttcaaaaatttcccctaaaacgtgaacacctccccacagggtgacaccctttgtaaaaaaaaattctttaaacgcccaaaagaagtaataacaaccactgaatacccttcaaccgttcccgcaacaccctgtaagcacgtaatttaatcgtcttcaccgtattcacggaaacccctaactctttcgcaatttcaggattggaaaggccctccatcgtcagaatcacgacccgacgggatcgctccgacaaatcctttatcgcatcgtacaccatcgcatggacctcctcttcaagaataaattcttcctccccctcttccgtgagccacaggattaattccggctcattgcgacgttgcactttttggtgacgcaggtaatccaaacaagcatttctgacactcatatacaggaaacttttaatcgccgcaacaaaataaaagtccgcccgtttctcccacaccttcaggaaagcatcttgcacgaaatcttcaataatctcatcatcctcgacatactggaaaccatacgacttcacggggagatagtatcgatcaaaaatctccttgaaaatcacaccatttccagcccggaacttttttattagaacatcctctgatttcgtcaaaacaataagtactaattacaagaaacacttactttacatgaattcaaagttaatattttctttctttcgatacaactcccttaacaattttaatgacaatatcttgcctttaaagggcaaaatatgctgaagaacatacctaaagagacgaggtcgctttccccaaattaatttaccaaacttacctgcttatagtaaaccacatccccgacaagacaagatgagataaggctgaaaacggggatctacttcggtacactctcggtactccttcggtacacggtcgctcatgagcgaccgtgtaccgaccgtgcgaggaaaataaattggggataagggcttatcacaccctttattccccgaaacatcttctcgttctcttcctaaatcaccaacaagccgtataaatcacggctaacaaaatacaaatcacgtaagcacaaatattaaataccttatcggtcttgaacatttcagacgtcaacaccaaacccttcggatcatcatccgtcttgcaggtggccaaactaaccataccaatcgttaccatcgtcaacagaaacgtgtacatcatctgatcgaggaacggcatttcgatgggcaggaacttcaacaacaacgccacgggaatagagatcagaaccccagttatagccccttggttcgtagtcttcttccagaataatcccatcaggaacacagctagaataccgggactcactaaccccgtgtactcttgaatgtacacgaacatctggtcgaaattagccatcatgggtgcaatcaaacccgcaatcaccaacgccacggctgccgtgattcttcccacgctcaccaattttttgtgtgaggcctctcgatccatgtaaggtttataaatatccatcgtgaatatggtagaagtcgaattcagcatggaggccagtgaagaaacgatagccgctgccaatgccgccagcaccagtcccttcaaacccgtgggtacaaacgtcccgatcagccacggataggctttatcatttcctcccgtcatctcgaacatagccgtcacggacgggtctttcgattcggtgtacatcacgaaagccacgattcccggaataaccacgatcaaaggcacgattaatttaagaaacgccgcaaaagcaatacctcgttgggcctctttcaatgacttggccgctaacgtccgctggatgatgtattgattgaacccccaataatagaggtttgccacccataaaccaccgataagcacggcaatacccggcaggtttttaaactccgggttattcttcgagataatcatatggaacttatcgcccgccgtgtccacgacgtggttaaatccgtccacgacaccgccaccgggcaacacgttatccaaagcgataagcgtggttataacgcccccgatgatcaacaaggccacctgaatcacatccgtccaagccactgccgatagtcccccgtaaatggaatacgccgcagcaacaaaggccagcccgacgatagcgggaatgaataactccccgttcccagtaccaataatcgtatcaatggcttttgcccctaggaaaagcacggaagtcaggttcacgaaaataaacaaggcgatccagaaaacggcaagaatagtcttcaagttcgtcgagaaacgtttttccacgaattcggggatcgtgtaaagcccctgtttgataaatataggtaaaaagaatttacccacaatgatcaaggtcaaggctgccataaactcatacgaggcaatggccagtcccacggcgaaccccgatccggacatcccgataaactgttcggcagagatattcgccgcaatcaacgaggccccaatagcccaccatggtaacgatttgctcgcgaggaaataatcctccgttgtcttctgcacgcctttcttacctcttgacacccacaatcccacggcaataatcattaaggcatacgccccgaaaatgaaataatcccagaactcaaaactcgtgttcaacatttttccaattgttatggtttatacttagtaaattttcctcacaccatcaccaatgtccgccacgtaaaactcggcattcaatccaattttatcatgatacacgggagccaacttctcgataaattcctgcacgttgtcttctttcacaaggctcacggtgcaaccaccgaaaccgccccccgtgatccgagaccccagcacgcccggcaacttctgcccttcctccgccagcgtatccatctcgacaccagtaacctcgtaatcttccttcaatgagcgatgcgacgcattcatcaattccccgaaacgaaccaaatcccccttttgcaacacgtcaatggcctcatttaccctagcgttctccgagacggcatgacgagcccgacgataaacggtttcatcggaaatcagattccgcaccctctccaattcttcctcgctcaaatcacacagatgtttcacgttcaattcctgatttatatcgactaaagcctgttcacactggctccgccgcacattatactcggaagtaaccagatcatgatttttatttgaattggtgattaccaatttataaccattaaggtttaacgggatcaaatcataatccaaagtaccacaatccagcgcgatagcgtgttccttctttcccatgcccacggcaaactgatccataatcccacaattcatgcccacgaagacattctctgcccgttgtgacattttcaccaactccaccacgtccagcccgacattcaactgatcgttcagcataaacgccgttacaacctctatcgaggctgacgaggacaacccggccccgttcggaatatccccgaaatacaggatatcaaaaccccacgagtcaagcccccgatccgaaaactccttcaccacacccaaaggatatttcacccattcattgggtttattctcaaaaatactttgatcacattctacttgaaaagtttggttcatactggcgaaagcaatcttctgatcatcccgacgagccacggccaaataagtcccgaaactcaacgcacacgggaacacccgtcccccgttataatcaatatgttccccgattagatttacccgcccgggagcaaagtacagatgttcaacctttgtcccgtaaatctcttcaaatcttttttccaacacgcctatatccattttaattaatttaagatttaaaatttagaatttaaaatggggtctaacgccacatgtctacaaagttaaggtattttctttaaaattttatattcaacacgaatgaaaattacattctattgcttatttttatgagttgattaaaatcatggatcatggaactgaaagaatatattctcaagaatgaatgccttaaaattcacgtatgtaatctcggcgggattataaaaaacatatttgtacgcgattgcaggtggaaacttgttgacgtggttttaggatttgatacccttgaacaatatattgacccggagtaccggaataattacccttatttcggggcgctcatcggacgctatggtaatcgcatcaaaggcggggaaatcacgattgacaacaagactcacgtgttgaacaagaatgaaaaaggaaataccctccacgggggaacgcccggattcgatcaacgcctttgggacgtggaacaaccggacaacgaacatctcattctgcactacactagcccggacggggaaaacggtttccccggtacactggacgtcacggttcgttattccattgcaaacaacgtgttccgggtgatttacgaggctagttgcgatcaaccgacacacgtgaatctcacgcaacacccctatttcaatttaaggccgaccgacgagaatatcgggaatcacgaactacggctctatacttctcactatctggaaacaacttctgatttaatcccgacaggaactatcctctcaacagaccaaaaacacgctttcgatttcaacaaaccgcttttcctcgccttgcaggaagacgggttggatgattgctacacgttcggagacccgatagaaccccaactcatggccgagttgtcccacccgaaaaacgggatcacggttaccatcctgtcggattaccccggcttgcaggtttacacgggtaaatacatcaacgtggccaacgggaaaggcggaaagcattacggtccctattcgggaattgccctggagacacaaatgctcccggacagtccccaccatccttgctttccttccacccgtttgaacccgggcgaacggtaccttcacaaaacgatctactcgttcaactgtatcagcgtagaagaagactacgaggacgaaaccgagggataaaccgatagatttattttcgtcatatagggctccatgtccacgtgttccaatgcttaacccgttcaccacgttcgggtaagtctctcctatacaaacaacacgagaatcgacaacacaagcagcaaacagatgaaaaaaataatacaaattaccttcccgagtacttcacataagaaacagatgataatatacacgttcgacatttactttgtaaagcctatattaaaaggtttatttattattcttttgaaccattgcttaattttattagttttgcaaaaagcgatcggttatggacatagaaaaattacatggtacggaccctcggttataccaactcgtggcaccgttggtaatgagcattcccgtactccggtacaataacaactatccgttcaagacctccgtccaccacaaatggcttgtggcaacagagaagggagttgtgaaaggtttcatgcccattgacataaagagtacgggcgcctgtattgataattattacgtatcaggaggcaattcctcgttactatccgccttgattgacttcgcgaaaaaagaatttgcaggggaacaacctctttttgccgtttcccacacccgagatgcagaaaccttcaaaacaaacggttttatagtttcaaaagagtggaaattgtatataaaaatggtatatcctccagcttatgagaataaaaaaaagtgtgtatgatgtcgtgcaaaaccgcctagaacgaattttttctgattttgataacgtgtacgtgtctttttccggcggcaaagacagcggggttttactaaacctctgtatcgactatatccgtcagcataaactaaaacggaaactaggcgttttccacatggactacgaagtgcaatacaacgagacgatccggtacgtggatcgtacactcgcagataacgccgacctgctggaagtctaccgggtatgcatcccgttcaaagtctccacgtgtacttccatgttccagcgtttctggcgcccgtgggaagacaatttacgcaacctgtgggtcagggatatgcccgaaacctgttaccgcaaagaagattttgatttctacacggaagagatgtgggattacgattttcaagtcaaatttgcagaatggtatcaccggaagaaaaaagctcaacgtacttgttgtctcatcgggattcgcacgcaagaaagctaccatcgctggcaagctattcaccgggacaggaattaccacagttacaaacacttgaaatggacacacaaagtaactgcaaatatctttaacgcctaccccatatacgactggcttaccacggacatctggaccgccaacggaaaatttcactgggattacaaccacctgtatgatctctactatcaggcaggagttcctcttgaaagacaacgcgtggctagcccgtttatctctcaggctctttccagcttgaaactctaccgggccatagatccggacacgtggggcaaaatgattaaccgggtcaacggggtcaactttaccgggttatacgggggaacctccgccatgggctggcagtccatcaccctcccggagaacatgacctggtcatcctattttaaatttctcctttgcaccctaccggaagaggcaagggaaaactacttgcacaaactctccgtgagcatggagttctggcgaaacaaaggcggctgcctggcagaagagactatcgccaaactccgacgaatgggaatcccgatcacggttagcgaaacgacaaattacaagactgataaaaagcccgtgcgcatggattatcaggatgatgtacgtattccggagtttaaagaactccccacgttcaaacgtatctgcatttgtatcctgaaaaacgatcatgcctgtaaatacatggggtttgccccatcgaaagccgaacgagaacgccgggtcaaggttatgcaaaaatataaatctatcatggaatcttatggaagaatataaaagtcccgtatataacgttattccagtcccgatcgacaaggttgtagccaatacctacaacccgaatatcgttgctcccccagaaatgaaactgttggaactatccatctgggaagacggctacacgatgccctg

SEQ ID NO: 10734 - DNA, 2217 bp, Unknown
  gut microbiota DNA sequence
ttttattatttcttagccaagtcgatcaaaatttcaagaacttggatagcacttgtcggcactttggtaccgggaccgaatacggcgatagcacctgcgtcgaacaagaattggtagtcttgatgaggaataacaccacccacgtaaacgaggatgtcttcacgtcccaatttcttcaattctgcgataacggcaggtacaagcgttttgtgaccggctgctagagaagatactccgacaacatgaacgtcgttttcaacggcttgttttgcggtttcctccggggtttggaacaacggtcccatatccacgtcgaagccaaggtctgcgtaacccgtagcaacaactttagcaccacggtcgtgtccgtcctgacccattttagcgatcatgatacgcggacgacgtcctgtcatttctgcaaactggtctgccagttctttcgctttcttgaagtcttcgtcttctttagcgacacttgaatatactccactcacggttctgataactgctttataacgtccggcaactttttcacatgcatctgaaatttcacctaaagatgctctcttcttagctgcatcaacagctaattcaagtaagtttccttctcctgtttctgcacatttggtgattgcagccaatgcagcgtcaacctcagcttggttacggttagctttcaattcttgcaaacgacggatttgggcttcacgtacagcggtgttgtcaacctcaagaatatcgatcgggtcttctttttccaaacggtatttgttggttcccacgatcgtttgagctccactgtcgatacgtgcttgtgtacgggcagcagcctcttcgatacgaagttttggaataccggattcaatagcggcagccataccacccaatttctcaacttcttggatgtgagcccatgctttttcaaccaattcttgagtcaagctctcaacatagtaagaacctccccacgggtcgattgatttacatatggtggtttcatcctgaatatagatctgggtgttacgagcgatacgagcagagaagtcggttggaagggcgatagcctcatccaatgcgttggtatgcaatgattgcgtgtgtcccaaagcagctcccatggcctcgatacaagtacggcccacgttgttgaacgggtcttgctcggtcaatgaccaacctgaagtctggctgtgtgtacgcaatgccaaagatttcgggttcttcgggttgaattgtttaacgatcttagcccacaataaacgtccggctctcatcttggcaatttccatgaagtgattcataccgatagcccagaagaatgacaagcggggagcgaatgcgtcgatgtccattccagcgttaactccggcacgtaagtattccaaaccgtcagccaaggtatatgccaactcgatgtctgcggtagcacctgcttcttgcatgtggtatccggagatagagattgagttgaacttcggcatgttcttggaagtatattcgaaaatgtcagcgatgatcttcatagagaacttcggtgggtagatataagtgttacgcaccatgaactctttcaagatatcgttctggattgttcctgacaactggtcaagagtagcgccttgttccaagccggcaacaatatagaatgccaagatcggaagtacggccccgttcatcgtcatggatacagacatcttgtccaatggaatttgatcgaacaaaatcttcatgtccatgatagagtctacggcaacaccggctttacccacatcaccgattacacgcgggtgatctgagtcatatccgcggtgagtagccaagtcgaatgccacggacaaacctttttgtccggcagccaagttacgacgatagaatgcgtttgactcttctgcggtagagaatccggcatattgacggattgtccacgggcgcatcgggtacattccggagtacgggccacgtaaatatggagggataccggcaacataattcaaatgctccatcccttttaaatcttcagccgtgtacacgggttttaccggtatcagctcgggtgtcaaccagttcttctcgatgtgattagctttttcccattctgcagcggcagtggtagctttctctgttgacttgatatttatatctttgaaatttggtttcatctttcaatttttgatttatgatccaattcatttatgatttctgatttacgattcg

SEQ ID NO: 10735 - DNA, 20524 bp, Unknown
  gut microbiota DNA sequence
cagcacgttacatttcacgtgaacatagttcttgatgccaatttcttccagttggggtctgcattccgggttaccggcaacaacgatgatcgctttgtcttttaatgcagcgtaaacttccggtgcgatggttgcatactcgtcatccgagctacagattaccacgatgtcagccttgttgtccatacatgctttagcaccttcttcaacagtcttgaatccgttgttatccatcacttggaatcccgcgcaagcgaagaagttgcaagcgaattgagctcttgctttacgcatagccagattacccatcgggaacatgtaaactaccgggcgacgaccttgttctttagcaaacaagtcggttctgatacgcatagcctcgaaagcttgagttccacggtaaggttttaacgtttcaacaacagcgtcgggagcggttttgtcttccggctctaggatgcaagcgcaaagctctttatccattttctcgttgaagttcgggaattggttcgtccccaagaagttttcttttcggttagcgatgtcttgatctctcttctgtgcggtagctttcacggcagcctgtacgaatcctgattcaagagctttcaccataccaccttgttcttgtacttccaagaagagtttccaagcagcctcggcgatgaattgggttaattcctcgatataatatgaaccaccggcagggtcaacgatcttgtcgaaatgtgattcttctttcaataataattgttggttacgagccacgcgttctcccagttctgaaggatggcactcgtagatgtagtcgtacgggtgaaccgtgaacgagtcaacaccaccgatcgttgcggacatggtttccgtttgagtacggagcatgttcacgttcgggtcgtacaccgtcttgttccattctgatgtttcagcatggatattcatcttgcaaacacagtcacagcaaggattgtaagctttcacgatgtgggcccacaagtaacgagctgctcttaatttggcaatctccatgaagtatttggaaccggtagcaaagtggaaacgcatacgaggagcgatgtccttcacgtccattcctgcatcggttaatttgtcaaggtattctactccggcagccaagctgaaacccaattcctgcacgatggatgctccagaattgttgaatacatatccacctatttcaatggttttgaagtttttcagttcggcagtactttccgtggtggcctttaccacgctgaacgggttcgggtcacagaattttccttctaaaacgagtttgctgatcggatcgatattgatacctccctgtattttttcagggttaaatcctttctctgcaacgtactctttgaacatattcaagatggcaaccttgttgcaacatgcaacgaagttaatctcgatacattccaagcaaatatctttcaacaaggtggccatgtcggctttcgtgaagttcttgcaatttgtaagcacgaatccgagtgagtcaacacctttgttcagaacattcaacgctttcttgttcgcttcagccacatcctctaccacgatgtcttgacgaacgaaccattcgttgttatttttcttgttacctctcacgaaaggatattctcccgggaagcattctaagttcttgaggtctttcatgtcctccaaccggtacatcggttgtacgttgaatccctcgtttgttctccaaaccagctttttatcgaagtcagccccttttaggtctgcaatgactttgtccttccactcttgggtggtgttgggagcaaattcactgaaaagcttttcgtttacattctctgccataatagatttttatgtatttattctgtaactgtttgttattaaaaacgaaaggcaaaattagccgtttttgacaataaaaaaaagaaattcttctttatttcgcctcgtgaatcggaatataagtctttttaaggattttgtgaatagaatgttctatggattatcgggggattatggaacgacagatatttaaagaaatattgcaggaatattatcttgcatagggtaaaggataatgatttgatattcaatagatagttttacatccagccgttaccctttcgatatggtttcgatatatgtttgttctagggaacgaagagataacgaaggaataaaacgggtttggcaggaccggtgtaagagaaggtaaaaagatgctgtggtacatgttgtattttaatagtaagggaaaaatagatgttgaaagtttaacaaatgggtgaaaacgttacgcttgcgttttgtaagaaaaaaaattatttcgtaatttgcaatgttaatttaaaaaacaaaaacagatgaagaaaattagagcagccatcgtcgggtatggaaatataggtagttacgtgcttgaggcattgcaagctgcccccgactttgaagtagcaggagtagtacgccgggatgcgacgaacgtgccggccgaattgaaggactatgttgtcgtgtcggatattgctcaaatcaaggatgtagacgtggcaattttgtgtaccccgacccgtagcgtggagtcgtatgcctcgaaaatactggctatggggattaacacggtggatagtttcgatattcacacggagatttccggtttgcataaacgtctgggagaggttgccaaaaagcatgggaaagtatctgttatttccgcgggatgggatccgggaagtgattctgtcgttcgtgccttgttagaggcttgcgccccgaaagggattacttatacgaatttcggccccggcatgagcatgggacacacggttgccgtgaaagccgttgaaggtgtgaaagccgcattatccatgactattccggtaggtacggggatccatcgccgaatggtgtacgtggagctgaaagaggggtatgattttaaacaagtggccgaggctatcaagaccgatccttatttcgtgcatgacgagacgcacgtgatgcaggtggcgtgtgttgataacttgaaagatatgggccacggtgtgaatcttgttcgcaagggtgtctccggtaagactcagaaccagttgttcgaatttgatatgaagatcaataatccggccttaacgggacaaattctcgtggcaacagcccgtgcatccatgaaacaacagccgggatgctacacgttaatcgagattccggtgatcgatatgctgtatggggatcgggaggagttgatcaagcatttggtatagtttttaggataaaaatgagggagaatagaaactcttcctcatttttgaaatttatgtgatttcattctattttacagttccagttcctccggttccgtcagtccattctgtaatactcgcctgtcccgagactgcttgttgttcaaatgtaagttcaatttcatgagattctccggcttgtggggtaactgtaatatcaatatccgtgaacgtgagaactttttctccattttgtattgtaatgtctgcttttatattggaagaactagggttaatcattatgacatttttgggagcagtagaacctccaatcgtgttatctgtggtgaattccaatttgatatttttggtgtctaagctgtaagtcatagctcctgttgaaagatcaatttctgtcgggatgtttgtccctttgatggtgattgatgtaacggtagcacttgtagattcaaaagagcttccttttgtgaatttgaattttaattgagataaagcatgtgtaaattgaattttgagatttgtcgttgtgtttttattcccggaaatcttttgagcatacataatatctgtttgccctttctctacttctgtaggagtaaattcgagtttgttgtcggttattgtcccggcggatttgggatacatcccaatgaaataagtgtattttgtaggatcttgattataatatagaactggattgaaagtaattgttccgtctgcagaaaccgttgaagtaaggggggtgtaactccacgtaagatttgttccggtttgatctccatctcctttaaagaaaacaaaatctccaagtgttgcttcatccagattattaacagcacttcttccaatagaaacacttgtttcgattccagcatttagtttaatctctaccggagcattaggatcaacgtcatcttcggatgttttcgtacaacttgtcatagctgctatggcaaaaatagatagaataaattttttcatatcgtgagcatttaagtttttgcaaatgtgagagacttgtcacgaaagggatgagtaaaaagtaaaattctgttataattttaccttttcggtcgtgacttgtacgaattccaaagtttttacgtattcgaaattattaaagagcgtccacgtaacgttgtttccattgttttggggtgatgccctcgttgagtttgaaggcagagatgaacgaggaaagtgaattaaagccggaaaggctggctatttcctggatttgcatatccgggtgttgaatgaatagaatcgtggctttctgtatccggtatttgttgacgaactggtaaaaactgaaaccaaactcgttgttgataacgttcgagacatacgtgcggtttgttcccagtaaggcggccacgtcggttatggttaggtttccgttagtgtatatttctttttcatcgaaaagttggacgagttcattcttcatcttttctcttttgatcccgagattttttaaatacttttcgggtaaagcgggaaaaacgggggataattccgtttcgcttgttggagtgatgacaggtggttctggacaggaattagggggaatgctttcctcttcatgaatctctgcgtgttgctccgtgtaacagatataaggttcgttgagagcgtggataaacagataaaaagtgaataatatggaactaatgtggaatagataattgctccagatggcttgaaaacaagatgcgaaaagagctacgaatgcgaaaaatgcagccagagggatggcttggtttagccagtgtaaatcaatgtcttccatggaagaataattctcttctaatcgttgcatgtgttttcgttttaaatgtagaatgcgaagcgtgtatatcgtgatcatgatggcttgaaggattaggctggtacaacggaaaataattagaggtaagttggtgttaaagcacacgtcgttctccgcaaccttttcttgcagaggggacaaaaagaaactgatgatcagcactaaaattcccggcatcaagtgtggccaaattcttcgggatgtcagtttttccggtttcgagagcttgcggaaatagaaaaaatgcaggggaactaagaacaagttaatggcaatatcaaagattggtaagcccagttcacccgtgatatatttatgaatatcttgtatcatgttcgggatgaagatcagccccgagaatgtgaaaataattcccagtagccgccgcggatgcattccggcttgttcactggagatggcccctttgaccgttaatagcgtgaggccgcaaaataggggaatgataaaagaaaggacgtacgaaaaatacatccaaaatataggagaagatatgctgttattcatcatattcctagaatttgagacaccgtccttttattttatgggacaaatataatgaaattataactatatggatattatcttgacattttgaatgaaagtttggaagaataaaaatagataccttaaaaattgacatcctgccgtaaactttgtattttcgtccccattatagatgacttataatgaatgatgaaaagttaaaggaagaagttcgtaaggcttgcgaaattcttaaaaatggggggataattctttatcccacagacacaatatggggcattgggtgtgacgccacgaacgaggtagccgtgaaacgggtgtacgagctgaaactccgggaggacagtaaggccatgttagtattattggacgacgtgggtaagcttgcatcctacgtggaggttccggacgtggcttacgagctgctggaagtgaacgataaacccatgacaatcatttacccgaatgcgaagaatctggcgaagaatctgattgcccaagatcagactatcggcatccggattacctcggaaactttcacgaaagccttgctttaccgtttccgtaaacccattgtctcgacgtcagccaacatcagcggggaaccttctccccggtgttttgccgagatcagtgaggtcgtgaaagccgctgttgattacgtggtagatttccgccaggaagaaacaacgaatcccgctccctccagtattatcaaactagatgttggtggcaagattcaaatcatcagaaagtaataacccgaagattgaagtcgaaagtgtccccacattttcaattttcaattttcaattttcaattttcaattgtattatggctcttattttaaatatagatacttcaacagatgtatgttccgtggcgattgctcgggatggaaacttgattgctttaaaagagaatgacgagggatttaatcattctactttgctgggtgtgtacgtggatgatttattaaaggagaacgacttgacggcgaatgatctggatgccgtggccgtgagtatgggacccggttcctacacgggcttgcgcatcggggtttctttagctaaaggaatatgttttggtgccgggaaacccttgattgccgttagtacgttggccgcactggcaaacgccgtggctcaaagagagggcgaagagtttttttattgtcctatgattgatgctcgtcgcatggaagtctatacggcaatatatgatcgggaaggaaatgtcgtgcgggatattcacgctgaagtgattgaagaaaatccttttgctgatttattatccgcccgaaaggtgttattctttgggaacgggagtgataaagtgaaagaagtcttgaaacatccgaatgccgtgttcattaacggggtctcgacttctgcggcaaacatgattgggcttgctcaacaacaatttgaaattggaaaatttgaagatgtagcctattttgaaccgttttatttgaaagattttgtggctaccgtgcccaaacgaaaagttttgtagttttgctgtattgattaataaagaagatatagatggatataaaattattaagcccttcatgctggacagattacgagttaattgatagtggtgctttcgagaaattggaacgcttcggacgttacgtgattgctcgaccggaaccacaggcgatatggaataaatcgctttccgatgcggaatggcagcaacgggccgatgcttatttcaagaaggacaagaagagcgaagaccggggcgagtggatttgtaagcctaaaatgtcgcagcaatggttcgtgaattaccggtatggagatatgaatatccggatgcggttgggattaacctctttcaaacacgtgggggtatttccggaacaggccgagaactggaattttatatcggatcaggtaaaacgaattggtacgggagcgaaagtgttgaatttatttgcttacacgggaggtgccacccttgctgcgaagagtgcgggtgcggatgtaactcatgtggattcggtgaaacctgtcgtttcttgggcgagagagaatatggaggtttccggcttggatgggattcgctggatcgtggatgacgctctaaaattcgtgcaacgggaagtgcgtcgggggaaaaagtacaatgggattattttagatcctccggcttatgggcgtggggcgaatggcgagaaatgggtgttggaagaaaatattaacgagttgattaccttgtgtgggcaattgttggaaggttccaatagtttccttgtgcttaacctgtattccatgggactttccgcactgttagcccgaagtatcgtgcgacagctagtcggagattgtaccggggaacaattcggagagttgtattttaccgattcatacgggaagtcgttgccgttaggagtttattatcggttgtggcgatgagaattgccttcggcaaattacaagtttgctacttgatcctgttatatctgtattttgcggagacggaatttggggtgattagaatctaaaatcataaatcataaatctaaaatttatatgtatttggtgatttgtgctgatttccttatctttgcaccctcaatgaaaatattaaatttaaaaaaataaaataaatggcaacaacggctgattttagaaatggattatgtatcgttttcaaagacgatttatacagaattgtacagtttcaacacgtgaaacccggtaaaggtcccgctttcgtgagaacaaaaatgcagaacatcaaaaccggtcgtaccttggaaaatacctttacttcaggggtaaaaattgatgtagtgcgaattgagagacgcccgtaccaattcctgtacatggaaggagaggattatattatgatgcacacggaaactttcgagcaaattcctatcgcgaaagatttaatcaatgcaccccagttcttgaaagaaggtgatgctgttgagatggttgtacacgctgacacggaaaccccgttatacgttgagttgttgccgactgttgttttggaagtaacttacacggaaccgggattgaaaggtgataccgcttcttctacggcattgaaaccggcagaggttgaaaccggagcaagagtaatggttcctcttttcatcaacaccggcgagaaaatccgtatcaaaacggaggatggtacttacgtggaacgtgtgaaagaataaattagatttcaatttctccttgggcttcaacttggagtttttggataaccttttcagcggagttttgctccgcttctttttttgatgcgccaatgccttgagccatgatgtcttcaccgatggaaatcgtgcagacgaatttagagcgacgggcattactttcaatcgtttcgatattcaggtcaatcttttgtttttgagcccattcaatcaagcggctcttgtagtttttgtcaacgtacacgaggtcttccaagttcacgtagtgagggaaaatgtaattctcgataaacgctttggttttgtcgtatccttgatctaggtagatggccccagtaaaagcctcgaatacatcaccatagatatgtttgtttttggaaatatccgatttggcaattacttcttcgctcaaccccattttgatggcaatgatattcaatgattcgcggctcacgatcttggagcgtaagcgggtcatgaatccctcgtccttgttagggaaaaatttgtacaagatttcagcgacaatagctcccagcacggcatcgcccaagaattcgagacgctcgtaattcaagacggttccgcttttcgtgtatctggacgccgatttatgtagcaatgctagggtgtataatcccttgttaccgggaacaaatccccattccgaaatagacaatccataaaacttttccttcctgtgaaggtaaagttttatggattgaattattttactaatcacttccccaaaattttagttagtgattactttttgaatacaacgcaagcattgtgtcctccgaaaccgaaagtgttactgatggctacattgatttctttctcttgagccttgttgaacgtgaaattcagcttgggatccagttccggatcaaggttgctgaaattaatggtaggaggtacaatgttgtttttcacagccagaacacaagcgattgcttccaaggcaccggcggcacctaataaatgtcctgtcattgatttggtggaactgatgttcagttcataagcgtgttcaccaaatgctctctgaatggccttaggttctgccacatctcccagtccggtagacgttccgtgaacgttgatataatcaacatctttcgggcttagtccggcatcttccaatgcgagtaacataacatcagctgcaccttctccctccgggtccggggctgtcatgtggtaagcatcgcaattggctccgcctcccgcaagttctgcgtagatgtgagcacctctttttactgcatgttcgtactcttctacgactaagcaagcaccgccttcgccgataacaaatccgtcacggtcagcatcaaaaggacgtgatgctgttttcggatcatcattacgagtggataaagctttcatggaattgaaaccacctacacccggaggggtaatggctgcttcagatccaccggcaagaatcacgtctgcttttcctaatcggatcagatttaatgcatctactaacgagtgtgcggatgatgcgcaggctgaaaccgtcgtgtagttcggaccctttaggccttcttctatggcgatcatggctccacccatgttggcaatcatcttgggtataaagaacgggttgaatctgggagttccgtctcctaatgcaaaagttttgcattcttcgtagaacgtatccaaaccaccgatacctgcaccccagattacaccgattctctttctgtcctcttgcgagaaatcgagtccggcatctttcacggcctccctggaacaaatcagggcaaattggctgtaaagatccattttacggacttccttcttgtcgaagtattccgtgggctcgtagtttttaacttcgcaagcgaattgcgtgcgaaatttagatgcatcaaaacgagtaataggaccggcgccgctgacgccacctttcaagttctcccaaaattcggccacgttatgacccaagggattaatagttccaagaccagttattactactcgtttgaaattcatagataaaatattaaattattgagcgttagcttcaacgtatgcaatagcatcgcccacggtagcgattttctctgcttgatcgtccggaatagtgatgttgaattctttttccaattccatgatcaactctaccgtatccaaagagtcagctcctaagtcgttagtaaacgttgcttcaggtttaacttcactttcgtcaactcctaatttatcaacaatgatagctttaactctgttttgaatgtcagacataactttaaattttaattagacattttttaaattcacacttgcgtctacaagagacgcacataactctctaagttcgggggcaaagttagagaatttatttttcctagaaaattttttggcatgaataaagttttcttatctttatgcgtttgatttttaatagattacaggatgaaaaaaatagcaatatttgcctctggttcaggttctaacgctgaaaatatcattaattattttaaaaatgacaccgaaaatgtcgtgaaaattgtgttttgtaacaaacccgatgcctatgttttggaacgggcaaaacgtttaagtgtgccgacatttgttttcggacgggaagagttctctcgttctgatctggttttgaatgaattgaaacgattggatattgatctgatcgtgttggcgggttttctctggaaggtgccggatgctatcatcgacgcttatccagaccgggtaattaatatccatccggccttgttgccctcttacgggggcaagggtatgtacggcatgaaagtacacgaggcggtgatcgctgccggggaaaaggaaagtggtattacgattcatcacgtggataatcattatgacgaggggacaactatttttcaggccaaatgtgacatcgttccgggggacacgccagagactctggcaacgaaagtccatgccttggaatacgagcatttcccccgtgtgatcaaggacgtccttgataatttatgattttagatgaaagatccagtgggtcattcccaatttttaattctcgattttcaatttttatgagaaggtttattcttttattaggcgtgttgttagccggtttgtgggtacaggccggggaagcaaggttattaaggtttccgcatagcgtggggaacaagttggtattctcgtatgccggggatctttatctggtctcagccgggggaggaacggcccgtcggttgacctcacacgtggggtacgagatgtttcctcgtatttccccggatggaaaatatatcgctttcaccgggcaatatgacggtaacacggaagtatttgtcatccccgtggaagggggtgaacctcgtcgcttgacttacactgccacgttgaaacgggatgatctgggagatcgcatgggtccgaacaacgtggtgatcggttggaccccggatagtaaacggattctttatcgttcccggagatatacctttaacgattttaccgggcaactgttcacggttcccgtggagggagggatgtccgaggaaatacctttaaagaatggcggttttgcctcttattccccggatggaaagaaattagcttataattatattttccgggaattccgggcgtggaaacgttatcaaggtggtatggcggatgatatccgggtgtttgatttcaacacgaagaaatcagaacggattaccggcaacgtacggcaggacgtgttcccgatgtggtccccggacgggaatactatatattatatatccgaccggggtgatatcatgaatctttacgcctacaacgtgaacacgaaagaggataaacaactgacatcttataaagaatacgatataaaatttcccgcgattggtgacaagttaatcgtgtacgagcaaggagggtatatttacgggtatgatttgcagagtggcaaggaatccaagatcacgataaacattgataacgatcaggtttattctcgtccgaccttgactgatgtaagtggccagatttcgagtattgcggttgctcccggtggagagagggtagtcgtggctgctcgtggggatattttttctttgcccgtgaaagaggggattacctataacttaaccaattcttccggtgctaacgatatgcaggcaggttggtctccggatggaaaatacatcagttacgtttccgacaaggacggggaattcaatatttatctccgggatgtggtgacgggaaaagaacggaaactgatcaagaatctgaaaagttatatcttcaattataaatggtccccggattccaagaaaattctctggagcgaaaaagggaacacgttgaatatatccgacgtggaaagcgggaaccggaagattgtggaaaaatcgggaatccgttccatgacgtcctacaactggtcacctgatagcaaatatatcacttacgttcgtccggaaacgacgatggataacatcatcgtgtgtcatgttgaaagtggcgagaaacaccaagttaccgacgggtggttcggttccagttcgccgaatttcagcgaggacgggaaatacttggtgtttgtttctgcccgcactttctccccgacgtatggacggacggaatggaatcacgtgtacaatgatatgaataaggtgtacatcttgcctttggcaaaggatgccccggtattgttcgctcctaaaaatgatgttgtccgggtggagacagccgtgaaagaaaagaataaaaaggaagagagtgaagacaaaggtgtcgtgtatgatttcacgaatttggaaagccgtcttgttgagttgcccgtgctggcatcgaattactatggtaacgtgcatatgttggggaaccgggtgtattataaccggggaggccgcacgctgatttatgacctgaacgggaagaaagaaaccgacatgggtggggacatcgagttttctcccggttataaaaaggcaatcgtttcttcgggttccgcgttccaggtggaggaccttccggtactttccgctaacgtgacttctcccgttcccacgaaaggggtgaaacgagtgattgattaccatcaggaatggatgcagatctataacgagagctggcggcagatgcgtgattttttctatgccaagaatatgcatggcgtggactgggatcacgtgtacgagaaatataaagtgctggtgccttacgtgaatcatcgtacggacttgacttatattatcggggagatgattgcggaattgagtgtcgggcatgcttactccattaatggacgggtcccgatgcccgaaagaattgatatggggttgttgggtgctaaattcgtgaaagataaatccggttattttaaagtgaccgagttgatcgagggtgccaactgggacgcctctacccgctcgcctttgaccatgccgggcgtggaggtgaagacgggtgactatattctggccatcaacggaaaatcgttgagagaggtagataacctgttctccgagttgatcgatatggcaggaaagacggttgaattgaccgtgaacacgaccccggccgagaagggtgcccgtaatgtgctggttgttccgttagctgacgaatcaaaattatattattacaattgggtgcagaataatatccgtaaggtaaacgaggccacgaatggggagatagggtatattcatatcccggatatgggtgttgacggtttgaacgagttcgtgaaacattattacccgcagttgaataagaaagccttgatcattgacgatcggggaaatggtgggggaaacgtgtccccgatgattaccgaacgtttgatgcgtacaccgactttctacacgatgcacacgaatcaaaccgtcgggtcagtaagtccggttggtacgttcttgggaccgaaggtgttgctggtgaacgagtattcggcttccgacggggatcttttcccctatcggttcaagtataatcatttgggaacgattatcggtcgtcgcacgtggggcggtgtcgtgggatatagcggttcgattcgggtggttgatggcggttctatcgtgacgccttcatacgcaccgtttgcggcagacggtagcgagtttattatcgaggggacaggagtcgcacctcatattgatattgaaaatgatccttatttggagtataatggcgaagatcagcaattaaataaagcgatccaggtgatactggaaaagttgaagactgagaaaaaagagattccgtctatccctgcatttccaaataaagcggcaaagaagaagtagtgctgattatacggtgaaagtaacagagtgcttggctatgatgctaggctctcttctttttttatatgtttttgtgctaatcatgcgttggcaaaatatagttatcatctgctgctaatttgtaaagcgtaaaagatgactcccgggtaaggattcaatgatacggtcgtgcgcttactctgttatcaggaaaagggatcaagaaaagacgcgatggaattactttttgatatttggaaaacaaagaaatctaatggaaatccaaagtacaacgataaaaatttgaaaccgccaaggacactttaataggattgctcttggcggtttctgatttttagaggggaatgtattttattggatacttatgttattgctatatttcattaaaatacataaactggaattgatctgcgattcctggttgttctccagagactgctccaaaaggattggaataccagccatcccctttaccttcataacaatacacgcagtgtatttgagccatttttgcttgagttttgtcagggtttactttacctttgaaaccatcaactatccaaacataataactccccgatacaaatggcacggatttgtgacctccaaaaagcgtacaataaccagcctgtgcattttttgcgattttagcataattggctgaaatatcataagtataagattgatcccgtatgtagccataatagttgctcattgtaagtaatgcttgtatatcactccaacttgattcactgcattgtaatttaacactacttggttcaagtgattttataaattccgttaattgtggtacataaagattatatttttcatcgattttgggttctcttttccattctgatatgcaatattcgaacgggaaattgacaggtctttttttgtttgcggtaatcgcttggcgaaggctacagctgcagtgcttgctctgtattttttgtttgtggttgtactacagtttcctagatcatagttgttgttgtaaggagacttggttgaccattttgttttcacgaattctgtagtagatacggttgtccaattttgatcattccttgataaattgtcatttccatcgtaatactctttcaggtcacgcttcaagcttgtcttaatacctctgatcataaaggccatcgctggaatttctgtcgtatctgaaattgctccattttttacataaacaagaacttgtgcaatgcgtttatctccagttgcaatagcaaaacctgtttggccgtttgttttaatagtgaatgtgtaaatattcacgttactatttatgttttcttttgaacggctaataatctgtttatcagtgcaggttatactacctttttcaatatttgttatgattagtttgtttgctgcatttcgggataaatcttggttttgttcttttgagaacccttgtataagttttagtgctgtgagatactctttattattttgttcttgttcaaaattgtttatttgtttatcatcattgttgcagcagatgataacaaataagccgataaatacatgtataaattgccactttttcatgatgcaaattctttaattatttctttcttaattttgatatataccaaaaatcggtgtcataatctccgttcccagtttcaaagcttaaggtcgtatctatataataccatccattataactaccattccatcccatgttaacgtgtaggtagtcaaacaagtatgtggttcctgatattactttatatcccatcccatgtccatcgaggacccaaacgtggttacctgtagctgtaggagaattgggtccagcattttttcttgttgctcccattattgcaatatgatagtcttgcacgtcatttatgagcttactcaagtctccccatttagttttattcaggttttttattggatcatgagcaattttatatgtgtctaaatcatccacaatctcgtttctagcggtttcactttgatatacgctattagttaggtgtgtagtggttttcgtgccattataaatccaaaatcccaatcttgaaatcattcgtaattttttttcaggatctcccggtacaccatattctgggtttataatttttcggttttcctttaaataagcccaatcaataatcatttcttctccattatcgtatccttttatactgggttcaaaataagagtagaccatcattaaagctgtaacagagcaaccaagaggataatggtaagttacccaatcaaaatctggatctgggtatgttggtaacaagagattatatggttcgtcttgtccccagtcgacgccaatataatagatatatggttgccccaatgatggtggtttgatattttcaggttgtgctctactgtctatacttttttctacgatggtgatattattttttatttgttcaaattcaatttcatttatagaaattccaagtttttttgatagtttacatagagttgaagctctcatggtagttctgatgctatctatatagttaagtctatgtagaatgcttgattctgataattccagcataagattgttttctctttgcttgagttcattttcaggagttatcattggaatatatgcaagaacgcctgcaatacgttcatcagcagatactattgcgaatccattattttctccatcagttattgaaatttcgtacatggggattgtttgttgattctggttagaacgagatagctctctatttttctttcctatagaatatttctttttgatggagaagtttttttctttacctcgtgtaattccataaaattgatcaaagttagcaacgaattttatggcctcggattctgataatgtgcctggagaatcataagcaatgcttatatactcctgagtagttaattcaatcttgggtagattttctattcccgtggataagtttttatcttgacaagactagataaatattcctatccatgtaaatgttaaaagatttttttttataagatagcattttgttagtaattaatattacaaatttataatatataagatgagtaaaaaataggactttgtagcaaacttgctcatattttatatattatggcggtattaattattgtttcttgagtaagtgttcatgaaaacgaacaagtttgatacaaatcaataaataataatagctatatttgtatggaagttacacgaaatagtgattattatgagaggatctttttttttgatagttattgttcttttgctgtcctgtagcaagaccaataataaagagttggtagatgattctatcattgaaggttgttctaatgggataatctttacgcctgaaagattatcattggattctaaaatccaagatacgattgtttcaattaatcgaggaggttggtccataacgcatatccaattggttaatggaaaggatacagctcaactgtatgccggaaaagattttccgagacaggaatacgattgtcaattgattaatttgggatggatagagatagaaaaaaaggaaggtatagataatgtatatatttttataaaagaaggcacgagtgaattccgagagtgtggacttcatttctctttcttggaagggcatggtaattattttatccaacaacacaggaattgatagaggtccttagaaaataatagaccattgattattacatgttgaatagtctattcaaatgttttcagtacggtcaattttctattttatctgatagtaagaatcaaggtaccacattattatttcattgccaaaaataaaaaacagatgaggccgaaaattaatattttatatgcggatgatgatgcgattgcagtggaattgttgaaacgtcaagtaggaacggatgatttttgtgtaaggatagctagtgatggacagaaagcttgggaattatttcaatcacacgtaccggatattttgttgctagatattaaaatgccatatttggatggtttagatattattaaattagtccgaaaaattaaccaaaagacccctatcgtggtatatagctctcatctaaatactacacgggagttggaagcctttaacttgggtgcggatgattgtatttgtaaagaaatcgagcctgatttgctcattgcgaagttgaaaaggatatatgatagggtgacgaaaggagaaacggatcctcagatttatattctttcagatcattcaaagtttaattctgtggctggaattttaacaataaatgataaaatcgtgcgtttaaagccttatgattctcgtttattgtaccttttatgcgtgaaattcggtgagctagcggatgaggattatttaatagaaggattgtggggaatggcagattcaaataagggtggttctttgagaagatgtataaatcatttgaggaaaattttggctgatgatatagaaattatgattaaaaatcagtattcaaggggatatacgctagcaacgcttaaattagattctttattgtgattttcaggtggggggcgtaaaagatatacatattgtttaaaaggacattattgatgttgaaaatgatataataatttcaaggttagtatgaaatagtttttgttgcgattcttaattttagcaaatagtcgttatggatgattttcttaaatcaaaattaggtatgaaatggatattgctcctaattttcatgatgtccatttcatttattttattctgttgtcatactggtaattctgtttattgtcgttatcaatttggtaagttaagattctgttctgatacggttgattggggaacgatatatctaggccggacatatcagaagtgtttagaaatatataatcctgatacgatgaaaatcccgttgagaattgtgaattgtatttcaggtattaaagtttatcacaagtcgatcttggctggtcctttattgcatgaaggtataaatatacttgtgaaatcaatagatacgttagtttttgaatttcaacccactgatactaatagccttggaacttttaaaaaagagtttattttagaagtggatcatgtgttgttattctcgcatttgctaatgcaggcccagatacaggaggagtttgatactataaaaaatagtagtgattatccacaactgtcaatgtctgataatttttgggattttggaactattcaatctggggaaaagccctgtcatttatttaaaatacgaaacgagggaaatgggaatttgattatacggaaaatagaagctagttgtgggtgtacagccgtcgctcctcgtgagcggattattttgtctggagaagagactattcttaaagtgcagttcgattcctttggtaaaagtggtaaacaacgaaagagcattaacatatttaacgtgagttcgaaataacttaaaacaacac

SEQ ID NO: 10736 - DNA, 115336 bp, Unknown
  gut microbiota DNA sequence
acgttctgcggggccaacgcaggaacccgcctgaaagttcgtttcatcatggaagtggcatggcaagctcacttcgtgaaaaatatgttcatccgtccgacagaagaagaactagcgaattacggggaaccggatttcgtttctttcaacgctgccaaagctaaagttgaaaacttcaaagaattaggcttgaactccgaaacagctaccgtattcaacttgaaaaccaaagagcaagtaattttgaacacttggtacgggggtgaaatgaagaaaggtatcttctctatcatgaactatctgaacccgttacgcggaatcgcatctatgcactgctctgccaacacggacatggaaggtaaaaacacggctatcttcttcgggctgtcgggaacaggtaaaaccacgttatcaactgacccgaaacgtcttttgatcggtgacgacgaacacggatgggatgatgaaggcgtgttcaactacgaaggcggatgctacgctaaagttatcaacttgagcaaggaagcagaaccggacatctataacgccatcaaacgtgacgctttgttggagaatgttaccgtagacgctaacggaaagatcgacttcaatgataaatctgttaccgaaaacactcgtgtttcttacccgatctatcatatcaagaacatcgtgaaaccgatctctaaaggtccggctgcacaacaggttattttcttgtcagcagacgcatttggagtattacctccggtatccatcctgaccccggaacaaacgaaatactatttcttgtccggattcacggcaaaactggccggaacggaacgcggtattactgaaccgactccgactttctctgcttgtttcggagctgcattcctatcattacacccgacaaaatatgcagaagaactggttaagaaaatggagagaacaggagcaaaagcatacttggtaaacaccggatggaacggaacaggtaaacgtatctctattaaagatactcgcggtattatcgacgccattttggatggctctattgataaagccccgaccaaaacaatcccgttcttcaatttcgaggttccgaccgcattgccgggagttgatccgaagatccttgatcctcgcaacacatacagtaacgccagcgaatgggaaaccaaagcaaaagacttatcagaacgtttcatcaagaacttcaagaagttcgaaggaaacgaggccggaaaggcattggttgccgcaggtccgaaattataattccaggattagaacagcaaaaaagcacttcgcaaggagtgctttttttattgcccttctctctcccatcaccacatcttcccttacatccgtatttcaactgtcaagaataaacaaacagaacccggccacacagggaccgggttccagaaagatattttaatgctttggatttttatcccatatagcctttcatgacaccccgtttgctgttacgcacgaacataatgatctcgtcacgttctttggatgccggcatctcggcctcgattcgttccaccgcatcagaattgttcaacccggattggaaaaggatccggtatatatcctgaatctcgttgattttttcgttcacgaatccgcgacggcgcaaaccgatcgaattcacacctgcataagataaaggtaatcttccggctttcacgtaaggaggtacatccttaccaatcaaagagcctccctgaatcatcacgtgacgaccgatatgtacgaactgatgcacggcagacattccaccgataatagcgaaatcatccactacgacctcaccggccaactgacaagcattcgtgataatgcaattatccccgatctcgcagtcatgcgcaatatgcacgtaggccatgatcaaacaattgctcccgactttagttacccccttagcggcagtacctctatttatagtcgcacactcccggatggtcgtgttatcaccaatctcgacgattgtcttctctcccttgaatttaagatcctgaggaatggcagaaataacagcccccggaaaaatcttacaatttttcccgatatgcgctccctccaggatagtgacattcgaaccaattcttgttccctcctcaatgacaacattcttatcaattgtcacaaaaggctcaatcaccacgttatccgcgatctgagcttcaggatgaacataagctaacggttgtttcattcgttttttttatttaattacaatataataattacattttaagtacaagcttatcactattttttcgtttttgcaacctgggccatgaattcacccacttcacaaactaacgttttaccgacaaaagcgtaccctctcatcgtcacgatcccgcgacggataggagcaatcttcaccagcttaaagactagcgtatcgcccggaacaactttatgacggaatttgattccatctattttcacgaaataggtggaatagttctccggatcttccacctgattcaacactagaattcccccgcattgcgccatcgcttccacgattagcacgcccggcattaccggttcttccgggaagtgccccacgaagaaaggttcgttcatggtgacattcttgcaaccgatcacgatgtcatccgtcacctcgtaaatcttatcaaccaacaggaaaggaggacgatgaggcaacaaggctctcaccttattcacatccattaacggttcggccgtcgtgtccacgtcgggacgaacatcttctctttccgcctgcgtgatggccttacacattttcttggccaagctagtgtttgctttatgacccggtctctccgcgataacacgtcccttgataaaacgcccgcataaagacagatccccgataacatccagcaatttatgacgagccggttcattgtcaaagtacaggtccaaattattcaaaataccctgtttcacctcgatagaatcgtggttgaacaatttagccagacggttcacctcttcttgagagatttcacgatcaacaatcacaatcgcgttatccaaatccccgcctttgatcagattgtgctgcaaaagcatttccaactcgcgcaggaacacgaatgtccgacacggggcaatctctttcgcaaaatcggttactttttcagaataagtagcatactgcatttgcaagtaaggagaatcgtaagcaacgaccaaatttatattatagtcggtgtccggcaataacgtgattttcgtctgcccgtcctcactacaaaattccatttgctctttcactgtaaagtagcgtctatcagctttttgttcttcaaaacctactttctctatctctttcacgtaatatttagcactaccgtccaagatcgggaattcttccccgcttaactcgatcaggcagttgtcaattccacacccgtaaagagctgccatcgcatgctccatggtgaacacgcacacgccgtccttttccagacaactggcacgatccattaattttacatattcagccaaagctggaatttcaggagatccctccaaatccattcgacgtattcgatagccaaagttctcttcagctggtttaaaggtcgcagtcacctgtttcccggtgtgcaagccttttccattcaaagaaaattcactctttaaagttctttgctttactgacattttattctgattttaatttatttacttctttctctaaatcttttatttgcccgtatagctccggtaatttacggaacatgacataacatttttggtatttcggataatcgaatgcaggcgatccgcgcaggacagatttttccggaatgttggaagttataccactctgggctgcaatctgcgtccccgatccgatattcaagtgaccgacaatacccacttgcccgccgaacacgcaattctcacctacttttgtcgtcccggcaatcccagactgggcagcgataactgtgttaccacccaccaccacgttatgtgcaatctggactaaattatcgagtttaactccctttttaataatcgtagatcccatggtagcccggtcgatacaagtattcgccccgatctccacgtcgtcttccagcaacacgttaccgatctgcgggattttcttgtaatgatccccttccggagcgaatccgaaaccgtcagcccccagtaccactccggcatgaaggatacaggatttcccgaccacgcatcccgtgtaaatctttaccccggcataaataatcgtgttatccccgataaccacaccgtcaccgatataggcctgaggatatattttcacgttattcccgattttcgcacctctccctatatatgcaaatgccccgatgtaaggtttttccccgatcgtggcactatcactgatataagaaggttgttcaattcctactggtttcggcttcatatcatcatacatttgcagtaacgttgcaatggcatcataagccgattccacccgaatcaaagtacaggaatactcgtgcgtgggttcaaatgttttattcactaacacgatcgatgcttgcgtcgtgtagatataatgttcgtatttaggattagctaaaaaagccaatgttcccggctttccttcctctattttagatacgttatttacagaaatctcggggtctccatcgacaaccccgcttaatagagctgctatgtcctttgctttaaactccataattcaaaaaatttcggcaaacttacaaattttatttggaactatatagaaaatgtgacaaatatgtttccataccaatatttaaaaccatacatatcaaggcttaaaggcttgtttccaacacgattcccattacgatgaaacctctttcccgaaaacattcgccccggaaaaatatcccgccctcacctattttccactggaactctttggattaaaaataattaattgtatctttgcactcggttattaacaaacgagggggcgattagtcccctcttctgttatcttagattaaagagtagaatgaaaagtacagaggaaataaaagacattatcgaaacaatactgcaggggacagatttgtttctggtggacttgaaagtatctccggacaactcgatcgaggtctacatcgactccctgaagggcattaacgtggattcctgcgtgaccctcagcaaacaattggacgcaaaactggatcgagataccgaggatttcgagttaaccgtttcgagtgccggaattggttaccccttcaaagtaacccagcaatacgagaaaaacctgggaaaccaagtggaggtgaaactgcaaaacgggggaaaattacagggaaccttaaaatcccattccatcacgggaatcgtaattgaatgtgaagaaaaagtggccgtggaagggaagaagaagaaaagcatcgtcaaagtggagaaagagattcattttacagacataaaggaggttaaagatattgttgttttctaaatacataaaataaaaatggaagccattaatttgatagattcattcgcagaatttaaagagcttaaaaatattgacagggcaaccttgatgagagtattggaagatattttcagaaacatgcttatcaagcgttacgggacggacgagaattttgacatcattataaacatcgacaagggagacttggaaatctggagaaaccgtatcgtggtggaagacgatgccttcgaaaacccgaatacccaaatttccctgacagaagcaaagaaaatcgatgccgactacgaggtgggagaagaagtgaccgacgaggtgaaattcaaagatttcggacgccgttccgtgctggctttaagacaaaacctttcagcccggattcttgaactggagaaagatcacatcttcaccaaatacaaagagaaagtgggccagatcgtgaccggagaggtttaccaagtatggaaaaaagagattttggttctggatgacgaaggcaacgagttgatcctcccgaaacaggaacaaatccccagtgatttcttcaagaaaggagataccatccgggccgtcgttattcgtgtggaaatgaaaaacgcctccccgtacatcatcctttcccgtacatcacccgtattccttgaaagattgttcgagaacgaggttccggaaatatttgatggcttaattacgattaaaaacgtggtacgtgttccgggagaacgcgccaaagtggccgttgaatcatacgatgaccgtatcgacccggtgggtgcttgtgtcggaatgaaaggttcacgtatacatggaatcgtccgggaactgagaaacgaaaatatagacgtgattaactacacgaacaacatccaactatacatcacccgcgcattgaatccagccaagatcaacaagattgaaatggacgaggaaaacaagagagcgaacgtttacctgaacccggaggaagtttccttggccatcggtaaaggcggtttgaatatcaaactggccagccagctcacgggctacgagatcgatgtttatcgtgaacttgaaaccgcagaagaagaagacgttaacctggaagaattctccgacgagatcgaaccatgggtaatcgaggaactgaaacgcgtgggttgtgacacggcaaagagcgtgttagagttaagtgaatcagaattagagagcaggactgatcttgagatagagaccatcagggatgttctcaaaatattaagagccgaatttgaataaggaacgctcaaggttataatgcttgtaaaataaaatcttaatatggcagttagactaagtaaagttgctagagaatttaacgtaggtttgtccacgatagtggattacctgcaggaaaaggggattaagatttcatctgatccaaacgcgaaactaacagatgaccagtactctttagtagcaaaagagttttctaccgatagcgaggctaaaaaagaatccaatcgagtagatttaaaaaatacacggttaaaaaaagaaacggttaccattgataacatgaacaatggtacggaggaacacgctccggaatttatatctataaaggacgagattaaactggaaaataaaattaaggtcgtggatcacatcgacctgaacagactgaataaacaacaaaaaccggaagagaaggttgaggaaataaaagaggtgaagatcgaggaaaagaaagaagaaaaaccggcagaacctcaggtaaaagaaactcccgtagttgcacaaaagcaagaacgggaagaaactcaggctcctgttgccagaactccgaaaacgatcatcaagcaaccgaaagttgaaacccgtcaagaggaaaaagccccgtctgaagattattccaacagaaccgacagggaagtgagctacaaatcaccgaccccggcgattaaagacgtgaaggttgtcggaacaatcgatctggacgcgatcaatcagcgtacccgacccccgaagaaaagcaaacaagaaagagaaagggacaaacgggaactcaagaaaaaatctttggttcctcccaagagtacggatgacatcgtgatcaagaaaaatatcgtgataaacgaaggtgaagaagattcagatgaatcggaaactcgtaaaaagagaaaacgtattctgaaaaaagacgagaaaatcaatattgaagcttctaaaaccgccaagcaagaggaaagtaagaagaaaataaagaagataaagaaaaagaaagccagcaaggctgaaatttctgaagaagacgtacaaaagcaaatcaaagacacgtttgcccgtttggggaacaagggaaaaaccaagagttccaaacaccggagagacaagcgagatgccgtacaccagaagatgcaggctgaaatggagcaggcagagctggaaaagagtatccttaaactcacggaattcgttacggttagcgagttagcaaccatgatggatatttccgtggcagatattatctcaacttgtatgtccttgggcttgttcgtgtccatcaaccaacgtctggatgcagaaaccattaatatcgtggcagaagaattcggatttgatgtcgaatttgtgagcgtggatattcaggaggccattgacgaggatgaagacgagcaggaagaacacgtggaatcccgtccgccgatcgtgactgttatgggacacgttgaccacggtaaaacatctttattggactatatccgtaaagcaaacgtgattgccggagaggcaggaggaatcacccaacacatcggtgcttacagcgtaaaacttgctgatggtagaaccgtgacattcctagataccccgggacacgaggcgtttaccgccatgcgtgccagaggtgcccaagtaacggatattgccatcatcattattgcagccgatgataacgtcatgccgcagactgttgaggcaatcaatcacgccagtgcggcaggagtacccattgtattcgcaataaacaaaattgataaaccgggagctaaccccgacaagatccgggaagaactggctgccatgaactacctcgtagaggagtggggtggtaaataccaatgtcaggaaatctcagccaaaaaaggtttgaacgtagaagaacttctggagaaagtgttacttgaggcagaaatcctagagttaaaggctaacccgaaacggaaagcgatcggttcaatcatcgagtcctcgctagataaaggacggggatacgtggcaaccgtactcgtacaaagcggaacgttacgcattggagacgtggtactagccggacaatatttcggacacgtgaaagctatgttcaacgaacgcggaagtaaaatggaagaggctggaccatcctgcccggcattgatactcggtttgaacggggctccacaggccggagacaaattcaacgtcatgggtaacgagaaagacgcccgtgctttggctaacaagcgagaacaactgcaacgcgaacaagggttacgtacccagaaacatatcacgctggacgaaatcggtagacgtattgccatcggaaacttccaggagttgaacatcatcgtgaaaggagacgtggatggttctatcgaagctttgtccgactctttgatcaagttgtcaaccccggaaatccaagtgaacgtgatccacaaagccgtggggcaaatttccgaaggcgatgtcatgttggctgccgcatcgaacgctatcatcatcggattccaggtacgtccctccatgggtgctagaaagctggcagagaaagaggaaatcgacatccgactttactctattatctacacggctatcgaggaaatcaaatccgccatggaaggtatgctatcccctgaattcaaggaagagatcacctctaccgtggaagtgcttgaaacatttaagattaccaaggtgggaacgattgccggatgtatcgtgagagacggaaagattactcgttcttcaaaagtacgcgtgattcgggacggtatcgtgatcttcaccggagaactaggatcattaaaacgtttcaaggacgacgtgaaagaagtttccaagggattcgagtgtggtttgaacatcaataattataacgatattcagacaggagatttcatcgaaagctttgaagaagtggccgtgaaaaaaacattataaaaaatttaactataaactaacatagtttctctcgataattttgtactttgcatcactaaattttagagagaaattattttaaaaactaatttaatttattcatgaaaagactattaattcttacagcaatattaaccttaatggttggggctgcaaattcacaggtattaaaaccagtgaaatggcaaatttctttcaagaaagtaagcgaaggtgtttatgacatcatctgtaaagctactgttgaaagcggttggcatctgtatgacaccaaattaccggagaacggacctcttcctacaactttcaatatagatgaagatgagacaaaagacattgaattagtaggagaatttaaagcaaccacagaacctaaaacagaaaagagcgaagccttcaatatggaattgaaatatttcgaaggaaccgtgactttcgtacaacgggtaaaactgaaaggagacaaagctaaattagtaggctatgtggaatatatggcttgctccggcggacaatgtatccctcctgccgaagaagaatttgaattcgaattaacgaaataatcaaaaagccgtcttcggacggctttttttatctctcttccccatagatcaactagaaagaataaaaatacatgcactacaaccgaattcttttgttctgtatcgtcttcctgttgttcacgtcttgcaaagagaagaaaccacccgtacaaaccgattactcgctgaaattgccccacccatcacaaacgctaaccctcttgttttgcggggacatcatccaacaccttccgcagatatatagcgcacacgaaccatcggaaaaagactacaagtaccaaaaatgtttcaagtacatcgctccttactgggcagatgccgatttcgtcattgccaatctggaaacgaccttggggaataaagacttttccggttatccccgattttgctctccctggcaaatcgcacgagacctccatcaactgggagtaacaacatttgttaccgccaacaaccatagttgtgaccaactcgggaaagggatcactaataccatctattatttggactcattaggaatcccacacacaggaacattcacagataccctcaattacaaaaagaggcacccgctctatcttcagaaagacagtttcaaaatagcactactcaactacacgtacgggacaaatggcctccccgttccgaaaggttttgtcgtcctgcacattgacacaaccgccataaaacaagacattcaactggcccaccgagacacggccaccaacattatagccttcatgcactgggggtatgaataccataactttccaaacaaagaacagcgggcattaagtaaatggttgcatgaacaaggagctgatatggttatcggttcacatccccacgtggtccagccgatagaatattatacctcgaacaaagatacactaggcgttaccgttttctctctaggtaactttatttccaaccaatcccaacagggaacagaaggaggaatatgtattcgagtaactttaacgaaaccccggaactatcctgtacgttatcagatggagccgattaaattttacatgtaccgtccctacgaggaagggaggcggcgttattacgtggttccggaaaatttggctgatagtattatgaaagatttccacctgatgaagagtaaaaacttcttcaagaaaacggattccatactgaaatcaaccaaaacttttagtttttagctttccggttttcacttacatatttatatatttgtatgaccttaaaataacatgaagatgaaactagcagtaatcgcacatgacgggaaaaaagcagatatggttgctttcctgaacagacattatgaattcatgcactcggcaaacatagagatcattgctaccgggactaccggaaaacacgcacaggctgccgggttaaaagttgaacgccttctttccggtccactcgggggagatgcccaaattgcagcacaagtggcagaacataaagtacaaatggtgctattcttccgagacccgcttgggaaacaccctcacgaaccggacgtacaaatgttaatgcgcgtatgtgacgttcacaatgttccattagcaacgaacccagcatctgcggaattgatgctgaaaggtttcgagaaacagatgcagaaatagttaatgttttattaaactttgtgtgaagatttgcaaattcgcacacaaaaaactatgtttgtatcgattaaaggtttgtaaaccatgaggaaacgacagatagctattatcccgcttatttttgctagcatgattatgctactgtcgtctattatgcctcatcatcaccatggcaaattaatctgtttcacgcccacacatgaacacagttcgttcatcgaaaaagaatgtcacaatgaacatgactcaactcctaccgagggtgaatgtgaagtcagattactattccagacaagtattgtaaaacaacatcatgacgagtgtaattgttatccgaatatcatcccggatcaaccattccaatccatactgccccttgccgggttagatcactcgttattacttctcggaatacctaaagaaattccacccatattttaccgggaacgtctccactcgatcacgtggagcatcacctctgccggcagggctcctcctaccgtaatagcttaaatatagaattactcgcccagtgtaaaccggacaattattatttattgttttattctcaacattaaatcatttatttatgagaacaattatttatgctattacaatattagcaatctccttatgggggtgcaaaaaccaatcatcacaagataaacacactcactctgcaacggagactcacgcaggacatgaccatagccacgaaggacataatcacgaacatgagggacacgatcatgaacatgaaacggcagaggaacacgccggtcacaatcacgaaagtaaagcaacaaaacacagtgacgagatcattttcccgaaagcccaagctgctaaaaccactttcgaagtacgggaaattcaacccgcctcttttaatcaagtagttaaaacaacaggacaagtgcttgccgctcccggtgatgaggctgtcatcgtcgccaccagcaatggcgtcgtttccttctcttccaacaaattaacggaagggacaaaggttcaaaaaggacaatccctgttccagatttcctcaaaggacatcgcagaaggagattactacacgaaagtaaaagcaacttacgaggcagctaaagccagctatgaccgtgccgaggctcttgtaaaggacaaaatcatatctcaaaaggaattcgaaagtaccaagctggaattcgagaacgcaaaaacagcttataacgccgtatccaataacaaaacggcaaagggagtcagtgtaaacgccccgatcaacggacacatgaaaaacattcttgtaaaagaaggagaatacatcacggtcggacaaccgttagcaacggtttctcaaaaccaacgcctagtactccgggccgaagtatcccaaagatactacaatgccatgcaatccgtaaagagcgctaatttcaagaccccgtacgataataaagtttactccttggaagacctaaacggacgcttgctctctttcggaaaaacgtccaacgagaattcattctttatccccgtatctttcgaatttgacaataaaggcgaagtgatcccggggtccttcgtagaagtatatcttatttcatccccgattgaaaacacgttatccatccccgtgtccgcattgaccaacgagatgggaatctactacgtgtacgtgcaaattgacgaggaaggctatcgtaaacaagaagtggcattaggtgccaacaacggtaaagaggtacagatcatcaaaggccttcaccccggagaccgtgtcgtaactcaaggagcctatcaagtcaaaatggcctctgcatccggagcaattcctcacggacatagccatgaacactgataaactaaaagttagaagataaaaactaaaagtttaatttagagtttgggacaaaaacatcagccttgtgtggctgaaatctaaaatttaaaatctaaaattaatcacggatgctgaataagattatacaatattcattacataaccggctggtagtaatgatcgcatcgatagctttgctcctatggggatcctacacggcgcataaaatggaagtggatgtattcccggatttgaacgcacccacggtagtagttatgaccgaggcacaaggaatggctcccgaagaagtggagcgtatggtaaccttcccgatcgaaacggcagtcaatggagccacggacgtgaaaagcgtacgttcatcctctacaaccggattctcggtagtctgggtacaatttgattggggtaccaatatttacacggcccgtcagatcgtgtctgaaaaactatccacgttgggagatgttttaccgagtaacgtggggcaacctacccttggaccgcaatcttccatcttgggagaaatgatgattttcgggttaactgccgatagtacgtctttacaggatttacggacgattgccgactggacgatacggccccgcttgttatccacgggtggagtagcacaggtcgccgtgatcggtggtgacatcaaggaataccaaattcttcttgatcccgcacggatgaaacattacgggatcagcatggatgaagtgttgaccgtcgtggataacatgaatcagaactccacgggaggtattctatacgaatatggtaacgagtacattgtgcaaggtcttttggcaacaaatgacgtagaagaaatcggtaaaggtgtggtaaaaaccgtgaacaacgttccggttttattatcggacatcgcaaccgtacaaatcggaccgaaagaaccgaaactggggcttgcctccgaaagagcaaaacctgccgtactggtaaccatcacgaaacaaccgaacacgaacacgctggagctaaccgataaactggatcaggccatcgtggacctacaaaagacattaccgtctgatgtgaaaatctcttccgacatattccgtcaatcccgctttattgaaagttctatttctaacatacagaaagcactgttcgagggagctattttcgtggttgtcgtgcttttcttcttcttaatgaacgtgcgtaccacgattatttcgctagttgcccttcccctatccttgctggttgccattctaacccttcacgggcttggcctgacaattaacacgatgagtttaggaggacttgccattgccatcggttcacttgtggacgatgccattgtcgacgtggagaacgtgtacaagcgactacgggaaaatcaattaaagcccgcagaagaaagactttcctcgctgaaagtcgtgttcgaagcctcccgcgaagtacgtatgccgattctgaactcgacactgattatcgtggcttgtttcttgccattattcttcctttccggaatggaaggacgtatgttgattccgctgggtatcgcatttatcgtggccctattcgcctcaacagttgtggcattaaccttgaccccggtactgtgtagttatatgctaaccaccaaaaaggcgctgaagaaaaacgagaaagaacctttcgtgtctcgcaccttaaaagtatggtataagaaagcattggaatgggctctccgccacaagaaagtagttatcgggacgagtgctgccctgttaattttcacgattatcatcatgaccggactgggacgtagcttcctacccccattcaacgaaggatcactcacgattaacatcagtaccatgccgggaatctccctcgaagaatctgataacatgggacgtatggctgaaaagatccttctggatattccggaaatacaaaccgtggcccgcaaaaccggacgtgccgaattggatgaacacgcccttggagtaaacgtttctgaaatggaagcacccttcgaactggacgaacgttctcgggacgaattcttggctgacgtacgtcaacgactgggagaactaaagggagtgaacatcgaaatcggtcagccgatctctcaccgtattgatgccatgctttccggtacaaaagcgaatattgccatcaaactattcggaaacgacctaaacaaattatataacatcggtggacaaatcaaagaggccattcaaggaattgacggaattgccgatttgactttggaacaacaaattgaacgtccccaattgcagatcaagcccaaacgggatatgctcgccaaatatggaattcctctgcctgaattctcagaattcattaacgtggctctttctggtaaagtcgtgtcacaagtgtacgaaggcggtaaagtgttcgacctcaccgtaaaagtacatgatgatgccaaagctaacatggaacagatcggtaatttaatgattgacgccaacggacagaaagttccacttcactacgtggctgaaatccttcctttggtaggtccgaacaccatcagccgtgaaaacgtgcaacgaaaaatcgttgtttccgccaatgttgccggacgtgatttgaacggtgtggtaaaagacatccaaaagacggtaggggaacaaattaccctgccggaaggttatcacgtggaatacggtggacaattcgaaagcgaacaagctgcatctcgcacgttgttcctaacctcggtaatttccatattattgatcttcctattattgttcaacgagttccatagtatgcctctatccagtatcatcatgttgaacttaccgttagcaattatcggaggaatactaagtatctggtttacatcgggaatcatcagtattccggccatcatcgggtttatctccctgttcggtatcgctacccgaaacggtatattactcgtatctcactacaatcacctgcgctcggaaggtatgtctttgcatgatagcgttgttctcggttcacttgaccggttgaacccgatcttgatgacagccttaacttctgctttagccttgattccgttagccgtaggcggtgaccttccgggtaatgaaatccaaagccccatggcccaagtaattctaggtggattattaagctctactttattaaacggttttgtcgttccgatcatgtacttgttacttaatcacaaacagaaagagatcgagaatctggaaatgtaaccttttgaaaataaagaaatgaaaacatataaattgtacatactcggattgatgcttttgggttctctcaccacgagagcccaaagcagcatcgatcaagtgctgagaagcattgaaaccaacaacaagtcattgcaagccaacacgaaaatgaccgatgctcaaaagttggaggcccaaaccggaaagtttcttgccaacccctcggtggaatgggaacagatgtggggtaaccggaacaatcccggttcggagtacacattgacggtaaaacaatctctggattttccaacaacctactctaacaaaaataaattggcaaacttaaaagcgaacacgatcggattccaatccgccgcctatcgccaacaattgcttttaaatgccaaacaaacttgtatagagattatctacttgcggaaacaaaagagcctcttggacgagcggttagctaatgcagaaaccatgttcgctctctacaaaaagcggtttgaatccggagacgcaaaccaattggaattaaataaaattcaattggaattattgaatgcccaaaatcaaagccgcttgaacaaagccgctttaaccgctgccgaagagcaacttcgcaatttaaacgggggaaaaccgatcacgtttgacgcaacggactacccggcgggagaagaactcatcaattttgaccaattacaagcagccttcatggatgcagacccgaacttaaaaagccttaccggaaatcaagagattgccaaccgggaagtgaaattaagtcgttcccttaccttgccgaaattcgatgtcgggtacaaacgcaatgccgcttcacatcacgtggcctccaatggatttatggtaggagtatctatccctctgttcgagaacaagaacacggtaaaaaaagcaaaagctcaggcagaatttgccacggcctcattggaagacaatcgcttgaatttgaaaacgaatcttcaacagctttatcaacaagccgaggcattacagatttcccgtgccgattatgccaaagtattggaacaacaacgtaatatcgaattactcaacaaggcactaaacgccggacaactctccgtaattgactatttcacggaactctcgacaatctatgatagtcaccaaagctatctggatgtagaaaaagaataccacagtatattagctcaattgtatcaatacaagctataaaaaattacccccaaaatgctttcgtcattttgggggttcttactgatctaatcaaacaattgagaacaaaaatctttcaacttttcacctcttaaccctttagctataatctttccatccggatcaatcacccatatggcaggaattccaactataccgtataattcgtacacgtgttttttattcttacctcgcaagattccttggttccacaccataccgtcatcttctattgctttccgccatgcctgttcatctttatccgatgacacagaaaagacgtccaatcccttttcatgaaatttctgatagatttccttcacgtgaaccgattcggcacgacatggcatacaccaagacgcccaaaaatccagaataacatatttcccccgcaaatcagccaaagatatggtatcaccttccaaagttatagcggtaaaaacaggagccatacttcccggagccacccgagtcaacgtctctgcccgattcttcatatcaagataataacgattaccagcaagttgttgatcgaatttctttaaaactgaataaatctcgtcagcatccatgttcaaatatctcttccagtaactatacaaggttgctaaagaatttccatctccgaccaacttatcttgaaaacgaagtaattcttcctcgtattcttgcataatcactttccgtcttgccatctgttcttcttcgctcacctctctcattttaggagcaaacatggcattctctcttttttccgataataacttcgtaaaccgttgataactctgccactcatcatttccccgagtgcccgatgcccgggagaagaaaagagaatccacgtgaccgcgaacctgtacatttcctttctctgcaaagaaaagagcccttcccggaagattaccaaattgtaattcatacgcttccccgtaatattctcccggcaaatcgaactgaaaccgtcccccctgcatagacacattcatcaccgtatcatactgaaacccggcaacctgacgtagaaccgcaatctctacatcatcctttatgcccttgatacgcccctgcacatggcaaacatctttagatgtacaggcacatacacagatcaccaaccatatccctaataatcccttcatatgcttatttatttatacatgaataacttctctggtgtattctccttcttggacaaagttgccagcacatccgtacgactaggcaggataaccacaacagtccccttatccacgaatttagacaacttcaccaaatcatcattttttaatcggatacatccgtgagtctcccgcccgggaaccgtttcaggatcatgcgtaccatgaattccaatacctttaaatcccggagtactcaaccgaataaacagaggtccataagcccctttcaccgggcctttaccgaaatcatacgtccaatgtgccgcaggttccttactcacaactttaaaaacaccttccggtgtccggttatccccagctttcactttctgcccgaaattcatcccgcaagcgataggaaattttaacaactcctttccatcattatcgtaaacagtcatcttcatctcttctttagagacaataatgtaagcagccttttgcgcaaaggccgtcgacgtgattatgaaaaacgataaacacgtcagaatatatttaaacttcatgtgattactttcctaatatttcagcaataatataattcatgtgggcatatttctccgtgataaagagcaagtaccgaacatccaagcaaattacccgatgcaaattttgatcaaagttaaaatcacgggtcatggattcccagttgcagtcaaataccaacccgatcaattcccctttcgcattcaataacggacttcctgaattacccccggtaacatctccattcatgataaaatcagtcggcagatcaccattctctccataacgcccgaaatctttactctcccaaagtgttttcaatttttccggcaaatcgaaatctggattccccatgttcacatccgctttcgctatcaccccacttaatcgtgtctggtaaggtttcactgttccgtttcctaaaggtaaatcacaaatcgttccgtaagaaagacggatcgtcttatctgcatccggataataatcttcttggtggaaattcaatcttcctttgttatactggtattgagcttttcgaacgacatccagttttttgctaaccaaagcaaatatctccttacgctttttctccatctgtgcctccacctgataggcaatgtcattttcaacattccatttcggatcattcaaagctgccaacaaacgttcttcattagcaaatacagattgatcatacatattatcaacaaaccgatcaatatctcccttgtattctgttttcaaagtagtgaaaaattcaggtagcaaatcggtctccagatcattctgcataatctttaacaaagcctttgtgacagcccgatcaaccttttcggaataatctttatactgcatctttgtattcactacaaagtttttcatcgactcacctctttctttcctaacataagggatagatcgtccaaaaccggaaatgaaacttatcatctcacatccttcaccaaaaacttccacgtaatacccttgagccaaacgataacgagccgtctctttaattcctttctccatcgtctgaagcatgccagtataagcttgacgtacggaatcattctcgcaagaattcaaaaactctcgttcttgttcagcctttttcttacaaacatcaaggtcctcaatccattgatttaccccaatggaattcttacaataattggctgatgatgcaaatttttctgcatatttaatacgcagactctcgtcctcacgcataaacttctgcaatatttcctgtctggccgtacgaaccttgattaacggaggattcaacacattctgcctctcccagatcagcatagaagttgcattccgttccgtgaaaccgggataaccaattgacattgcgtaatctcctttttcataaccttctgcagaaaccttcagatacacttccggatgataaggcacattatcggcatgataaccggttgatttcccgtctttcgacacgtacactctcaggtatgcgaaatcgcaaccgtgacggggccacgtccagttatctgtctctcctccaaattttgcaattgcaaaagggggcgcacccacgagacgaacatcttgaaatgatcgggttacatacaacacgtgcaacgtgtaatcccggtaactcttgacagtcactttcatgcccggatactgtttacggtatttttccgcgatcccattaacaactccaaatctcgtactatgttccggttttactcccaccaacttggcgttcacttcctctgaaatatctttaatcacccggttaatggaaatatcaactcccttcaatggaatttcttccccctggttcatcgcccagaatccatctcgaatataattatgctcatccgaactactctgttgaatagctgcataagcacaatgatagttcgttagcagcaaaccgtctttcgaaataaaagaagctgtcccacttccattataagaaataatagcccggcttaaactatctacaatatattccactggaatttttaatcccaattttttcatctgggcctcgttgtgctgtttcagacgtgataacagccacattccctcgtcagcacgcagcatcaacacggggcataccagtaatagcaatataattattcttttcattctcgaacatttagaaaacaacccggtaatcacttattttggaataacccggtacaaaatgcgaccaattcttcccctttaagtccttgagccaaaattttaccttccggatcaatcacccatatagccggaataccgtcaatcccgtatagttgggccaccggggtgttcttcccgccttttaataactggcacccatgattccaggtcatgccatcttcctcgatcgctttcaaccaagccgcttttttatcatccaacgagactgaaaacacgtccaatcccgcgtcatggaatttattatatatatccttgatataaaccgtctcttcccggcaaggcgcgcaccaggatgcccagaaatccaaaacaagatacttaccccggaaagaggaaagttttatcgtgccatcatccaccgttttcacctcgaaatcgggtgccatcacgcccggggctattttccgtaaaatatcggcttgggctttcaattccttataataccggttatcggctaattgaggtgtaaatttttccaacgtccggtcaatctcgtcatgttttaataattgcaatgattgataatacaggaataatgcgacaacagaattcacatctgcttgcgctagagaatctctataatgattcatctttgcatccaatgtttcgaaaatttgtccatatttcactcgcttaacactatccgggtctgcgctccccccgatctctttcatcaagcgggaccgttctctactgatttccctcgtaaatttttggtatcgatcccaactatcattttccggcgtacctgtcacctccgcatcgtaaatcgttttaccgttaccctccacacgtacatttccctgttccgcaaaaaactcaaccgatgaacgtttatccccaaacttcaagctgtattgctctccccacaaatcacgagggatatccactcgaaaactcccgtctttcatgacggtttgtatcagtgtatcacgcgtgaactcgcctgtcctgcgcaacaggtaaaccgttgtctcccccgggaaatcactcatcttaccatccactctacatacatcatcgctacaactacttaatattaacatacaaagcaggtacatcaatccaccaaactttctcatactcgactttttatataaatacagtttttacatacatgaacattttcagagggaatacaccgacatcaactgtcgatgcacccctagaaaaatactaaactttatgtctattttgacttataagccatatgagtgatctttttaaaaccatcatacgtctcaaccttgtcttttaagacctctccactagtctccacgatcggacattccagcaatttaccttctcctgtcgttgaattataaaccccgacataaaggagtttgccttcattctcattaccggaaactttaaacaaatacatcatcgtaatttcatatcccgcctggatcaactcgtttggcaaagtataacgcaaagttgaagttcctccatccttaaagttacactgtttaacttccgtcgctgttgcataataaagtaactcgctccggtttcccacggcaaacgccttggcatctttcatgtccgtacagccacttgcactgtatttccccacacctcggtttccatcatcaaatttggaaaaatcacacacgtaaacagaatgatccgttacattatccggatcgcacatcacgcaataccattttttctcaaaaccatgctcagcatataccatgtctttccccaccgcattcatatcaaaagcagcagatgccccggcttctttaaatgttttaagtaatttttgaccatcaatatacaggaaacgtctttgcaatctatcataaaaaacgccgaaataatatcctcgctcttgggttccaataaacggttcggcataatactccaaaccaaaaataggaataccgaattttacgaatgtagtcgaagcctgtgaagcaaaatataatctcccatcattaaccaacaaatcattataactccatgaattatatccttgaaaattgattttattactttccaacgattccgtgaacatatcggcatacgagtccaatatttccaaatcacttcctctcgtccggaatccccctgcattccctttcgtgtacacgtaaacattatgagtattattcacgtaagcaaccatacccggcgctcctactgctctacgtccgttagttattgagaaaatattatgctttacaccatccatcgttgcatccgaaacaatcctatcgtttaccaagatactcacatcggttgaatctgcatcaccatgcatcaccatcaatcccaccgaagcaaaagattccacataaagcttacaagagatcacctcggatactccattttgtttatcagttacggtaaaactaagcgtatattcccccggaggagttgttactttgtaatttaatttcctctcttgtccaacaacatcatttacaacttttcccgtttccgagttaggcatattcgattcctggaaaattctccattcataagacaaatttgaatcatccactccctgcttaacttccggatcgactaccaaataatccaattgggttatccgatacgaatttgacatcttagaagaatctatctcgataggcaacaaatccgaataggaataatttccttcatcatccaagcaagcttgaaaaaggaaaaatcccataatcaatatccatatatttttattcatattctttcaattaattctgtcaacaatccatattttcctatccaataccaccaactccggtccagacattaaattcgaccaatccaagttcatcctctaaaggcttatcatgcgtcttattgtattcgtaaagagcttcacgaaccttcgcattataataccctaatgtcacgagatcctgcggatccggtaattccacgataccgcaagccttcaaaatgaaagcataacgagtctctgtaaactcaccgaaacaaggtttgtaattggaaatatcccagttatccggcttaataaacatatctccccaccaaaagacggctttgctcgttttatcaaaaccaaccccaaaatactcattcggctcaaccgtcaactccaaacgcacactcttatcttttaaacctgcacgatacacgactaaaggtacatctaccgtataactattagccggcataataacgggttccagtttataattttcatctctctttgcagtagttgtttcctcattcaccacaagcttgatttcccggtcataaggaaacgctttcccgatgatacgcactttaaaccacaaggtatcttccacgcagtcatctcctttagctggaaaagaaaacaccatcgaatcccgaggggtattattcaatccataacctggcatttcaaacaccagatacgcctcgtccccgtaaacctctacctctttttcttcacaagaagacaaagcaaataccgaggctacaaccagcatgatatatttaaaataacaattcataattctcttattttgtattatctgttgtgtaatagtctccaaactcaatttcattatccggtttcggcaacacgtaaacattatcctccgtagcagactggtatccataagggaattttgccaactcgttacgtttacaataatagaaaagctgtccctcagccaaaaactctttcgcatactctttcgtcagctcatcacgcaatttacttgcatccgtcaaatccgaatcgattccacgatgtcgtctcacctcgttcaaataccccaaagctttatcgttatctactcccatcaaacactcggccatgatgtacgccatctctgaacgacgaatcatcggtaatctcttggcataatctgctttataattatccggttgataatatttacgaatcacataatccttactaccggtttcctgttgtttcataatatagtttacccggtaatcatttcctccaaccgcatttccccgtccgatctcgtaccactgctgcatcgtgtaattttgacaataaagctgttgactatttccacttgtcaagaaccaagtattagccaagtctttcaaatccttcacatttagagcaaagatatgctcggtagagaaagtaaaatcacgatctttatcttccgtggcagagatagaacttgttgttacccaagggaaaatatcatcggcaatctccaaaatctccccggctgcagctttggctgtttccagatcatctccccacatggccacacgagcttgcaaagctttcactgcaaaataattaacacgcatctgccgagcattcatgaaaccatcaccggaaacatctttcaattttccttcccgaatcgggtctttttccaaacaagtcaaggcattcttaatatcctcgttcaacaaagccaacacctctttacctgtgtacacgtgaggaacttcgatttgtaagttttttacatacgggatcgcctctttattcaaatcagctgccgatgcaaataaacgcaacaaatcaaaatgaatataagctcttaatcccaaagcttctcctttgataatattataattatcacccgtgaaaacagattgacgtttatcaatattatccaatagattattcacatttgccagcatattatacatcttactccacatcgcatcaatctgcgctcgtacgggagtactggtcaaatatttccattgtgcaacttcattgtacactttattattataagcggcataaggacccgtcacagcatcaataaaaccgtaagtcaattcacgcccgtaaagcgcctctgctttcatcaaagtataagccccgatcaaagcatccttaaaacctgcctctgtttcaaacaaatcatcagacttcaccttcgtacgggggtccacgtctaaccatgactcacaagaacttgtcagcacagtcagaatcagtaacacactgtatataattctctttttcatcttcagatttcttaaaagttaacattcaacgtaaacgaacagtagcgggcaaaaggatacgaagttcctcgttctatctggacagaagatattttaccaatatcattcatattaaattgcaattgtaatctctccaatccacatttctccacgaaaccaaaccgataaaaatcatacccgattgacaatgctgagaaatcaaactcatttaacttctggacaaaacgagaagtagcctgagtcggtttgttccaagctccgatactcttaaactgtacattatccccttctttcatccacgcatcgtagtaggctcgtttatccacattataattcaattgtgcattttccaccttatccaccaaggtttgattatacatgtactccccgatacgatacaatccggtgaaagacacggataatcctttatattcaaaagtaaaaccgacattacccatcaacttcggttcagtatctccacaaaccacttgatccaaagctgaccatgtatctgtcaacgtaccatcaggacgtacaaaaacttccttaccgctggatgggtcaatacctttagaacgaacggcccaaattgcattcaaagactgtccctcgacaaaacgcacgaaaggtttgttcgaattggctgcctctttatcttgtgaactcgtcaatgaactcaaagaattggaaatctccttaatcttatttttgttagaggttccagcaacaaacacgttcaatgacatccggtcctccggacgagtaagcaccaaataattcacgttaaactcgtacccggtatttaacaacttccccaagttatccttgtaactgttaaaccctaaagagggtggagtcgtaatatctgtcaacaaattgttagttactgaacgatagtaatcaaacttcacattcaaacgtccccacaaattcatgtcaataccatagttcgtgtcaaatttttgctgccatttcaatttgctgttagccagaccttccaaataagttccgataaaatccaaataagaatcatccgtgaaatagttatacagcaacatcccctggtaagaattaaaattctgagaacccgtgtatcccatggatgctctcaaccgtaattgtcttaccactccggaatctttaaagaatgcctcgttatgcacgttccatcccaaaccagcagaccagaaagttccccaccggttgtcagatccgaattgagaagaggcacttgctcttaacgagaaatctgccaaataacgatcatcataagaatagtttacggccaataacgttcccacttcccggtcgatagactcacttcctgtcggttttgaattatcagcatattgttttgcaaagatgatattatccatcttatcgttcgggaatccgactgccgaatgaatatactcttccgaattaccactacggatattagcacccaagttagcaaacaaaatatgcttgtcccaattgtgagaataattcaagtttatatccgaacttacagaaaatgattttccataagtttgcttataacttcctcgtttgaagaaatcatcctcagccgttcttacaaatttcaaatggcttcccggcaagaactcttcacccccgctaattctattcgtcaaaccgacacgtcccacaagtttcattcccgatttaatattccattccaaataagtattattcgtataatccgtataattcttcttatacgtcgtatttatcgtggcattaaacaaaggattgtacacgttttctgaaagtacaggacctactcccaaatatttacgtaatgtaccatcctcattataaggacgccaataagaatttaacttggcatattccgagaattcaccatagggagaatcttccgacttcgtggttgaaaacgagaactggttccggaacaataattttttatattgatagattaccgtgaaccctcctccaatcgtgttacgcctagaacccttcataacaccctcgatattattgtaagaaaggtctactcccactctcaattcactcgtacctacctccaaattcaatgaatgtttatgtccgattccattacgcaaaggtttcgacaaccaatccgtgtttaccccttgctcaacttcagccaaattatggtaatacaattgttttttctcaaaatcctgcttgggagtgatcccttcataagcacccaattgatattccaaatctaatttctctctggcgttacacaaattataactgctcaaatcaggcatttccagattcaaagaaccgatataattcacccgcaactctccggattgtacgcgaaccgtctcgataaccatgaccccgtttgccgctttagaaccatagattgcttttgccgccgcatctttcaacaatgtaacactttcaatccggttaatatctaggtcaatcactttctccaaagtcgtttcgaaaccatccagaataaacaaaggtaagttcggattcgacgtatattgtcctttaatatccgggaacgaagaagttccccgtaaatccatatccggcaatttattcgggtcagaaccaaaagataaattctgggaaatattcaacgcagggtccatatttcttaaactctggatcaagttttgatttccccgtttcaacaattccttccgggtaacggttgttgccgatccggtaaaactctctgctctacgttcgaacacaccggtaaccaccacttcctctaaactctctgaactctccttcaaaaccacacgcaaaggcttttcgtctttcaccacaatttcctggctttccatacccacgaacgaaaataccaaggtaacctctccttccaaggtaaacgacaactcaaattttccatccacatccgtcgcccctccaaaagtggttcctttcacgacaaccgttaccccaggtaaaggttctccgttcacgtcaaccacctctccggtaaacacgcgtggtttcgcttgcacatccttttgttcggaaactcttttcaccatgtatactccatcaactttagaatacacaaatccacttccttccaaaattttcccaagagcaacgtctacggaaacattcttcagattcaaatccttacaagctttatcacccaaaagctcttcgttaaaaagaatctggaccccggtcaaatccttaaacttgatcaaggcactgttcaatgactccgatttcactgtaaaattaactagcttagtagagtcctctgttgtcgcgtaagacaacgaaaaagagaacattaaaaatactaccagtaaaattttttgcaaaaatacagaccgcacatgcctgtcacgtgtcctttttttcatacatttgtaaaattaattgttaatattaatcaccgtgtagagaatgccatctaaagtttgccgaccaaagaatgcattctctgcttttttattttctcatcacttttattgtattttcttctactgcaaatttaacatcgaacacttcctcgaaaaaatgtagtatcttatctatattatcatagcgattcagatttcctgaaaacttaaattttttcaatcccgagtcctcaaaaatgatatccacgttataccatctttccaatttgagcataatgctttccaacctctcgctctcgaaacaaaacattttatttttccacgcaatctcgttgtaaattttcacaagtttcacctcgggtttcttagccccctctaccaaccttaactgataaccgggttttattttcaactcggccacctcttcgctcttgaaaccaatatttccttcaaccaacgtggcctttatttctttttcttcaggatagaacttcacgttaaactgtgttccgtacaccttaacctctcccaaattcgtctccacgataaaaggttgtttatcatttttcgtcacatcaaaataagcctctccttttaaaaatacccttctctctgtccccacgaacgctgtcggtattcttaactgggtttccgcatttaaccaaacctttgttccatcactcaactccacctggtactctccccccctcggaatcatgatcgtgttatactctacttttgtatcattttttcccttataccgaatcttcccctctcccgtcgtaacctctatcccatccactttataacggctagaatctgccaaccattccacatccacttcttccccatcggccaacagaataattgctttatttcctcccggaaggatatcttgggcaacattcgtttcctccttaaccggttcatcatgctgggcaaagaaccacattcctccccccacactcaaaacaaccagtagacaggctgcataccaatacacattccgcattatccgacgacggcgaagttctttctccttttccacgtaagcatcaaaatgagtcatcactttggacagattcgatttcaaggaagaggtaggctcttctgctccccaaacctttcgcacccgttcaaaatatacttcatgacttttatcttgagccagccattcctgaaacgcactctcctcttccggtgtcaatccccaccgtactcttttcaccagaatgtcccagctaatattaattttcttatccataaatcaacacgcttaatcaaacgttacattttacccttaattaacacgagattcaaaaacggatgacacgataccaaaaaaaaatttatctttgcctgaaataagatgtcaacgatggatcaacttactgcacgagatgacttggggcacttgatcaaaaaacatgatcaagaggcttttcatgagttataccgaacgtcattcaataagttgcagcaatacgccatgcgttatctttacgattgggatgacgctgaagacctcgtacaggatgcttttctttccctttggtcccaccccgaacgttataatgaaacacaacccgtattttattacttattaggtattgtcaaaaataattgcctgaactatctccgttctctaaatattcaatacaaacatcaagataaaatcatcgaggccatgctattttctagtattgaagacccggaaatcgatgaagatatccacgaacggctggaatatattttgaactccttaccagagaaacaacgggaagttctcttgctacacgttgtagagaagaaaaaagttcgtgaaatcgctgaagagatggatatcgcagaaacgaccgtgaaaacccacttccaacgagcattatccatccttagaaataatttaaaatttatcctgttcgggatataatcgactattagtcttccgataaaagttgctccatccgttgcaacacgatccctttctccgccaaccgttccgtactattatgccctccggcatacaacctaaaatcaaaacccaaggtttctgccacttccgcatcatgcagcgtatctccgaccataaccgtctcacccggaacaatcgggaacatctgtaacatctccatgcctcgtgccaccttaccatccgcataaatattatttgacccgcaaacaccctcaaaatattcacgaataccaaatcgctctagcattcctatcaataaatcttctttcaatgcggataatacatattggcgtatgcccttcctctttatcccttccagcacgggaataatcccgggtgtcaattccactttttccgccaaatcattataaatattcacgaaatctctcgatacctcctcccaatcatcctgactaaaatcaaacccaatcgattcataataaggcttcacgggaaatccgaaaatagaccggtattcctctaccgtcaacttccccaaatgtttccgctccaacatcacgttaatcgtatccacgctaatcttcacgtcgtccaacaacgtcccattccaatcccaaaccacattcttgtatctcatatcattcattatttcaacatttagacggtcaccatatcacgtgcaaacctttcccgacaaagataatcatttcctgttcgaattgaaaaaatagaatccgaaggggctcgattcatgtaaaacaagtaatcaaaccaatttcatagttaatgtaataatcatcatgttattattcacttatacaaatattaacatcctctatacaattacaatttttttatcatcataataggagcggaatgggacaggaatgggagcggaatgggagtggcttactttatgataacaacatgataaaatcaaaataacattattttacattaattcaaaataaactcttgttaaacattgtcaaaccgacatggcattccgggtcatctcccgtcacacgggatacgggctcaattacttgttttcttcgggatgaaatgcctcgattcccgtccatcccaatcgttgacgagccacgttttccggaaatattcgataaaccacatcagcctcacttcccaatgtcccgtcagcattaaatagttccacgtgcattttcgctaaacgggaagtttgttccacgatgcgggaacgcagaaatagttctccccgatctgaatagaccgtagcacgatattttgtaatcagttcaaccgtgactcccgcacttttcactttcgcaaaaacgttccaacacgcaatttcatcaatcaatgttgcctgtattccaccatgcaacacgtgaaaaaaaccttgaaattcgggacggggcatccaatgacaagtaatatattccccttcttcataaaattcacagcgcaaaccatgttcatttccggatgcacaaccgaaacaattatatccctcgtgttgctcgtaagcgttgtatagttttttcctttccatcttctgataaaaaaagggacgtggtcgcgtccctcatgataaattgtctaatatttttacaaattgctattaatcagcttagcacaagcttccatttcctctttcgggaattgtttcttcgggttagagaaattcaactcgttaccttcaaccaaaggaaccaagtgaatatgagcgtgcgggacatccaatcctactacagccactcccactcgttggcaggaaatactcttcttaattgctttggccacctttttggcaaataccatcatcccggctaattcttcatccgacaggtcaaataaatagtcttcttctctcttcgggaccactaacgtgtgtcccttttgcatgggatttatatccaagaatgcataataatgttcatcctcggccaccttgtaagatggaatctccccgttaataatcatcgtgaaaattgaagccatgatctatttaagatttaaaattttagattttagattgccagctccgctggccttcattttcaattaaatggaaatgtccataatctcaaactccatcgtccctgccggtacttgaacttctaccttatcgcctaactttttaccgatcaacgcttttgcgattggagtcgtgatcgacaacttacctgccttgaagtcagcttcactttctgacaccaaagtataagtcatcgtagcttttgtttttatatttttgattgtcactttatttaatatctgaacttttgacgtatcgatttgtgactcgtcaatgatccgacagttcgaaattacatcttgtagctgagcgattttagcctccaatagcccctgggcatctttcgctgcatcatactctgcattctcggagatatctcctttctcaatggcttctccaattgccttagaaatcttagggcgctctacattctgcagattgtccagttcatcctgcaattttttcagcccttctttggttacataagataccttctttgtcataattattatattaagatattgatttatacataaaaaaataaatgacacttatcctccaataagtgcctttatctagttaagaattccatcatatctggaatcctcacctcctgaagacaaaattaggacctttttttgaataaaacaatttttccctacaaatatttttaatttaaaaacttactgccatttatctgatacagaaaaactatcttcccctctctacgagcagataagaaaagattgattaaaaaatattttatttcacttttcgatatcacagcacaaaatcactaaaaaataggatcaaggcaagtaatcttcccgaatattttgcattgctgcaaacaaattactccgagcatgaggagaaattgcttccatttgatcaagcaatttactcacggcatcccggttagttgctttttcgtggggacaatgttttttctgctttttaaattgtctcatttctgcataacgtgaagtctcgtcattcgaaagatagattaacggacgaataagcgtaaaggtattcttgaacatttccaaccgggcaggcatactgcaaatcgtcccattgaacatcatgctcatcaaaaggctctccacggcatcatcccggtgatgccccaatgctaattttttacaatcatattctttggcaatatcaaaaagcattttacgccggtgccatgaacacacgaagcaagctggtttcttgggattcacggtagtatctacccgaatagtacgataaacatactctacccccaaacgctcacaaaatcccctcaaatactctccatccacttcataagcgacatcctctaccgcaatatgagccgcaataaccgtgtaattttgcttcggatccttggctcgcatggccaatacctctaatagcgctaacgaatccttaccacccgatacgcccaccaaaatccgatccccatcctctattaaatgatagtcatgtatcgctttccctacctttcgaaagaaatcccgggtaaatactttatcttgtttttcacctgttatcattctcttctatgtataatttctctacctctgttgtcatgtacttttggttccggtcattcgagtttacaaacgtgagtcaatacggttatgatttacttctttcatgcaaatttaagaattccacgccacatattattgctctctcgcaaatatttgtaaatttgaaccttcaatctaaaaaccacagtctattatgctaaaaaaagtcccacatacctacaccattgtattctcgatcattattatttgtgctatcctaacctggattatcccgggtggagaatatgcccgagaatctgtcgatgttaatggcgtagaacgaaccgtgatcgtgaacgattcattccatgaggttgcaaaaagcccgcaaacatggcaagtgttttcagctcttttcaacgggttcgaaaaacaagccggaattatcgcttttatcctaatcatcgggggtgctttctggattatgaataacagcaaagctattgacgtgggtattttttccttcttacgttccacccaaaaactggaacatatcggaattatccgtaaactaggtgtcaataacatcatcatcacgatggttatgctcttgttcagttgtttcggggctattttcggcatgagcgaggaaacgctggcttttgtcattatcatcgttcccttggccatatccatggggtatgattctctcaccggagtatgtatggtctatgtcgccgcccatgttggattcgcaggtgctatccttaatcccttcacgatcgggatcgcacaaggattatcagacctgccgttattttccggtttcgagtaccgggttttctgttgggctatccttaacgtaatcatgattacctgggtgttacgctatgcggcgaaagtcaaaaagaatcctaaagcctcactcgtgtataacctagatagccattggagacaagaaaaagtggacaatacgcaagaaattgaatacaaaagttacacctcatcctggggcgtctatctttttattcttatcggacttgtacttttctcctgttattttccccgtacaacgttatccatcggggaacactccagcctaaccacatttgttgtcccggcattaaccatactatttgccctaatcggatatttttctttacgcaaatcttttcacttctttatcttaacaattctaggcttcacgattcttttcctaattgtaggagtaatgggttacggatggtatctgcctgaaatatccggattatttcttgccatgggaatcctttccggttttgcagcaaaagaaaatgcagataatattgtcaagctttttattgctggagtgaaagatattctttctgccgcactagtggttggtttggccggaggtatcatcattgttttacaagaaggtcatatcatcgacccaatccttcactcactggcaagcttgatgagtgaggctgggcgtgtactttcactaggtatcatgtatttgatccaaaccatgatcaacatcatcatcccatcaggttctgccaaagcagcccttaccatgcccatcatggctcctttttccgacgtgatcgggttatccagacaagctaccgtgatggctttccaattcggagatgggttcacgaatatgatcaccccgacttccggcgtattgatcggagctttgggaattgcccgtatcccttacgatatttgggtgaaatttttctggaaatttatcctgctacttgtcattatcggtttcgtactattaattcccaccgcaaccatgcagttgaatgggttttaatgaaaaagagtacctcaagctactctttttcattcatccctgaaatacataacgtccaagcatgttcacaagccggattcttcacgaaagacggcggtagtgtcaccaacactccatttcccactcgcttataagacaaattccctttatatcccaacaacgagattttagcccctctagccgggctgatactatacagcataatctgagaaggcggattcacttcattctcgtcattcaaataaatggcatatacttttccgttattcttatgcttcgtgtaacaaatcttggcttctttataaggagcaatcgggcgagtttcgtagatcgcctccccgttaaccttcatccaaacccccatctccttcataatcttgattccttccggcggaatctccccgttaccatccacgcccacgtttagcaagaaatttcctcctttactaacaatatccacgagataatgtaccagttcccgggttgatttatatttatctcccggtaaataagaccactgatttgccatcgtcatacaagtttcccacgggtaatcccacggtttttcgggaatcttttgttccggagtacggtaattctcgtatttcccgccaatccaacggtcaacaacaatcaatccaggttgataccctcgtgccatctctacaattcgatccattttgatatcctgatcccgattttccggtgcaacccatcccccgtctaaccaaataatatccaccttcccgtacccggtcatcaactcttttatctggttatacgtgaaatcacaaaacttctcccacatccacgggtgattcttgattttgtaattcacgttacgatcaccgtgttgccaacgatccgaccaataataaggactattccaatccggtttcgaaaaatatgccccgatcataaaatcccgcttttggaacgcaccaaacaattctttcagtatatccggattaggtgccgtatgatacggacattccgaggaagtaatcttataatccgtttctttcgtatcccacatacaaaaaccatcatgatgcttcgtcgtgaatacaaaatatttcatcccggcctcttttgccagatcagcccaatattccgggttaaacttcaccggattaaacgtcttcttcagattcacgtaattccggtaatattcatcataagaaattatcgtgtcccgctgaatccaatctacatcttccgtgcaaattgtccacgactcgcaataccctttttgactatacggtccccaatgcacgaaaaaaccgaatttcaaatcctgccattgttccaatttcacctttaccgccgggtcttgctcttgataatattccataccttcgtactgggcctttaacaaggtataccacgataccagtatcatgcacaaaaataatcttcgcatactctatttacttttaacatattacacaactctgcaaagataaaaaaagagggagacaaaactccccctctttacacaatatcatgatacccttatcactttaatcgttcctctacaaaagccctcaatttctcacctctcaaattcttcgctataatccggttattctcatccaacacgaatatggttggcaccccatcaatattatacaatttaacgatctcccctttccaacctttcaaatcagaaagatgtaaccatgtcaacccgtctttcttgatcgcttccaaccacttatcctttttctcgtccaaagagacactgatcacggacaaacctttatctttaaattcagcatacaatttcaccatattcgggttctccatacgacacggcccacaccaagatgcccaaaaatcgatgatcttcaatttccctttcacgtcatacaaagcaacttcttccccttccggtgtttgtaacgtaaaatccggggcaacagcatttacatcaaccccttccaacgcctgaattcgagcagccactaacctaccgggacctgttgcctttgctttatctgtcaaacttgcataacactctttcaagcgattcaaatccaaacgctccattcctgccgtttgaatataggctgcaaacacgttatctttattcctctccaacacttctcccaaacgagattgggcatccgccatcacttgctccagttttttctgcaattcacttgccgtgcggtaatgctttgcctcactcgcctcctccaactttgttcgggcagccttaatcttttcgttttcttcggcaacaattccttggtatgctattaactcactctgtaattttcctcctttaatcacgcttttaccagattggaacaattccatctcgtaaggtgcatccgaatccaaaataaaaacaaagcccccaccatacccttccacataaatcaacgcaacacaaggttcattcatttctccttccaccacgaactttccttcccgaatatctccttgccccagcgtatccactcgatccaccaattgggtaatcactatcattctgcccgatggcatctccggtatcttcccgttaatcgtaaacttctttccttccccgaaagataatccggggaaaaggaaaaaagtcattataaacaattgactaaataacttgtacatatctattgaattactctcattactgttgtaaaaatcaaatcttttatctccccaaaaccggtaaatgtgtgcgacgtcacgaaatctcctgcctcatctagaataacctcatgcaattcaccagcaccagccgcattcacaacaattcccaaacaacgatacggggaagaattatccgggaaagaagcatcaacgtcagacctgaactttaatttcgtaatcacgtcccccgcatcatacaattctatcgactctttacttaccgtgttaaacaaaaacaccttactctccttcgtgtaaaagaactgttcagcataagcagaagatgtagcaaaacaagtattctggtcaaatccgagttctcccagattcaccctcttcaccttaatcggagattcgtctgctctcattgatttttctttgtcactagcctctatataaaaaacatagctggtatccgccatcacgccaatagccgttgcaccagtttcctctgatcccgaagtaatcccttgacctaaccacaaaatctccataagatgagtcaccccatcaacctcctcggacaatccttcaaccgggaaatcgcttatctctaccgtattcgactcaactgcattctgcgggtaactcccatcgggacttggaatatcgtaacaccggttttcagcaggattaaacgacatgaattttcgattcattttatcccaaatcgtggtaaacccacttctactcatataaattttatcgatcacgtaattctgcacatcagcttctgtcaaaccggtaaaataatatccacttcctcccgaatgataaaatttgccattattatccaccgcaatagcatacctgctcatcgggtgagattcactataaactaaattactgggattagcgccaggggcaaataacgatctggaatctttcctgtcttccaacacgaaaggcaacatcaaagcaacagaatcacgctgaacgacatacaaactttcacacttatccattccatccgaaagagtaaggaaattcacgtacgacaaagcctccgctttttgaaatcgttccctattccacaaatctttataagcatcataactgatgatcggattcgttgaatccggttcttccaccgtagataactttctgtcattttccggtccattcaagataaaccatgaattcacaaacggaactttagtcgtcatgataaaatcacgataatgatcaactcccgttctcttatcactcaagcggaatttgacattatatttagttgcttgcttcggagggtaagccagttccaattctttcgtaaacacactatcaacaacattctcagaaccctccttatacgccaccgtccacaaatactccacattatcctctccttctaccatactttgagtaaaaaccggggaataagttacctttaattcttcctgtgccggttgacgatattcatacctatacgagttaccttcctccacaacaatcggggttggcataaacataagtccatcaatcgtatttatttctttgtagtcgtaattccctttatcatcataacatccgacaagaaaccacgcaacaaatccgactataaatattaatcttttcattgtttttctattttataaaccatagaataatctttctttcatataacagggaactgctcaaacggtaatggatcattcggatgttcagcgttatattggtcataggcatcccgcaagcgttggttcgttcctctctcgtcctctacccaccaccaaccgaaatagttataatcataccctaaagcctccttcataaattgatctttagccattgaatattccccgagcatatgttcaaaattactccaccaaacaggagccggcggttccgggaatgtaaaatctttctcctctccgggatgcgaagcgttgtattcattcaaagcctcaagtaaaacagcaatatcagaactccaatcagcccaaggatcatacaattttcccaaaatggttaccatgaatgcatacttgtcctcgctgaaatctccaacaacactcgcatcccattgagacggctgtggataccgattactcaataacacttgatactcactcttctccttcgctcccaactccaaggaaggatccgaattctcctcatccaaaacaattccaatcgtgtaatttacacgggctaccggattcaacacgtacacttctaccgtatctctcagttgcccggcacgaaacacgtacgaaggttcaaactccaaaaaagtttttgccacttcatccgtaccttctgccaccaccgcctttaaccgaaattctcgatcataatccacggcgtgtcccatcatggataaattcaactgtatcttctttttcaacaaagaatcaccggtataccgtctctgcgtgtaataaccaccttcacccgggatcccggaataccacgtcgtatccgttctatactcttgcataaaatcaaccgtcactctcattttattcgtgtcataatcgaattgtaagccatcccgttctatcgaatagccgagaatctccttttcctgacacgccgctaaagagaataacaaaacacttataataacatatatatttctcatattctatactttgcgtttaaatgattactcagcctctccatatgttttttcgtcatccggaaccggtaacacgtaagctgaaaaattctccacgggacaacggtagaaagttttcatgttatgcctcttcaggaagtaaaaatactgtccttcagcaaaaaactctttctgatactctttattcaattcctccaaacgttgctcttcggtcacattcgtaccgacatcatatgcccgagaaatacctctggcattcttcaccgcattaatatactgcccacattcagacaaggctaccgattcagctaatatatagtacatttcagccaaacggatcaacgggattttctctccatacagtccactgcctaaatatttgcgacaaaggaaactattcccggaagtatgaataaaaccataattcgagcgataacgcatatcattcaacccaatccccgaatttgtttcaaacacggacgaaatattggttcgagaaatataatactgcgtgtcgaaagtggtagcatctttccagtaagcagacaacttctcctccatattatacatggaaagtccgaaaatagtctccccatacaaagacacatcttccctgttgtcacgtacaagccgtaacccggaattattaattacctcccgagcataactcgctgcttgtgccttatttcccatatacaagtatactcgggctaacatagccttaactgcatacttattcatgcgatgcttacgctccccgacaaaaggctcgttcgcaacattatcataattcaacggatcattcttcaataactcttcagcagccttcaaatcggcaacaatacgcttcatcacttcgttagccgccatcaacggtgcgctctcagaattgaacttctcccggtaaggaatacacgcttttgtcgaatcttgagaataaatcggtccccacaaacgcaacaaatcaaaatagtggaatgcacgtaaccctagcgcctcccccttcatcaaatcacgatacccctctgtcacgatcacatccccgttcgattcaagatattgcaagaaattattgatattcgcaatctcgttatacaacttcaaccagatctcggcaatcgcatttttagaacttgtcgtttcaccatatttatagatagctgctcgttcctcatccgtcacagaccccgccgcataattatcatatcgttgaaccaacttctccacgaaatcaaatgtcatctgcctcccgtatgatttttccagtaccatcatgctatacaacccggtcaacgcacttttgaacccgtcctccgaagtgaagaactcttcggcctcaatatccgttttcggattcacatcaatccaattctgacaggaagacaagaacaacgaaacgatgcaaattgctgataataataaatttttcatctcgtactcctcctcattttaattaaacaataccgacaatgacacgctgaacgttctagcaaacgggtaatccaatcctcgttctgttctaatggatgagattctacccagttcttccatcgttgcattcaacgacacactggcaattcgacacgcttgcaagaatttaaaattcttcggatcaaaacgataaccgactgccaaagacgtaaacgaaaactcattccgtttctgcgcaaaacgactgctcattcccgtatcctggttcgtcatctttatcgctttataacgtgcatcccggttattctcactccaacgatgtgataacgcccgacgatccaaattataagccgcacttgaattttcaattttatcaactaacgtctggttataccaccatcctccgaactcgtatgaacaagccagagaaacactccaatttttatacgtaaacgccgaagaaacagcccctctcaatttcggttccgtatcacctattgccactttatccagcggatcccaaatataagttttctctccattacggtttaagaacacctcttgccccgtggccgggtcaattcccaaagaaggaaccacaaacaactgggtggtagatttcccttcctcgtaaatggcctccggacttccattctttttctccaaatttttctggttcatagccttcatttcgttcgaaatcttcttgatcacgttacggttatgcgaaccattcattgaaacactccattgaatctgtctctcgtaatcctgaataggcatcacacttaatgaaatatcatatccctcattttccacagctccaacattcattgttttagtggcgaacccggtagaaggagccatattataatctaacaacaactcatccgtgtaattattatagtatgaaaaagacgcatttacccgactattccataatcctatctctacagctaaactacgattctctgtcgtagaccatcccaaatccggattacccataccctttaactgcgctcccaatatatccgaagacggataggggaacaacaaatcatcgtacgagtaagtctctttcgcctggtaaggagaataactttgtgaccccgtgacaccataagacccgcgtaacaccaagtttgaaataatcgtgttttgcaaccatttttcccgatgtaagttccaacgagccccggcagcccaaaaaggtgccattcccgtgttcgccccaaattgcgaggaaagatccccacgaatactaaagtctaccgagaaacgcatatcatacatataactaacttgcccgataattccgactgttcgagaagtcgattctgttccacttacccggtcttccatctcgtaagcaaataaaaagtcatccatattatcattcgggaatcccattgccgacaagtttacactgttacttttagactcatccacgttccaacgtccaaacaaacttaataaatgcttatccttcgtgtagttataatttacagaagcattcacgctccatgaaacattatctcccgtacttttattatacgaaccttttctggtcaaatcctgctctgccaaaaaatccgtatgattcatggatttaaaaacctccattctggaagtacctttcgtgatagaagctcccgccgacacccggagattatccaagatagcacactcgatattaaaattatccacgacactaaaattctccgtgaaatctttatatttccacaacaaattatataacggattcacgatattcacggttcctcctccttctcccggtaatttcttttggtccaaaagactcgtgtaacgtccattttcatctgttttccggtaatacgggttcaatttcgtgtattgactaaaagaaccataaggagaattatcccctcttacattcgtcaggcttaattgattttggatattccattttttccgacgatattgaagagacaggttcaaccccatactgttacgcccggattctttcatcactcccggttctcttgaatagtttattcccaagttatatcttaacgcctcatctccaccttccattgtcaacgtatggcggtgagtgacggccgtccgcaagggctctgacaaccagtacgtgtcaacccctcttaaaatttcttctttatacttgttgtaataattcaactggctcgtcgtactgaatacaccggccatccgttcgtattccaacttctcttccgcatccatcaaattataatccgacaaatcaggcacagaaatacccatattcatactatacgaaatattcaacgctcccggaagaggttttttcgtttccacgacaaggaccccattagaggctttcgaaccgtagattgccgttgcagcagcatcctttaaaatagtaatggattccacacgttccggatccaaatcaacaatccgctgcaaagtagtctcaaatccatccaacacgaaaagcggcatattcgggcgttgagaataatcccccatcatcatctccatgctattagcatccaccccgccatttcctagctgcacatccccccgcaagcggaattccggcatggcattcggattcgaaccggcattattattttccacgatacgaaaactcgggtcaaaaacctgcaaagccttcaacaagttattcggacttatcttttttaattcacttcctttcacggacacataaccacccgaaaagctttccaccttacgaggtgccatacccgtcaccaccacatcttcaatctccgtggtcttctccgtcaacttgatctccaaattttccatatttccccctgtcacgttaaccgtttcttcttcgtagccgacgaacgaaaccaacaaggcagatgttccttgaggaacctctataaaaaacttcccgtcaaaatccgtcaccactcccatccctttattctctttcaaaataatactcgctccgggaagaggttcctttgtggaagcatcaataacaattccactaattttataaatagtcactccctgtgtcggtttttggtactttaaaaccacgacacgattcacctgatactccacggacaccggctgatcccccaaagcaagcatcagcacgtaatccaactcacgatcctttacattaaaagatactttcttattgacatctacttgtgaatgattataaaagaagcgtactttagccactgaggctagagtatcaagcacgtcattcaatttcatatctttcacatttagtgttactctcgtttttttataatcttgttcctgtccaaaaacagacgatacaggtagcaaagcatataaaaaaacacaacaaatcgatttaataattaaatctcgacatagacacttctttttttgcataattttgtattgcttttaatttagagaaattaaattaaaattcagagtggggaaaatgtactgcaatacatttccccttttaatttactgcatcacttgattcaaaattttcttgtattccttattcttattatactttttcaaataatcttttaccaatttttcgatcacatcaaaatcttcaccagcagcaccagagttatacaaaaacacgaataacgccgtatctctcaaactcccgtcatagaaagcaacaaaatccttgtattgctcctcaagcgaagtaagcggttcatattccttacccgcatcacgcgcttctttagcacgcacgtaatctttataaggagccaacatacattggtacgctctacttcttaacgatgcctcgtcatcccgaagtttataaccatctagtgctgtccaataatccgcagtcatacaatcttctaacttcttcttgtgaaaagaagcgctcgcataaggataagtcattaaattcgttaaaagagttccctctattccagatatcaccatattataaacccggggatctatctggtctttaacctgccctaacatctccacttcatctttccactctttcaacgttgcttcatgaaacttcttggcatccaccaatgtaaccaacattgccggaatatttgttttataattacgttgcctttgcaatatttctttttcatgcaacttcgaatttacagctaccgccgcaggtgttccggaaaactcaaccttgtcatagttcctcccgttataagtcacctttacatgaatagaatcccccggttgaagataaacctcgataaacgtattcaaaatcatcgtggtaatatcatccaattccaccataaactctatcaattgaccgtctttatacgggaactccatattaatcccctctttctctataaaatcaaaatgaactttatcccgctgataaccgaaaatttcagccgtgatcacagtcggacgttccttagcttttaccgtaaaagaaaataaattacacaaacaaataattagtactatatacttcataccatttccattatttctttaaaacttcctttatttttttaatcagttcctcaccccgaagatcaagagcgataaccttaccatccggatccaccaaaaccgtgtaaggaactgctgatacattacacaatttcacgggagcggttgcccaagacttcaagtcactcacttgaatccatttcatcttattcttttccactgcattcaaccatgcatcccgcttctgatccaaagaaacacccacgatttcgaaattcttccctttacactctttgtacagtttcaccacgttaggcatttcccgcatacacgggccacaccaagacgcccaaaaatctaccaacacgtatttccctctcaaactactcaatttaaacgatttcccatccttatctggtaattcaaaatccggcatatcactccccaccttaaactcagccaaacgaatatattcatccaattgtttcgtgtaaggatgctcgttcaaactcggggaaaccactgcacgtaattcttttaattggtcaagagtaacgttcgctttcatctcccagaaaatcataaacggggctattgcctgatcataatacctgcgaactaattcttcctgcagacacaaagacctgttattatgttgagccgtacgagctttaaaatttctttcctgatctgcctgtgattgatttctattcaacaaccgatcaatattagccgaacgcagcatactatccacaaaatgtttcatctctgcattgtaagcgctaaaaatctcgttattcgccgttcccgtgacagtacaattcacaaaaaactcagacttagctctaactttcacatctcccggctctacccaaactggagtgatcgggctcaagcaattcggatctccacttttcacaaaatacatccgtggaacagtcacattctttacaacaaatgtataacgattatccttgacatcacaactatcaatcaccttggaggcaccattaatctcctcttcttccaccaaataaaccttcgttcctttataaacaccatctagcactccttgaatcgtacaatctttcgtctcttttgaggtttcattttgcccgaaaagcccgacaaatgatattaacaaacatcctaatactaaaattcttttcatacaatttttctttacgattaaaattacttgacatataatctattactttccatccgacacgacagagatgacgtctctctcaatcgtaagacaaaagcatcaaaattctcctctttattaattacccccgtgtaaaccgcctccttgcttttttcactctcaaagacgatttccacgtcgtaccaacgctccaacactttagcgacctcttccaaagaccgccccttaaatacatattgcccttttttccaagcgatataatcattaacattcacggttcttacatccacggattcattctccttatcccagcgtaattgtcggcttggcaatagatcgtagttcttgtcgtccacgtaagccgccacgtgtccttccaccaatgtcacctccgtgtaattctcatccgcataggaattcacgttaaaggaagttcccagcacctccaccttcatcccgttaagcatcacgaaaaacggatgtttctcatcccgggccacttccaggtatatctctccctccgcgtaaaccacccgttctctcccctgaaaagcaaccggatagcgtaaagaagatttagcattcatccacacctttgttccatctgccaaagtgaacgtaaaatcgcactgtgaaggcgttgtcagagtgttatacaccatttccgttcccacggaatccgcccggtcatattgcatacgtccctcttcattcactgaaattcttaccccgttctcttcttccagcaataattcctgattatacaggaccatttctttcccgttagaaagtgtcagcaccggcaaatttctctgaatcgtaaacaccccactcttggattgtggttgttcagttatttcaacgttctctctctggctataataaaataccacagccaacacgggtacgataaaaattgccgcataacgggataactttcctatccagcgctgaccagaatgtagtttctctcttcttttaacaaatgtatcaaacgctgtctgcacgttcgcactcttatattgagcaagtttttcccgcattaccatctccgaacaaattcgctcaaacaacttcttgttatattcggatttttcccgccacgaatctaattcggtttgttcctctttcgtgatatccccagataaactcttggaaatcaacaaggatatcttgaataacatttctttatcgttcatcagtacacaatttataaaatcgcattaaacgttcgtttaaacctatttcattcccagttctataaataaaacgcacgacctcccaaaaggggggtgtctcctaaaaattttttttacacctgaaaaaatagcacttccgtgacgagtattacaaccaaaggaacccaatcaaacagagcaactctgcatctttcaactgggcggtcaattttttcttcccgttacttttatgatccttcacggtatccacggaaatatgcaaacgttcggcaatttccgacgctttcaacccatctagggtcattatcattactaatttacactgaggcggcagggtctcgatagctgccatcaaccgggcataaacatcctcttccagcaccttatcccaaaaatgttcctcttcattcagcgaagacacaacatcttggtaatatttatcccggactttctgttttctggaatgactaatacatttatttttcagagaactgtataaaaaatacttgatgtcattctccgtcttgaacttgtagtcactttccaacaaagaaataaacacatcctgcaccagatcttccgccacgtcattatccttcacgtaatgattcgccaacgctttcaacgctacataataacattgatataaatattgataagcccggttatccttacgtgccaataaatccaacaaaacatcttgctccaacatacctttctccctggaaaataagaaaaggaaagcgtttcaaacctcaacaatgaaacgctttccaatataatttaaaagaatttatttctcgtctgcgtatgactcaagcggatcgcaggtacacatcaggttacgatcaccataaccatcatccacacgccctacttgcggccagaacttgttctctgccacccaagccagcggataagctgccttgctacgcgggtaagcgtgactccactcgtcagccgtcaacactttatgcgtgtgaggtgcattcttcaaaacgttgtccgtcttgtcggctttaccttcacccacctcgatcatttcctcgcgaatagtcttcaacgcctcgatgaaacgatccaactcttctttcggctcgctctccgtcggctcaaccatcaaagtcccgtgaacagggaatgacaaggtaggagcgtggaaaccgaagtccatcaaacgtttggcaatatccaactcagaaattccgtattctttattgaacatattgcaatcccagatcatctcgtgacctacacgacctttcgatcccttgaacaaaatcttgaatcccaatttctcgaaagatgaagccagatagttcgcattcaagatagccatcttcgtcaccatagccaaaccttcaccacccaacattaacaagtaaccgtaagttacaggtaacattccaacagaaccgtaaggagcggcagccacggcgtgaataccttcctcgcctccggtcttcaccatcgtgtgtgacggtaagaatttcaccaaatgagacgccacgcagatcgggccgacacctggaccaccaccaccgtgaggcatagcaaatgtcttgtgcaaattcaagtgacaagcgtcagcaccaatctctcccgggctagtcaaaccacactgcccgttcatgttagcaccatccatgaatacctgtccaccgttctcgtgaacgatcttgcacaattccttgattgattcctcgaaaataccgtgagttgacgggtaggtaatcatcgcaccaatcaagttatcccggttctcgatagctttcttgcggaagtcttccacatcgatatttccttccgggtcggtagcggtaacaagaatcttgaaacctgccatagaactggaagccgggttcgttccgtgagcggaagccgggatcaggattacgttacgatgaccttctccacgagagatatgatattgacggatcaccatcaaagcggaatattctccggcagcaccggaattcggcatcaagctacatccggcaaatccggtcaccttgcacaacatttcctcggtttcccggatcatttgttgataaccctctgcttgagacatcggggcaaacgggtggattgcacccaactccggccaagtgatcggcaacatctcaacagcggcattcaatttcatcgtacaagatcccaaagaaatcatggaagtagccaaagaaatatctcttctctccaagttcttcatgtaacgcatcattccagtctcagaatggtagatgttaaacacggattgttgcaggatttcatcgtcacgcaacatcaccggatcaagcaccgtacggtcatcaaggaattgcacgtgtgcagccgtctttccggcagctttagcgaaaataccgatcaacgtgttaatttccttctcgttaatcttctcgtccgttgacaaccccacgaccttaccgcaaccacagttacagtagaacaagttgatttcctgctccaaagcagcatcacgcacggcagcctgagaaacaccctccggcaactcgaaacgcaatgtatcgaagaatttatttactttcagtttataacccaatttttggatttcctctgccaatatcacggcagcggaatgaatgtgacgggcaattctctccaatccttcacgaccgtgataagcagcatagaatccggccatcgtggcattcaaagccttggcagtacagatattggaagaagctttttcccgtttgatatgttgttcacgggtttgcaaagccaaacgcaatgcatgatttccctgtgcatcaatcgtcacaccgataatacgtcccacgatgttacgtttatattcctctctcgtcgccatgtaagcagcgtgaggtccaccgtaagacatcgggataccgaaacgttgggttgttccgacaaccacgtcagcaccccattctcccggaggggtcaacaacacgagactcatcatgtcagccacaaccgacaacaacgccccattagcgtgtacccgatcggcgaatgctttataatcacgtacctcaccgttagcagccgggtactggataatagcaccgaacacatccggggtaaactcgaacgtatcataatcaccgtacaccaactcgattccttgcggggcagaacgggtgattaacacgtctttcgtttgcgggaatatctgattatcaacaaacaatttattcgctcccgcttttttcatctctttaccacgcaaaccgtacatcatcgtcatcgattctgcagcagccgtggcctcgtcaagtagcgaacagttagaaatttccatcccggtaagttccaccaccatcgtctggaaattcaataaagcctccaaacgaccttgtgaaacttctgcctgatagggagtgtatgacgtgtaccaagccgggttctccaaaatattccgttgaatcacagcaggggtaatcgtgtcataatacccttgaccgataaaagttctgtataatttattttttgaagctaccgccttcatccgggagataaactcgaactcggtaagaggagccggcaaatccaacggttttttcaaacggatggactccggtacggtttgttcgatcaactcatcaagtgaactaacaccaaccactttgagcatattttcaatatcctctggacgcggccctatgtgtctccacaaaaatttctctgttgccatgtaatttattctaattattaatgatttatattcaattacaccgtttcgtcaacgattgtgtaaaaatagacataattctcgtccttgcaaaaaaaacagcacaggaataatcactcaatcataaccgaatattttcctacaaacacaagtattttcaaatacgattgaaaattttaccgagatattaccatgaatatatcctttattcaaagaagatatagcaaagtgaaaaacgggtgaaatcccgttgaaataacattcaagtaaatattctttcccggaacgttcccggtacaccttcgctgcacagacgcccgggagcgaaggagcaccgaaggtgttccgaagatgaaacgaaaatgttccctgtcttcatcgaaaatacaacgggatttcaccgtgttatattacaagagaccacttgattttcatccgaattcccattctccccaaccgagaagaaataaaagaacggagaatcgaaattcaattctccgttccagcggggtggaagatcggtctcgaaccgacgaccttcggaaccacaatccgacgctctaaccgactgagctacatccaccattttgcttttgcgctgcaaagatagaataactttctttttccgcaaagaaaagtccaaaaaaattagcgtccgaacttgatttttcccgtctcaatctcccgtgcagcgtaacataactgctcgtaccattcctccccgtatttgcgaatgagagcatctttcaaaaacacgtacaccggaattccctcttgctcaccctttaagcgggcgcaagcacaaatcgtccactggtcataattcatcgcctcgtaattctggtactgtttcacccgaatcgggtacatatggcaagatatcggttttcggaaagaactctcaccccggctccacgctttttcaatggcacaccacgaacacccgttctcctcgataatatacgcacactcccgtcccccgattagcggcgtaaccatgtcaccctcgatgtcgaccacggaaaagccctgttcttccacggcagcaatcccctcaggtttcatgtgaggtttaatcttcccgtaattctcccggatctgttccgcctccccttcttccaaaggtgcccccgaatccccctccacgcagcaaattcccttgcaaactgctaaatcacaacaaaacttcttctcgaaaatatccagacttataatcgtatctcctatctgtatcatgttttaattgaaaattgatgaaaatgattccgcaaagttacaataaaaaagatagaatcgttgatctctcgccaccattacaagcgatagggaacgacgaaagtgatctgttttcggagtaataccccggggataatagggtatctcagtatactcgcaccggtgtctcgttaattagtcaaccggaaatcaacgaagaggattaattatccttcatcttggtttgatccatgcatgagaatttaacgagagtacccttcaatctactcgaaatacactcgtaatctcttaccgggatatatcctggagaatcaaaagatgtggtgacgttgggctagatcgtcaatatcccccatgacttcctcaattaactgcctcatctcttccgactttttatgaatcaaattatccatcgtgttaattaaccgtattttatcaatcacttttcccaaactcactcgcaattccctcgtttgcccgacttgcccggcttgttccagtttccggtaacattcttctaattgacgctgatagattttcatttcctctacaccattatttataacacctatgcaaataaagcccagaatttacaggtaaactacaatcaagccttgtaaataactcccgaaatggtgtaatttacaacccataataaacaattatttcgtatatttgcccgtacaactgaatataaacaactatgagtacagagacgatacctatgagcaaaacacaccacggacacagtataaaacgcgtacgcgatatgctagggattaaacaagaaaccctcgcggccgaattaaacatgacacaacaagcattttcaaaattagagcaaaaagaacaaattgaagacgaaatgcttgataagattgcgaaaatattgcacgtttccacggaggccctgaaaacgatgagtgaagaggctactattaattatatcaacacgtttacagataatgaaaacggacattttttcactcaaaattgtcaatacacgtttaatcctatagacaaaattgtagaactctacgaacggctagtcaaagccgaacaagaaaaagtcgctctactggaagaacagttgaagaacaagtaacaacaagatattttcaaaaaagtcttgcaagcataggtaaattcatgttccgcttgcaagacttttctttttctcacagtcaaccgcaaaaatctcaaatacacgagaaactacaatatcattatcgggatgttgaccttatcaaacaaagaacgctggccatttacttgaccagcgttccatttttatatcaaactaataacgattttcccgtcatttccttgggctgtggaagtcccataatcgcgagaaccgtgggggcgacatcggccagaaccccgtcccgcaagtgatcacacttggaatcggtaacccaaatacaaggcaccgggttcagcgagtgagccgtgttcggcgtcccgtcctcgttcaccgcgttatcggcattcccgtggtcggcaataatcaacacgtcgtaaccgttagcacgtgcggcagccacggtcttacccacgcactcatccacggtagccacggctttctggatagcctcgtacaccccggtatgtcccaccatatccccgttcgcgtaattcaagcaaatgaaatcaacactcttttcattcaactgttccacgatcttctcggtcacgataggggcagacatttcaggttgcaaatcgtaggtagccactttcggagaaggtaccaaaatacggctctctccctcgaaaggctcttctcgtcccccgttcagaaagaatgtcacgtgagcatatttctccgtctcggcaatacgcagctgcttcaacccctgcttggaaatatattccccgatcgtattctccacgttctctttatcaaacaggatatgtaaacccttgaatttcgcatcgtaaggagtcatcgtacaataatacaacggcatggtcttcatcccgaaatccggcttgtcttcctgtgtcagcacgatggtcaactccttggcacggtcgttacggaaattaaagaatatcaccatatcacccggttgtatcgttcccacgggctttccggcctcgtccacgcaaacaatcggtttgatgaactcgtccgttacccccgcgtcataagaagcctgcactcctgcctcggcgtccgttaccggggtacccacaccatccaccaacaagtcataagcctccttgatacgctcccagcgggaatcccggtccatggcataataacgcccgatcacggaagctatcttacccgtggattgtttcatgtggtcctgcaactcctcgataaatccctttccactcttcgggtccgtgtcccgaccgtccataaagcaatgaacaaaggtcttctcgatcccgaactccttcgacaaatcgcacaaggcaaacacgtgatccaacgaactatgtactcccccgttagaaaccagtcccatgaaatgcacctgtttcccgttctctttagcataattaaacgccttcacgatctccgggttttgggcaatggaatgatcccgacaagcccggttaatcttcaccaaatcctggtaaaccacccgtccggctccaatattcaaatgcccgacttcggaattccccatctgaccgtcgggcaacccgacattctccccgctcgtgtacaacaaagcacggggattattacttgccaattccgtgatgttaggagtcggagtactcccgatcgcatccgaatgatcgtgttttccaacaccccaaccgtccagtatcatcaataaaactctcttcatatctattttattttttgttattcacttttctaaattcacagcaaagttaatctttaatatccagtttaacgccttacaatcaaggaaaatcaacgaaaacgttttaaagctccccggtcgtttatccagactaaaagaataaaatattaaaattaatagtactatgtattgcataatactattttttattcatatctttgccttgcattacaaaagaaccaagagatgaatattgaaaacacacaagctcaaatgaggaagggaatcttggaatactgcattttactgatcatctcgcaacaggacgcctacgtgccggatatcatcagtaaactgaaagcttccaagatgatcgtggtcgaagggacgatatatcccttgttgacccgactgaagaataccggtctactgtcataccgctgggaagagtcgcaacaaggtcctccccgcaagtattacagtatcacggaacaagggcgaggttttctcaaggaactcgaaaactcctgggatgaattgacctctgccgtgaacagcattaaagaaaaccataacaactaacaccacacatcatgaaaaaaacatatactataaatttaagcggcaagattttccatatcgatgaagacgcactggaaaaactacaagaatacatcaataccctcaaaacatattacacgcgagaagaggacggcaacgagatcatggatgacatcgagaaccggatcggggagcttttcacggaaaacttgaaaggacagttccgcgaggttatcactctcgaagacgtggatcaggtgatcgccacgatgggtacgcctgacgacatcatcgacgaagacgagcagccccggaaatccgccccgaaacaggccaaaaaactatatcggaacccagacaacaaagtacttggtggagtggccgggggactagcagcgtattggggaatatcccccttgctcatccggataggtttcgtacttctgtccttctactatggaatattcattatcgtgtatatcattttgtggattgccgtccccaaggccaagacgaccaaacagaaactcgaaatgaaaggagaaaatataaatgtctccaacatcgaacgctccataaaagacgagtaccaagaaattaaaaacggcaagggtgccgctttcatgaaccgggtaggcgaaggcttatacgaagtattcaccattatcgggaaagtgttggccattattatcggcgtggccctcttcgtcgggggaatcttcatgctgttcgctttcctgtcagcattatttttacctaacctttatccttggaaaagtggttttatggaactcgcctacgcattcactcctttaaacttcactttgggtaaaattgctatatcattcttgattggaattcctattatcatgatcatttatatggcgatcaccttgttgttctccttcaagagcaacaacaaggtgatcgccctttctgccctctcgtgctggatgctgggactcgtcatgctcattttcgtggggatcagtgaaggtcgaagctggtcgattgatggcacccgctatggagaatcgctcgaactgagtcaacaggacacgctcgttctacttgtaaatgaacgctacaagatacctgaaaatctttacatcgaccacaacgtgttccaattagcctccaacaacatgattgccccggacatcaggatatattcggccgagggatcgaccccgacattacgtgtacaattttacacccaagaagaaaaaccggtatatgataacatggattttaactggaattacaaaaacgacacgcttcgatttgacaattatatcaaactcgcgggacaatggagggctcaaagagtgacgctgactctatacctacccgagaataaaaaagtactccttccatcccaaacaagccaatacttgagaaacttgagagattttgacaggggtgtacgttccagactaaataaagacaagatattattaatcatgcaagacgggaaactccaacccctcatgtaaactgaaacggcaggccttcatccctttggcctgccgtttctctcttttatttctttgaatcaatctcctttaataattccttcaccgcagtctccaactgctcgtcctcccctttgataatcttctccggagagttggcaatcttcacgtccggttccagttgtttgttctccagatagctaccgtccggtaaacggtaacccacgatcggaatcccgaaatacaacgtcgggtcctgcaaagtctcccaagacacgctcgtcatggttcccggcacaggcattccgacaactttaccgattccctgatgttggtaaacccaaggcgtaccgtgggcattcgagtagttcgcctcacaggtcaccatgatcgaaggcttattccacctacggcttggcatatcgcaagcctcccgtccccgaacgacttgcgtgaaatatttcttaccactgaacaggatctcaatatcctcgtgcaaacggccaccaccattgaaacgagtgtcgataacaattccttcccgatcattatatttacccagaatatcggcatacacggaacggaaactcggatcgtccatactggaaatatgcacgtaacccaaacgtcctcccgacaaacgatccacatcggcagctctttgttttacccatcgccggtaaagtaactcgttcatcgtaccctttgaaatcggctcaatcacctcatcccaacgttccttggtagaggggtcataaatagaggacaacacacgtttaccagacttgcctctcagcagaggatagtaatcttccccagctttcaccgcttgcccgtcaattttctcgattaccattccggctttcaacttcgaacggacattatcaaaaggtcctttctccaacacctcgtcaactagcaacccatcctttgaataattcacgttcaacaagagtcccagctcggcagtcgcctcacctcttgacccggggcggtaacccgatccggtgtgtgacacgttcaattcacccaacaattcgctcaacaactcggagaaatcatagttattattaatataaggtaaaaacttctcgtaagccttggtcatttttgcccaatccactccatgcatattcttctcgtagaaacgtttggcctcctgacgacgcaccctgtcaaacatatatgcccgctcggcagcctgatctagtttcatttcagcggaatacgtgatcggacttcttctctccgaacccaaactgatcttctgcatggaacgtcctcccaacaggaacaaatctttcccatccttatccatctccaaagacgcccaaccgctgttcaacttatgcatcaccttggtactccgtgaacgcagatcgctcacccacaaatccatacctccctcgaaagatgccatataataaagcttatcaccactcttacttaatatcgcatctcccaattgtgaagaattcggcgttaaccgcatcacccgatcctcaatacctttcaactcgacctcgatattctttttctctttcacggcgagtttcgtctcgccctttttatctttctgatcctctttctgttctttattcttcaaagaggcaatacgtttctcctcctctttcagcaactcgtaatcttccttgttcaaccggaatttatcgtaagcatcctgattcatgaacacgatcattacatcctgcaaagaaccccacgaagcatggttacgcatcccgtaacgttcactggaaaacaagatggcatttccatccaacacccaccggggattactatcaaaataaccgctattggtcaggtttacaacttcccctttcccatcggcactcacgatggcaatatcactatacggatcatgacgattcccgataatttccatcgcgaaccatttcccgtcgggagaccatgtatacgtgaaaccatcacccgtacggtattgatatttatcgtctgccacctgccgtaccttcttcgtcttcaaatcaacaaccatcaatttcgtacggtcctcgataaaggccaattccttcccatccggagagaattgtggggcaaaccgctctttggttgaaaccggaagaacggcctcctcttcgattaaagttgcattcgggaaattcacctcttcctcacgggcaatctttgccgtgtagatattccaatttcctccccgttcgctggcgtaagcaatcgtccggttatcaggagcaaaactcaaccacttctcaccttccggggtcgtggtaatttgtttggtcgtcgtgtaatcggtggaagtcacgaatacatctccccggataatcatggccacctgtttcccgtccggcgaaacagtcgcactagttgccccggaagtaaaacgcaacgaggcaatattatctttcgcattgtcaccaataatatccactttcactttcttgggacttccggatgcctctttcacgtatatttcaccgtcataaccaaaacacaaacgcccattacccgcaatactcaagaaacgcaccgggtgagtcttgaaagaggtctctgccttcacagcagaaggatcggccaccgggaacgagtacacgttaaatgccccctcccgctcacttaggaaatataccttttgttcatccggagacaacacgggagaacgatcttcccctgcccggtcaatcagacgggtatgtttcccgcttttcatatcatagcgataaatatcacgtgtgatagacgaggtatgatgtttacgccattcattctccccgccttttttatcctggtacaagaatgcatcacccgatttgaagaaacaaatctcttctgccggggttgccaatatctgccggggacgtcccccatccaccgatatggcatacaattcggtcatggaacctgccggaaataaagcactctgtgcgggatcactcatttgcgccccgtaaataatttcttttccatccggggtaaacgtgtagggtatctcccttgctgaattcgtcgtcacttgccgggcatcacctccccgggccgacatcacgaaaatatcgaaattaccattccgatcactcgtgaacgcaatctgtttcccatccggagaccacacgggatacgattcatacgccggatgtgtggtcaactggcgagcctcgccaccttctgcggggacaacataaatatcccccttataactaaatgcaatttgctttccatcgggtgaaattttcggataacgcatccaaagaggtcccgcctgaacgaaaaaagcaacaagtaaaaaagtaatagtcaatacgattttattcatccttcatttattttggtatttaacttagcgcaaatatacaatccgggattccggcatccagataaaacgggtaaaatcacccccttgaataagggcaaggccattcccacacgctccattttcccggtataattgaagaattttctcacaaatcggatcaccgggaacccacttgatacactgtcgaacacaatcatcaacaatcattcctccatagaattcgagacaaggaatttcccggatctcgcctccggtattcaccacgtccatcaccttcccgtccttcaaaacaacatatccattcttcacgaattcaaatccgggtaacaaaatataattagccgcaatctttctcattcagaatatgatcttatttcttttttgcagatttcctctcaagctccatctgtctcctctgctcgtattcctttttcaattgtttctcccggttcggggccacatacgttttaaagatttcggttttgtacacgtagccttcccggtcattcaacttctttactttcaccctcgtatcccggtcactcttgggaatcttcatgaataactttgtgtagctggaatccgccacgtagaactcccagtctttcttgtaagggcgcaacgtgtcaactcccacgtactgatccggaactttcagcgtatcattatcggcagacaagaaataagtctgtatgaaattccgttttccccggtcagatttttccaactttatcgtcgaggtaaacttatacataccgggaacaatgctatccaatttcaccagcacaaattgattccgcttatcgaaataaaccgtatcggctttcaccacacgtgtttcgtacacaatagaatctttcttccggactttagcttgcgtagaatccgggcgtatagtatctgccacgatcatcgtgtatcccgggaacagattaaccgtatcattcacggtcaattctttccactctcgcatgattttcgtctggcgacgactcaaggtatcaatcaccacgtcataaattttattgaataacgctgattgtaaggaatagtaagttacgcaagaatcaaaatcctcccgtgtaatcccgtatttctcaaacagatcgttataatataaataattgtccttttcggttcgtatatcaccccgtgcgaccgacaacataccatcagtcgtgtgcatatcaatcaataaagacgtaaattgatccttgtccaacgggaccttcttcgaacaagccgttatcgccgcaataatcaatatcacccataaaatacgcttcatatcgctaaaacttttagtatttattcctcgctctttttttctagtttctcccgcaccatcctattcaacttcgacgagaacagaaattcgttcaatgccttgttgttcgtgtacatgatctcttcgttactgccttcccattctttgtgtccttcatggataaacaacaccttttccccgatctcgaaaaccgagttcatatcgtgcgtgtttataaccgtggtcatatcatattcatgtgtcaactcggacaacagattatcaatcacgatcgaggtcaaaggatccaaaccggaattcggctcgtcacaaaacaagtatttaggctgcaagacaatagcccgggcaatagccactcgctttttcattcctccactgatctccgcaggataaagattctccacgttattcaggttcacccgattgagacagaaaatagcccgctccgttttctccttttccgtcatcgaggaaaacagatttaacgggaacttcacgttctccaacacggaaagcgaatcaaacaatgccccgccttgaaaaaccactcccagttccttccgaatatcctttatctgtttgttattcatcacggtaatatctcgatcattatagaatatctttcctttatcaatcgagtgcaagccaatcaacgactttaataacacggtcttcccggaaccactcttcccgataatcaaatttacctttcccggttcgaaaacggcatcaatatccgtcaacacctcttttttatcaaatgacttacataccccttccgcccgtatcattacaataatattttggttaatatcaagtttacaagcaggatggcaatactactatccaccacagctttcgtactcgccttaccgacttccagcgcccctccctgcacgttatacccgtagaaggcaggaatagaagtaaatatcacggcaaaaaacaaagttttgacaatagaataggtcacgtagtaaggattgaatgcaaaatgcaacccgtgtatataatcatcatagttcaccacaccagatgccaaccccgacaggatccctccgataataccgataaacacgctgaatatataaagcaccggatttaccaccaaggccgctgcaatcttcggccccaccaaatatgaaacggaattcactcccatcacctccagcgcctcgatctgttccgtgattttcatactaccgatctcggatgcgatattactaccaatcttcccggccaaaatcaagctcacgatcgtcgacgagaactctagcaataacgtctcccgggtcaaataaccgatcagatagcgaggtagcagaggacttgacatattgtaagccgtttgcagcgtcaacaccgccccgataaagaaagaaataatcatcaccaacatcacggaattcaaccccaacttctccaactcgttagtcaattcttttaaataaactttcttcttctcaggtttcgtgaagatacgccccataaacaatatgtaagctcctatcttatctaatactttcatctatattaactccttaaataataccttcctgtaaaccctgtctcaaattttatcgtaaaaatagaaattattcacggatttattactaatttcgacaacaataagatgaatttaattttaaatgtataactaaataagatgaataaaaactcatattgcgttataatggccggcggtctcggaaaacgtttctggcccgtgagtacgagagcctgtccgaaacaattttgtgacatcttaaatgtcgggaaaagtttcctccgtcaaacctttgaaagagcaaatcaaatttttgatacccaaaatatattcattgttacaggtaccgcctacgaagagctgacgaaacagcaaatcccggaaattccttccgagaatattctgaaagaacctttcggcaagaacaccgccccatgcgtggcttatgcggcctaccggattgcccgggttaacccgcacgcaagcatggttgttgtcccttccgaccattttatcacgaatgacgcagtctaccttgacaacattcagaaagggatttctttcgttgaacagttcggcggattacttaccatcggtatcaatccaacccgcccggaaacaggatacgggtatatccagatcaagaaaaacaagttctccgaattcatatccaaggttaaaacgttcaccgaaaaaccggacaaggaactggcaaaagtttttttggaatcgggtgatttcctttggaatgccgggatatttatctggaaagtagaagatattatcgaagagttcaaaacatacctcgaagatatgtatttattattcgagcaggaatataaaaatgtggagaacccggattctcccgaaaatatcgctcacatctacggacaatgccgtaatatttccatcgacttcggtatcatggagaaatccgcaaaagtctatgtcatgaaaggtgagttcggttggtccgatgtcggcacgtggcactcgttccatgaaatcagcccgaaagacgagaataacaatgtatccaacagcgaacaagtccgcttaatcgaaacaaaagaatgtattattaacgttccccaagacaagaaagtcattattgaagggatcgagaattgtatcatcgcggaaaataatgacattctaatgatctgccaccgggatcacgaggataacatccggcatttcgacgatatgctaaaacatacaacaaaggagcttaattaaagctccttttctttttatatctttacccgaacctcctcaatccgggcactcttgacacttacgatttcaaaagatatatcctcaatagagatgcgttctccctcttccgggatatcctcattgtaataaagaatcaacccggccaaagtctcgtactcctcattctccggaagattcaaatcatatttttcattcagataatccacttcaagacggccggagaaaatatattcatcgggagcgacctgttcttctttcagattcaaacggtcatgctcatcctcgatctccccgaaaatctcctccataatatcttcaatcgtaaccatcccggccgttacgccaaattcatcaaccacgaccgccacgcttttctgttccttcgtgaaaagattcaacaacctcaaggccgacatggtctcgggaacaatcaatattttgctcaccgccttcttcactgtttcgggatgatgaaacaaggcagatgaatgtacataaccgatcacgttatcaatcgaatcccgataaatcaatatccgagacaaccccgtttttacaaatagttccctcaactcatccagactgccatctatcgacaaggccacaatatccggacggggaacaatacattccctcaatttcacttccgaaaaatccaacgcattccggaacaatttaatatcgtgttcgtcctcattttcttctcccccggtctcaccctcttctatcaaattatttaaatctatcttgccaaaagcccgattttcctctttatgcgtcagtttgcgtccggtaaatatcctcagcaacaatcctccgaaccacacggagaaatacgagatcgggaaaaacaggatataaaacaaaaataccggaatagcgaatacccgcaaaaacacattcggcctcaaacggaacacggctttcgggaaaaactctcccgtcaccagcatgatcaacgtcgagatcaacgtcacgagaatcatgcgcaatcccagcgaaattccgacaccctccaacctaggatcaagataatcggacataaagataccataaataaccatcaccacgttattccctaccagaatcgtggtgatatacattcccgaattggaaacaaaaagatcgattaacttctgcgtgatacccttgttcgatttatcaatctcgatccggagtttattggaagccataaaggcaatttccattcccgaaaagaatgcagataaaaccagacagatcaatatggcaacaaatcctgacatttaaggtttattttcaatttctaccactcccgtgatcttgttaaagaccggatttttcaaggactgatccgacttgaaacctttattcccctctataatctggtccccggaagtaagccgggaataacgatcggaataaacaatctcttttttcatatcccagtacatcaagtcggtttccaacttcttcccttcggcattaatcacaactacctcgttacgcaattcccacagcatctcctcttccaacttcttcgcgtactttgatgtgatagaaccgaccatactaccgtccttctcgtacaattccgcatgtattcctttcgggaattcatcatacttcttgtcgtcctgattatatttattataaagaggggttattactttatatttcaacaacgcggaatcggaataaaataactccatattctccccggacatttcaggcataccgttccggttcccgatcgcatccacatccttcatattcgttttacacgaaaagagcattaccgtccctaaaacaaggacggtaatgcttttaatttttaatgctcgatatagaaaaatcatgtatttaatctctaaatctagcagtcgttgtctcgtttatccatccaccgactttcacgctttttcctgccgtaatatcacggaagaaagcctcgtccttcgtcgggaagtgaggggaataccgttcaatatattcgttagcctttgccgctactgacggatcaacttgtttagctttcacaaatttatccacggcagcccagaatacggtacgtttatcaaactcatctccttcataatcattactacttaccgcataagccaaaccgatcgtgatgtaagcatcacccatgttcgggttcgtcttcaaagcatctaaagcatatttttttgctgacggataatttttctttgacaaatacacctgtgccagcttgtaattataatctgctttagctttcggatcatctgatttattgatagcttccttcaaatattgctcgaatttcgcaatatcttgttttgagaagaacatcatggccaaactgtaagcggcatcggcactcggttcctgttgataaatcttctcggcgactgtagcgtacaacggtaaatcggtacattcacgtcttctcaaaatagaagaaatttctttcaaaacaggcagactatctttattcgcctcgtatttctgattcaacaaaccggccaatgtattacaatcagcatacccggactcgaagaaaatggcatccaatgcagatttacatacggcaaaattatcacatcctttttcacccgatgccaaacgtttgtccgcaaaatcagagaatttcatgtacaaattaatgaattcttcctgagataactgatttttttgtaccaacccacaaccgacttcaaaagtggcatggatcaactggggcggagttccttctccttccaattcatacgacttcatcaagttatcaaacccggctttcaacatattaatatccccattggaatatttcacttgagccataccttttttcccaagaacatatccttcacgactcttttttgccatgtattgaagacgacggtcaaaaagcatcattaaagtatccacgtactctttctttttcgtcttttgaatcatgtactcaataatgtcttccccccggatataggtatttaattgaaatgcaggtgcgttcaagaaaacgtacctccaagagggcaacgcttcttcgtaatttttctgtttccagtattccgtgtacagagaagcattcagaatcgtattcgcactatccaatccatactgtgactccaacgtttgcgctttcgtcggtagaatgaatagaagcattccaaatgctataacagcaatctttttcatggtcatcccttttatttaagttagttcgaataagttttttcatcatagccagtcccacccacatgaggactatcgcaaaattaccactatttctttaaaacggaaatgtttcacatatttttcatgtataattaaccgttttttggtattctaaaattctgtttaaacccgtgatcaccaacttgtcttcaaaaaaaacggtccgtttcaagttttttttcagatattcacttccgccacccgttataattaccacggcaaagggattatttcggagcaactcatctatataccctcttacttcaaaaagtataccattcatcactccgttcaaaatcgcatcatgcgtattctttccgacatacccgtgttccatggaacacttcaccaatggaaggctcgcagtgaactcgtttagcgcccggaaacggatacccaaacccggagaaatattccctccccggaactccccatccgcactgacaaaatcatacgtgatcgccgtaccggaatcaatcaccagcaactccctacccggaaaaaggaaggccccacccacgcaaccggcaatccgatcaacgcccaatgtcttcggggtatcatatcccaatcgtatcggcaagggaatttccgatgacacttcacaaaagaaagtagaaacctcccgcaatctttcccgaacctccgccgagatggcacccgtactcgacaaaatcaagtttaccgccttcccgttttttcgataactcgtcgccagatcgtacacttccggcaatcccaatccacactccacccaatcgccttcatcaaaaacggcatacttggttcgtgtatttccaatatcaacaattagattcatagcttaattattaccataagcaaagtctcgcatctcccgcgtgatttccgatacccgattaatatcggcaatattcgtgaaaaccagactcaacttatcattcttttcgctgatcttgcaagggatcacctgtttctgtataaatttcaatagctcgctaaacacgggagaggcatagaatggcgaattctggtcactgataaaataaacaatcatcttgttattcttcaccatcaaccgctcaattcccaagcctatacatctctgacgaatccggaccacttccatcaacccgacaaccgaagcgggaatctcgccaaagcgatccttcatctctatctcgaaacgctgcaaagcctcttcgttcgcaatattatccaactcccggtacaagcggattcgttcgctcacgttctccacgtaagtatcggggattaacaaagcaaaatccgtgtcgatcacacaatccgaggcaaacacctccggttcatccggatgctccttctgcaattcgggaaactcctcgtccctcagttccaccaaagcctcattcagaatccgttgatacgtctcgtaacccacctctgcgataaaaccagattgctctccacctagaatattcccggccccacgaatatccaaatcctgcatggcaatattgaacccactccccaaaccgctgaaatcctcgattgccttcaaccgtctccgggcatccgcattcactaattccaagggtggggccagcaaataacaaaaagccttccggttggaacgccccacccgtccccgcaactggtgtaaatcactcaatccgtaattttgggcctggttaataataatagtattcgcattaggaatatccaaccccgactccacgatcgtcgtggctatcaacacgtcgtaatctccccgcacgaaatcatgcatcaccgtctccaactcctccccgctcatctgcccatgtcccacacaactcttaataccgggaatcaaacgatgaatcatatattgaatatcccggatattatccacccggttatggataaaaaacacctgtcctccacggctcacctcgtaagaaatcgcatccttaatcactttctcatcaaaacgatgcaactccgtcacaatcgggtaacgattaggcggggccgtacggataatcgacatatccctcgcccccatcaacgaaaattgcagcgtccgcgggatcggtgtcgccgtcatggtaatggtatccacattcaatttcaaacgtttcaacttctccttcaccgccaccccaaacttctgctcctcatcaatcaccagcaaaccgaggtccttaaattttatatcattgcttgtcaaacgatgcgttccgatgataatatccaccttccccgcttccaaatctttcaaaatccgcttaatatcagcactttttttcatccggctgatatactcgatccggcaaggcatcccctccaaacgtttcttgaaagtattataatgttgataagccaaaaccgtcgtcggcactaacacagccacctgcttactatcagccaccgccttgaacgccgcacgaatagcgacttccgtttttccgaatcccacgtccccacaaaccaaacggtccatcacgtgaggactttccatgtccgcttttaccgcctcgatcgccttcatctgatccggtgtttcctcgtacataaaggatgcctccatctcgtcctgcaaaaaactatctttcgagaaagcataagcctcctctcgcctgcgcttggcatacagggctattaactcccgggcaatatcctttaccctcgacttggttcgctgttttaatttattccaggcctccccgcccaacttactcacagttggcggttcaccatccttccccttgtacttggaaattttatgcaatgaatggagactcacatacaattcggaattatttttatataccaaacgtatggcctcctgaatcttcccgtcattatcaatcttcgtcaacccgccgaaacgcccgatcccgtgatcgatatgcaccacgtaatcaccgggatgcaggttctgcaactcgctaaccgtgatggactcccgccctttccgaatctgcgaagtcttcaaacggtatttctggtaacgatcgaaaatctgatgttccgtgtaaatacacaccttgatctgggcatcgctgaatccctcgtgaatcgttccctccacgggtacaaaattcacctcatgtcccttgtccgagaaaatatctcgcaaccgctgaagctgcatatcgttcgtggaacaaagataaaccgtgtagcgatccatctgcttgtctagcaaatgccctgccagcaaatcgaactgcttgttcacggccggttgcacctccgcctccaaacgaatcacctccccacggaaaaacaactccggtccccactccaccacgctgttcccatcgatcgtccggaacaaactatccgacgtgatcaggaactccccggcatccagctcttttaacgaattaatgcgatcatgaatcaacaaggaattcttcatccaccacgtggcctctttcccaagaaactcggtcaatcccacgttatcattcttatccgttgactcactcaaatcgggtacgatcaccaccttgtcaatcaactgttcggaaagctgtgtctctacatcaaaataacgaatactttccacctcatccccgaaaaagtccattcgcaccggacgctcttccgcaaaagaataaacatccactatactcccccggatagaaaactgtccgggttcatacacgaaatcattccgttcgaaaccgtactctcccaacaacgactccaaaaacgttatcgacagcttgtttcccttgatcacgggcatcgacatatcggccaacatcttcttactcaccaccttctcggccatcgcctccgtgtaagtgaccaccatccccacctcctttgccgtcaaggcattcagcacctctgtccgaaccaggattgaatcgttatctttatcttcaaaattaccggaacgccgaaacgaggaaggcagaaaacgtacattctcctcgtcataaaaagtcaacaaatcattgtaaaaataagcagcctcctccttatcgttcaacacaaaaagctgtaatcccttcatttctcgtcccacggcagccgcaataaaagccacgagcgaaccgatcccgttttccaactttatctttgccctcgtctgcttacgcaatcgattgacaatttcctgaacaacaggatgaccttgaaataaatctaataactctcttgcttccaaatctttgtccctttatcaaaaaaacggcatacctttcagcataccgtcttcaaccctcaggttctatattttaaatgataagcatggcatcgccataagtaccaaaacgatatttctccttaaccgcctgattatacgcttccataacgtgttcatacccaccgaaggccgccaccatcatcaataacgttgaataaggcaaatggaaattggaaatgaaagcatccggcacgctgaaatcatacggggggaagataaacttgttcgtccacccttcaaattcagtcaaccgtcctttcgtggtcacgcaactttctaacgtacgtaccaccgtcgtacccacagcacaaattttatgcttttcatctttcgcatcattcacgatcttcactgtttccggtgtcacgaagatttgttccgaatccatcttgtgtttcgtcaaatcctccacatccacctcccggaagttccccagaccgacgtgcaacgtgatataagcaaaatcaatccccttgatctccatccgtttcatcaactcgcggctaaaatgcatacccgcagtcggagctgccaccgcaccttcatgccgggcaaaaatagtctggtaattctcggcatcctccggttccaccttccggttaataaaacgaggaagtggggtctcgcccaatgcgtacaattccttcttgaactcgtcatattcaccatcgaacaagaaacgtaaagttctcccgcgagaagtggtattatcaatgacctccgccaccatactatcatcttccccgaaatacaacttattcccgatacgtattttccgagccggatcaaccagcacatcccagatacgcaattccgggttcagctctctcagcaagaacacctcgatctctgccccagttttttccttgtttccatataatctcgccggaaacaccttggaatcgttaaaaacgaacacatccttctcgtcaaaataatcaatcacatctttaaataccttgtgttcaatctttccggttttccgatccagaaccatcaaccgggcctcatcccggttaggcgtcggatgtaacgcaatcaactccggcggcaacttatatttaaacttagataatttcatgttgaataatgtttatatattaatcaaatcttgctaaattacaaattttcctgtaaaactccaataatttcatccattttaaacccatcttccacccggaagtccccgacacgggttcttcttagagctgacaaatgcgaaccactcccgcagacttttcccaaatcatgagccagcgaacggatgtacgttcccttgctacacacgatccgaagttccactattggaaattccgctttcaatatttcaatctcccggaccatcaccttccggctcttcatctccacctcgtccccccggcgtgccatctcgtacgcccggaccccgtcaacacgaacagccgaataagaaggcgggaactgttcaatctccccgataaactgctggaccgcccgctccaaacaagctctgtccacttgctcatacgaaaactccccgtcaaaagatgtctccaaatcataagaaggagtcgtatgcccgaaagtaatctccgccacgtactctttctcctgtcccatatactcctcgatcttctttgtctccttccccacgcatataatcaccactcccgacgccaaagggtccaacgtccccgcatgccccacttttatcttcccgtatccttttctcaagcaaatacgaactttgttcaccacgtcaaacgatgtccaatgcaatggcttatcgaccacgaacaccgctcctgcccgaaaatcctctccttctctaaaaaaaatattaccccacttgctcattatcccaaaacaatcgtcaatattcccacaatagcgcaataaagagcaaaccaaatcaacttaccctttttcacgatattaatcatccaacgacaagctatacatcccgagacaaaagccgccatgaatcccactaacagcgacattgttgagataccacttgcttccgccgaaaatcctcctttcatcaaatccagcaaagcctcacccaaaatgggaatcaacaccatcaaaaaagagaatttggccaccgcctccttcttgtttcccaacaatataccggttgcaatagtcgaaccggaacgggacaaaccgggcaacacggcacacgcttgcgccaatccgatcacaaacgcatcccggtacgagattttctctttcacccgggggcttgcataataagcgaatgacaacaacaccgccgttaccagcaacatacaccccacaaccgtcaatcccgaaccaaataacgtctccacgtaatccttgaaacaaaatcccacgatagccaccggtatcatggaaagaaatatcttcagcacgtagaccatttcatcattatacttgaacacgaaaaagcccttgaacaacacagaaacctctttccacaaaatcacgatcgtactacaaaccgttgccgcatgaaccgccacggcaaatgttaaattttcctctccttctaacccgaagagagcgctaaaaatctgcaaatgcccggaactactcaccggtaaaaactctgtaagtccctggatgataccaagcaccaatgcctcaaaccactccatctatgaattgaaaattgagaattgaaaattgagaatgcacgcacatcaatattcaattacattaatatttaatttttctcctcccccttcgttttgggtttccgcataataccccagaaaacgaaaccgaaaccgaataacaccacgatgggcgctaacgtgatccggcgaaaactaaaaatgtcataattaaatgtatcgggcgaatccgctccccctcccatcatcaagaggaagcccacaataacgatcccgaaaccgattaggatcatcttgtaattatccttcggtataggaaaaccgtctttcttttcgtttaaaattcttgccatatatttttatttacacgtataaatcattcaaatcccgccgcaaataacgacgtaccgagaaccaagccgagaaaaatgacaacaccaccccagacaggatcacaaaagccaccataaacagaatcacatcctgccgcataatattaatcacgttccccacgttctcctgcacgaaaaatatcgctcccagcaaaaccaagttagcgatcagtgccccgaagaaccctcgccacatactcccgtacacgaaaggcttgcatataaaaaacggcgtggcccccaccaactgcatcgttttgatcaacagccgctgcgagtaaaccgccagatgaatcatgttacgaatcaacgtgaacgaaatcaacaccaacaccgccccgacaatcaaaaagagaatcgtgatccgccgtatattctcgttaatactttcaatcatggatttctggtaatacacctcatgaataatatcaaatcttgccaatcctttctctatcatcgccagcgaatcgttattcgcatatgccgggttcaacttgatctcaatggaaggcaacaatgggtttgctcccaaaattcgctcaaaatcctctcccatctctttcttgaaagacttcgcagcctgttcctttgtcacatacttggaagtgtaaacgtaaggctgggtatccagaatcttttgcacccgcttgatctccacctcattcgtgttatccttcacgatcacggcaaaaccgatattccgtttcacatgatccgaaatcgcccgagcattcaacaaaataaatacaagcataccgaccacaatcaataccagagaaatactgattgtgggaacaaaataagcactttttccctttctactttctgtctgcgacattttttctgtcttaaaaacttgacaaatataatcattctacacccgagaacaacccatttcttaaaaaaaatcgcaaaatcacatctccactagaccccattcgccctcccgttctccaatattcacctcttttccctttagtaactgcatgaaaaacagttttcaagaaatgaattaaaaaaatcctttgcattttcttatcaaaccctttgctgaaaacaaaaaatgctctatatttgcaatcgcaaaaaaggaaagcgttcctagaaaattttgcaagcaatcatgcgaaaatagctcagttggtagagcataaccttgccaaggttagggtcgcgggttcgagtcccgtttttcgctccaagttgctcgagtggtggaatcggtagacacgcgggacttaaaatcccgtggccattgcggctgtgcgggttcaagtcccgcctcgagtacacggaatattaaggagttagtaatcactagctcctttcattttatcctaaattttctatcgcactttttaaatattttttctcgatgccctaaaaacgatatgcggcatttcgactccccggtaatatttgataagaatatcaacttcactcattccgtttcgtcgtgccacattctgggaggccacgttcgaatctcgaataatggaataaacatcatcaaaatccagaacctgaaaagcatactctttacaagcaatagctgcctctgtagcaaatcctttatgccaaaattctttccggaacaaataaccgacttccggcacccatcccccgttatattcttgatacgtgatgccacattgcccgataagctccccgctacccttctcgacaaccgcccataaagcgaaaccgtcattctcgtaccgtcgaaacatcttgtccaaccatacctgaacttcctgatcactaaaggccccctcgtaagcatacatcacttcgggatcctgtaataatttacaagcctctctaaaatcactctgctctaactttcttagaaccaatctttccgtttccagtatcatttcatccatcttcttagtccctacaaaaataattcattcaccccaaaagttgaaggactccctcaaaaataaactgtccccaaaagtaaataacacttttgaggacagtcctgttttatattctatttcaaataaaacacatattacattttttccacacgctccgtcactgattgaatatccttcggatcagcatcacttagcgagttatttttaataacttccaacacatcattcaaaagctttttagctccttgtttctccccgatctcttccaacaaatccgcacatccccaagccgtcgccggagttcgatccaactgataagcatagtttacccaagcgatacatttctttttctctcctacattctgctgatcggtaatcttccagtaatgacgggtagcactgatcacgaaagaggataatagtttatacttcacccctccaaacaggctcgccatacccatcgtcttccttatactcacgattgcggcagaatcattcttcattctagctgaatcaatcagcatctcaaaatgtcgatttgttatctcttccgtctttctcagggaatcgatgctattctcttgctgctgggcaatcatgtactcgctcatcaacgtcttgaatttatcgtctagacggttattcgaatagaaatccaaacgcaactgctctgccggaagataagatttaccgccacccatcatggcggacattccattctccagatttcccaacccggccttcacgccaagaattccttccaacgccttttcatccttctctttcacgcaagtggcaaaacaagcgctcaagctcttcatcacggatgtgttcaaacggttacccaacttcttgttttcgccctcgaccttcttgatacccttgaccaaacgatcaaaaagaaccggatcaaaaatagaaatattacctatattactcacgttctcttccaacaacaactcctcatcagagagacatttcaagtactcgttcaggacaataccaccgcctgccccggactctttcaataaagcgtaatactctcccaagaatacttttccccgttttccttgttcgtattctttctccatcgctgcaatactgggagccagcgcatacaaacgcacggctttctctccttcagcgataagtttatcggccgtacggactcccataaacttatacaccaactcgcctgctgcattcacgaaaactaacgtcgggtaagccgaaacctcgtatttacccgctagttccggtccttcacctttctccgcatcaatcttgtaattgacgaaattcttgttgaagtaatctcccacggcctgctggggaaaagtctctgcggccattttcttacaaggaccacaccacgtcgtgtacaggtctacaaagatcagtttattctcctgttttgctttctgcaaaacttctttccagctaccgatttcgaactgaatcccctgtgaaaacacgttccacgagaaaagcaaaatggctattgtaaaaaatattcttctcatcatttctgccaatcgttattcttcaaattgttctgcaactttttccatcaacagatctccccgcaatttagtagcaacaattttcccctctttgtctatcagtaacatggccggcaccccgctcacgttatacaattttgccaccggacaaccccatcccttcaaagaagaaacatggccccaattcaaatcgttcttttcaatcgcattcacccaattatcctttttattatccagtgacacgctcaatatttcaaatcctttatcatggaacttgtcataaactttctttacattaggcacttcacgcaaacaagggccacaccaagacgcccaaaaatcaagtaaaacaatttttccccgataatcggataaagaaacgttctttccatccggagtcggcaaggtgaaatccggagcaacattaccgattgatgtccttttgatattatcaatcgatgttttcaatttacgtcctaaataagcatttttgatacgaggagtcaagctctcgtacattttttcaacttccaccaaatctctactcttgataacaaatttatcaataatcaatgccgtcgcatggcaatcgggatagttcgtaaccaaactatcaatcgtttgcgccgttctcgcctttacagcaagatacatctgtcccaaagaatcctgcatggcagtattttccttcccgctcttactcatgaaagaaaatcccaacatgaccaacatttcatcccgctgtgtcaatagcatcgttttaaaaatatcctgctccacgctcccggatatttccgctttaacactctcgacttcttttcccctattcatcttcttcacggtttcgcacttcacatgaatcggaacggagtccaaaatgatgatgttcgtaccgccatttatttccaaaatcctttcatccacgtctccaagcggtttttgcatcttaaaactacctttcaccacaacagcggaatccagtatttcatatttcttgtctcccaagtcctttttcaaataaaccacttttccatctccaccttcccactctccttgaatagtataagttgtctcttgttcggtacaccccacgaaaaacaatcccattagtaatccactgacaatctttttcatattcttcgtaattattttactatttctaaatgaagtaccatttatatttaattcgattttttcaaaaatgactcgaactctttcgctttctcagctttaattttctcgtccatttttttgaactctttcgcttttgcagcattaccaagtttagcatgcaaaacagaaagagtcccgtaataataagatcttaatttagaactccccttgtcttcttcttgctgcaatttttcgattaaggtcaaatatttttcgattacggctttatccggacaatatgcggccaaatattgagccgtttcctccaaataacgatcagagaatcccaaagcttttataccacgatacatcatctgacattcatatatttcattccacttttgagccaattccaattcataaatcctaattttggcacgtaacgtttccgcacgtttcagattcccgcgatcaatcaaccgtaacaacgtatccacttttcccgcggcatcaaccaggcgcaaaggtgtaccatccttgtcaaacttaacctctaccacctgatccacggctctttccaaagcccaacccagttgtctctccacgctataacgatcaaactttactttattggccaaacggtctatattaaaaatcacgtagtcaaattgcggagaataaggatctttaatataagcacccacgaaatcccaaatttctttctcctgtaatttttccacaggtatcgttttcatgtaatcgagtacaatgttctcaatatcatccttcaaaaaggctccttgcaaagcgacaacataatctttcaaaaaggcaagctcacgctctcctgccgcgtatctgtccttataagcgaacaaacttttaccttccatcccggctttcatcccgtcgatcaatacattcgcctcttgaaacccggccatctggtgtacaacttttccttccttgttaatcaataggagcgtcgggaatccgatgatattggatttataatgtttgtataaatctttccccacgcctttttccatatcatactttacgttgatgaaattcgcattaaaaaagtcgcccacgtctttacgagtaaaaatatctttagctaaagccttgcacgggccacaccaagaggtatagcaatccatgaagatatatttgtcctgctcttgggccattttcaagacattttcccatttctcgccttcaataaaacgaatcccgtcgccagccgactgcccgaacgagaacaaggccaaacataaaaattgtactataaatccaatctttttcataatcaatcctatttacaaatatgctattattttaattcatccaattttgcctgacaagctttcacgtcactctcttcaacccccgccgcagaacttccatctttcaatcccaaggtcaaaacttctttcgcttgcccctttttgtccaaggctaataacttatcggccacgtatgccgccgtcttcgcagaaggactcaactgatgtaaaaacacgtaccaaccggcaactcgatccttgtatgcagcatccttctctccttcatatatctcttcgtaacgttccacgttctcgatcatactcgttgaagtatagtaatcatcaatacttgaaaaagcagacatcatcgcatttagcttccttgccgcttgatattccgcctcatttccactttctttggcctctttcaatttggcttccatagccttaagcatggctattttctcctcgcgacttccctcgtattttttttgaagttctgcgatataattaataaaaagatgattaaacttatccaatttctttttagccgaataatagtttaaacgcaatagctctgaagggatataaatatttcctcctcccaatgaagccgctgtggcactatttttagctcctgtcgctttaaataaacgatctttcaaagccaacacttcctcgaaattttcctcttgatcggcttgtgccgtcttttgaacgcaagcactcaagaatgtacaaatggctttattcacggcagtagaatgctttttatccttcactggattagcagcctccacacaagccgcatctacaaatcggttggctaattttttgtcaaagaccgtaatcttaccaatacgcggaacatttattgaatccaacaactgactatcatctaccaaagcaaaataatcaagtaacacatcactacaatccaaaccggatctatctttcaatataaaatactgattcaagaattctttatctctgtttccttcctcatatttcttcgtgtatttcttcaattccggccgagccgcaaaagcatccacggctttttctccttccttgacaaacatatccacggttttaccccccaagaaacggtaaaccaattccccgtccccgttaacaaaaaggaaagtgggataagcagatactccaaatgttttcgcaaccattttcccgtcttcactcttttctgcatccaatttcaagttcaaaaaatgagcgttataatattcgccgactttagcttgcgggaacacgttatctgccatatgcttacaaggtccacaccaagaggtatatatatctataaataccaacttattttgcttcttcgccatttccaatacctctgcataccgtcccttttggaattctattccctgtgaaaacacggttaaaccagtgattaaaatcaatactaacaacacgaattttttcattttacaatcccttttaatttatatccaatactatcgtatactttttattcttctcgaaatcacaatcatacagcaataaaaaatcctcagccacggcaacttcccatttttgtccctctgccaaacgcggattattcacacgtttcggaaagtaataagcaaatggaatatccgtcacgtgttcttgtttcagtttcccccctttcatcaatcctccatcaaaatactcattagtcgtaatcgtcacgaaacattgtttcccttttaccttaaaatcgaccttataacctaacggtttaggagtttgcatttttacatcccaagccggatctccatacaaaacaactacatcccggtcatgtacaaatcccatctggtctttcgtcggttgctggcccgtcaccgttttaaattgtttttcaaacatctccctctgtccgaactctatttccgaaaaaggataatttacggtcagcattttcggatgccactcgttttccgttctcaacatatcttgctggttcaaataaacggcctgtgccaaggtcaaccgcccggcattagcgacccaatactttagccctccccagccattccggccataccaagttgtaacaacatacccgatcatggaggtcgcatccattccgctcaaccaagcaacagccatgctctccgggtcattatcgatatttccaatcaaacagttacctgccgcaaaataaactctgggatgagccgtcccgtctaggaactcaggagtcatgaaatcggcatataaccgccctccccgtggtttcaagttaccaacggtaaacggcatttcaagatttttctctgttgcatgcgaagaggttaccagcaaatcaggatcgatttctttatatttttccacccatttatcgagtatttcccatttattgatttgctcatttttcacgtccccatcacgagtggtcttctccccccagccaccgggtgtacccccgtcgttcataaatgcaaaacgatcaaaatattttccgtcgctcaattctgccgtagtgttcaacgccgtacggattacaaaaggcttagcactgctttccaccatacgcatagcatccgcggccgaataccccgtgataatcccccacaagtaatccgcgtaaatatcatcatctatttcccggctcaatcgatgtccttccataacgaattcccggttgaggttttccggtttttccaccacgaccatataacggggagccaggcgtcgcaactcctccaacaattcacgcggtttttcatcgtaatacaacacgactgctttacgcctcttggccaaggcctcgaccactttcatccacgccttgtccgattgcatctccttcgaggtaatgactacatagtcacgaagctgttgagcattcacatccaataaattgcaaatcgtaaacagccaaacgacaaacattacaactatctgtttcttcatcatatttccagattaattagaccgagttgcttcaaacaattccttgtaccgttccattcgctccgcttccacggcatctcccatctttttatatttatccgcattatctttgtcaccgacaagaaagtataaacgacctaacaaatgataataattcgtcgaaccacctgcagcctcttcctgatcccttaacctcagcacgaatgacaatatgttatctattaattccttatctaaagtgctttctaaaagtaccgtcaaaatcgctacaatataattaccccggacatcggtcatattcaaatccgtggctacctccagatctctgactacctgtgcgttatttcccgtatgcaaagctttattaacagctaattttaaacgcattgcatcctgtcccaataattgccctttatttacaaggtatgtcaatcgttccaatttcaatgaatcatacaacggcaacacatatcgtttatcctgcaaataaggttcacattgtttatcaatttctttattcagattgcgactcaacgtcatcaacacctcatatctcttatcaatctcattatccccactaaccccacttcccaatcctttgaaaagtctcttcaaacgtgccgccttgtcttccccggcaggagcttcttcccgagcccatttcatctttttcacggcataaataccatactcgaaaacattggaataagggtctgcaaatacatatttattcaacagcaagtaagtatccttatcttccacctgcaacaccggacaccgagacatatattcctttatcacctgttcagactcttttcccttcttcgcctcctccaaagcctccacgtatttcttcacgacttcaatgtcccgcttgttagcctcatatttccctctccaactttctaggttagtttgtgccgatgccgcatagcagcatccgacacaaaccaatgtcatgattgtctttctcaacatattttctatattatacagacaaatcattattttagattcttaaagtaatcggtctcaaccggatcctccggacaattcgcattttgcatggcttccaaatccatcgataacacccgctgtagataaggaatcaacgcaactgctctctccaacatccgtggaaaaacttcgaaattatactccagttctgtcttcttgttggtcgtcaaaaaagaaatgtaatccgctaaatccatctgttgatctggaacaaaaattgtttccggtcccgtaaaattcggtttagaacgtacataaccattttttcgaaacgtataaacattcggcgaatatttacctaccggatcatcttcccacaggtttcctaatatagatgaggcttcttgcccattagctttcttcatacgtgaattaaaaaaatcagcaggttgttccgctgctcccaaatacaatcttgaaatcaacaaacttgataactcctccttccattttgcccaatcttcatctgtaaaattattcatcttatcccccactccagtgagaatgatgcagtcaccattctgtaaataattatcaactactttttccgagttataatcataatcatcacaaagcgagtcacacaaaaacgtacgcacgaaccaacttccctgtactaaatctttatctaagcctacaaatattcctccttgtatatggtcaataattttccggatcacatccgtgttctcctccttcaccggagtataccatttattaaaataaccactccaatttgttacttgaaaagcatacggctcaaatttatacaaataatacattccccactcttcccatgtattatagatcaactcatccacagaacccggttctcctttcgtcaaaccgtataaaggaccgactaactcaggattcaccttcacatcctcggaacaagaaattcctaaaaacaggatcattattaaatatattgcaatctttttcatacttcataaatttttaatatcactactcgggacgtatcaaatcacgctcgttatcataacatccattgttataatcaagctcactccgaggaattgaaaggacataatttttacttccttgtggcaaggtataggtttcgtatgtatcccaacttgaataccacttatgtttcaattccggcattccctgtctccgcaaatcccaaaaacgcatggcctcctcgaaacaaagttcccgacgtcgctcttcccaaataaatttcaacaaagcctgcgcattcggaaaatccgctgacgttttttccacgtatgccttcggggtcaaacgacaccgccgtagattatttaataagtcaagagcatcactagtcacttcattgttcttacgcgtataagcctctgccaaatttaacatcacctccacacttcgccaattttcgtgaacaagattatcactgggttttgtagaagttgaacccgacatttgacgatattttatcggataataatacttatactcataaggtctactttcttcccaccaattttctgcctttttagccggaacatcttccaagaaataagcttttttccgtaaatctccctcttcataagagcgaatcaaagactcatccgcactatgcgaaggcctgaatcccaatccataaagagcccccgtggttgataaatattgatacggagaataactttgggttccgaacgtaaaaacgacttctttgtttatcgttccatccatcatcgtaaatattttattactaagccctttctccgttccaaataatgtcgtatcctgatcgttcaaatttaaaataacagaattctgagccaaaaacaatttaccggtccggatcacttcatcccaattttcttgaaataatgcaatacgagaagctagcaacagaatcgccggttcggaaagccgatgtatatttccgtcaaacgtggctatattgatatatttttccgctttctcaatatcttcgttaatcaaatcatatacctcccgaatagaagaacgtcccctgggagatatattaatttgcggttccatccgaattatcactcccggtttgtctagattctctttcgaccaaggtaaagcatatgaattcaccagacaccagtaattataggcacgtaaagcataagcttgggctgcaagaaaattataatttcccgaatctgcctccacgtactccatttccggtagcgcatcgataaccaaattacaagccaaaatattcccgtaacgacgctcccaaaaattatccgcataactttttatctctctttcccacttgtaaggttcctcgccctctcccacgttaaaagcatccgaagaatttttatcccgggtatcattagcctcgtcctccggatccaattccaattgccccatttccacgtcatccgtcatcaaatacaaccaagccacttcgtcattaaaatttctgggaaagccttctctatacaacattggtaaaaactcctccacttttcccgggatcaacaaatcccccgaatcctcttttaaataatcatcacaaccggtgaataaaagtattcctaaaagccaataggtatatatctttacaaatcttttcataatcacttcctattaaaatgaaacattaatacccaaactataagaaggtaatatcggaatattcgcttccggagtctccggatcaagccccttccaatccttatgcgcccacacgaacaagttcgaagcctggaaacgaatcatcatggaagaaattccaactcccttcaataatttctcaggcataatataacttagcccaacagaacgcaaacgcaaaaaatcagctttcgctacgcggagatcagacaaatcatagaaataggtacactcttcaacggccccccgatcctcggctgagacattacgatcaaaatccgaagtcactctatcattatacaaaacaggtatatccgtatgtttttcatccccaggctttctccaccttttcttccaattcgtagatacattggcaaccggatttaacgcagaatttttatcggcatacacactcggtaaacgctttacaccccccaaattatacgtgaaacccaaggatagcgataagcacctgtcaaacgtcaattgagtatcaaatcctccggaaagatccgggtaaatagatccgcttttcaccagttccatacgtttcggatctgccgtatgccataatttaccatctttcccataaaataacggatatccgttttcactagacaatcccccataacggaaagagtacattgaacctaacttctcgcccttaatcgctaaattaccatccaacattttattaatgacttccaaatcgctataaatgtcatcgtttgccaaagtcacctcacttgtgtttctcccaaagtttacattaaatctccaattcaacctctttccttggatgatctccacgctcaaattaccttcaaatccttgattatccatctccccggcattcatgtacaaacgtgattttccgttagatgttgcaactgttttttctatgatcaaatcttcggtatgttttttatacacatccaaactacctgaaagtcttccattccaaaaagaaaaatctgcagccacattccaagaagttgttttttcccatcgtaaatcaggattgggtaaacggtagatcgtagattgctccaaattacttattgtatttctatttcctacttccaaaatcaaattaggagtagcatcatcatgaatatttccttggataccgtaactacctcttactgaaacataatgtccgttatcggcaaatcgagacataaaaccttcatttgtcaatagccatttacccgcaatagaccatgtgggcaaccaccgatatttcgggttacttccgaacttattcgccccatctgaacgaatattgaaattcatcacgtaacgattattgtaagtataggttgctgaaccaaagaatgaagcgactcttgaaatcgtattcgtattcgtcggaagcatcctgtctatatagttgtttacaaaattatccgtatgtactggcataaatcgctctccataagtaggggtccaaccataccccgttgaacgtacaccctcgtacttcgtaccccgcaactcagacccaacaattatattcatatcatgaatatcacccaaaactttaataaagctcaggccatttctcaccgtatagccagtctttaccgtatttccttggtctaaaattcccccgtacggcaaggccgatttccaatattcatcatcattttcgtcatactgcttataatcatatccacgtgtagaagccacactagcggactcctctgttttccaatcccgttgattcgttgaagaattatgatacgagaaagttccttggtaagacaagccatcatataactttatattcaaatttaacaaagcgttaaaatcattggatttactctctttacctgtttctgccaattcgttcaacacgttatacaaatatttcgaatctttcttgtaaaaatgatattttccattttcctcgtatggttgtactgtccgggaagtattatatgcataactaaacggatttaccactgaataaccttcatttttcgtcgtgctgaagtcaattttcgccataaaatttatatacttacccacagatgcatccacacgcgccaaagtagtgaaacgctcgctaacagaaccttttgcaccaccttgattgttattgtaacctgcggaaaagtaatattttgtagtctccgaacctccgttaatactcaaattatgcgaatgagttaccgcattgcgaaataacacgtcaaaccaatccgtgttacgcttcgccatctcttgggatcgaagtgcaaattcctcttgcgacatccgacgattaaccaactcgttcaacaacccctcgtaagaatcatccggatccaacgatatatttgaattatatgacaatccttgctcgaaaatatccttggacaactgcatacgttctgctgaattcatacgatcaaaattccgataagaaggacgttcgtttaaaaccacctctccatggtatgaaactgtcggtttccccgcacgtccttttttcgtcgtcaacacgatcactccgttcgcagcttttaccccataaatcgccgtggccgaagcatctttcaaaaccgtgatagactctatatcctgcgggctaatccccgaaatagcattacctactaaatattcggcatcttcactattcaactccgaggccgtaatcggaacgtcttgttccagaatcactccatcaaccacccacacgggagccttgttcccgttaatcgttgaagtaccccggatacgaattttaggcgtagcgcttggctccccggaagtattcataaccatcaagccaggaacttgtccctgcaacatttgatcgatagaagcagcccctgccatgtaaatatcatcagttttcactaccgaaaccgcactggccgactctctccggtttaacgtctgatacccagtcacaacgacctcatccacatccaccgcagaatacttcattactacatataaagaatcctgtccctgccaggtaattactttttgctccatccccacaaaagaaaaaagtaatttttgcccgaccttattttcaatcatcatctggaataatccattcacatccgatgcgaccccgcgagtggttccttccacgacaacggaaaccccaggaagaggcattccatccgtatcaaccactttccctttaatcaatttcaatttaacatcatctttcttttgtggtgtcggtttgacaattaccacgccttctgcatactcgtaactcaaaggtagtccttcgaaaatacgatccaacgctttctcgaaaggttcattcgtcagaaccatattaagtttcacgttcaaattcgcgatctcttcctcgttaaacacgaaataaactcccgtttggttcttcaactctttaatcgtctctctgagacttgcattctctaatttcaacgtcacggattgtgacgatacactggctattgccgtgaaagagaaaaacatagttaaaagcaaagtcaatctcattgctaaataaattttgcccctcgcattttcaggagaggattgtgtagaaattcgtctttttttcatacatttggatactttgattaataaacgtagccttttaccgaaggctgctattaaattttcaacatgaaacggggaatgctgggaacatttcccgttttcgtatttctttcaccttgtcactgaagttattgtaacattttttccattgataataaattttacgttagtcgttttttctatcatatctagcacatcattcaaatcttcatattttcgtatcaccccggtaaaacgacgctctttacattccgatgccgaaaaagtgaattgtacatcataccatctagccagttgtaccataatatcattcaattccatgttctcgtattcaaatattcctcgtacccacgaagtatacaaagaaagttctacagccctttggctgatagctccggaatattgatcgaccacggcttggtaaccgggctttaacacgacttgattattcccggatgttacttgcacggcaccccgtaccagagtagtcatcactccttcattctcgggataagccgaaatacaaaactccgttcccaacactcgcacgctcacatcatttacccgcacgataaaaggtttactttcgtcatgttgcactccaaaatacacttctccctcgacgagaacctctcgcgcatctcctgtaaagcgagtaggaaatgtcagtcgtgaagatgaattcaaccataccatcgtaccgtctgctaacgtgaaatgatattctcccccaaccggagtcgagatcgtatgatatacaggcttttcttcaatctcttcatttacttccacattatcatatcgcagttcattctttttatcttccaaaacagtagctccatactgcctgactacgtcttgcaaattatcttgcatcaaatcaacctgtataccatttgccacgattaaagtcgccttcattccaccggcatgcaccttagccgacacgggagattctctctccagttccggcatgtaaaaaaatgcaaatgataaagcgaacaaaatcacaacagaagccacggcagtaatctgaatccacaattgtctcctcccgcgagccttaatcttttcccgtacatgtttcaatgaatccgatgcattcttatccgaacgagtaaccacttgatactcaagcaccatttttaccccctccataaaaaatagcttattttcctccgcttcgtccatccatgcacgcaactcctgttcctcgctcttatccataagcccggagcaataatcaccaatccattgccaaattttatcgttcatctcaattccttttcttttatataccggaagattgaaaaagagatgacaactttttagaaaaaaattacagaaaaaataaggatcttatatacaaattatcgccgaataataaaaaacaataccaaagcattcccccctaactcttctttcaactgcttcaacgccctgtaatacattgttttcacggtatttacggttattccaaagcgttcccccacttgctgataggtcatattatccaacaccacagccttaaatatttcttttgtctttcccggcaaagcctccacccgggcatatactttatcacgtaatcgtgcgaattcattctcatcgtattcccccagctcttctaaaaactgatcgacatatttttccacatcgtcaaacttgatctttccccgacgtgtagcaaacttagaggcagccttggctactgccccgaaaagataagaacgaatggaaccggaaaaaacagttcgctttttgttcatccagaaagaaacaaacacctcttgcacaatatcctccacatcatctccatctgaaacaaaccgaaaagcatacacgcacaatgaccgataataattatcaaaaagcatattcagacagacctcatttcctgcctccagttcgtgtacaatttccgattcgctatataccatattaaaatctaaacagataattatgatttatgcaaagatagacattctcgccaagaatcaaaattatcgacatattactaacccacaaaaaagtaggtcgtttcaaaagaaaaaacgacctacttcatatgattttaagaatccttatttattttcgaaaacgatcttatcatccttcacatctaccatgatacggctatctttggaaacttcctctgcaagaatctgttttgacaaatcatttaacaaagtacgttgaataacccgttttacgggacgagcgccaaactgcggatcatacccggcatctgccagccattgaacagccttgtcggtaacctcgatggcaataccattgttttccaacatcttctttactccattgaactgcaaacgtacaatatccacgatttccgacttcttcaacggggcgaacatgatgatttcgtcgatacggttcaagaactccgggcgaatcgtctgtttcaacatttcgtatacctcgtgattcgtcttgtcaagtacctcatcccggttattctcgtcgatgcccttcagacgttcctgaatgatatgtgcaccgatattcgaagtcatgatgataatcgtatttttgaaatcgactacccgacctttattatcagttaaacgcccgtcatccaacacttgcaataagatattgaacacgtcaggatgagctttctcgatctcgtccagcaaaaccacggaataaggtttccgacgaacagcctctgtcaactgaccaccttcatcatatcccacgtaccccggaggcgccccgatcaaccgagaaacagaatgacgctcctgatactcggacatatcaatacgggtcatcaaggattcatcgtcaaacaggaactctgccaatgccttcgccaactcggttttaccgacacccgtggttccgaggaagataaacgacccaatgggacgtttcgcatcctgtaatcccgcacggttacgacggacagcatctgccagcgctgtaatggccatttcctgaccaactacccgtttgtgcaactcgtcttccaagtgcaataacttctgacgctcgctctgcatcatccggctcaccggaattcccgtccacttggatacaacagccgcgatatcatcctccgttacctcttcccgaatcaatgaacttccatgtttcatgtccgccaacttggcctttacttcttcaattcggcgttcagactctttaatcttaccgtaacgaatctcggccaccttcccgtaatcgccttcccgctcggcccggtctgcctcgaaacggaactgttcgatcgcatccttattcttctggatctcatcaattaaagaacgttccgactcccattgggctcgcaacttcgtgcgctcctggttcaaatcggccaaatctttctggatctcgtccagcttcttacttttcccttcccgcttgatcgcctctttctcgatttccaactgtttgatcttacggtccagttcatcaatctcctctggcacggaattcatctccaaacgcagacgggcagccgcctcatctaccaagtcgatagctttatccggcaagaaacgatcggaaatatacctgtgagacaactccacggatgcgatgatggcatcatccgtgatacgcactttatggtgattctcgtaacgctccttcaatccccgcataatactaatcgcactcatcacgtccggttcgtcaatcatcactttctggaaacgccgctccaaagctttatcctgttcaaaatatttctggtactcgttcaacgtggttgcaccgatagctctcaaatcaccacgagccaaagcgggtttcaatatattcgctgcatccattgccccgtctgactttccggcccccaccaaggtatgaatctcatcgataaacagtataatttcaccttccgaagccaatacctcgttaacaaccgatttcaaacgttcctcgaattctcctttatattttgcccccgcaatcaaggctcccatatccagcgagtaaatacttttggatgccagatttgaaggtacatccccgttcacgatacgttgcgccaatccctcggcaatcgccgttttaccaacacccggctcaccgattaagatcgggttatttttcgttctccgggacaatatctgtaatacccgacggatttcatcatcccgcccgatcacggggtcaagtttaccgttccgggccctttcgttcaaattgatcgcataccttcccaaagcatcgtaattatcttctgccgactgggaattcactttcgatcctttccgcaactcgtcaatagctgcacgggtttccttttccgtcatacccgcatccttcaacatcccggaaaccggatctttcacggataataaccctaatataatatgttccaaagaaacatactggtcacccatctctcccgccaacttcgtggctttctccaacactttattggcctcatcggacaaatagggagaacctcccgacactttcgggtatccatccacgattcgatccaaagcggctaagacattccggctatttacacccaacttgttaaaaataaagttcgtgatgttttcgcctttctcgatcacgcctcttaacaggtgacctgtttcgatggcttgctgacctttttcttgcgcaagttgcacggctgcctgcacggcctcttgcgacttaattgtataattgttcatgttcatagtctcattttctcctttctgccttcaatttcacaaagtatataccgaaactcttatccaaaagtttcatctggacagaatgaaaaaacatttcaacctataacattaacaatcaataaaaaacgaactattgattttcgttttctaaaacaagagatattataagtatgtcattttgtctttatgttttataaattacatgacaaaaatgactcaatcatttacattctttccatccccggaatttgtcacgaaacggggggtaagcgatccctttctccgtgataatagccgtgattaactcggcagaagtcacgtcaaaggctggattatacacgtgaatcccctcgggagccatccttcgggtataccatttctcagtcacctctgctggatcacgttcctcaattttaatctctttgcccgtgggacaatccatatcaatggtagacgtcggccccaacacgtaaaacggaattccataatatttagccaacacggccacccccgaagtaccgattttatttgccgtgtctccattggctgccacccggtcacacccaaccagcacggcctgtacccatccctgtttcatcaccgaagaggtcatattatcacatatcaaagtcacatccactcctgctttttgcaattcgaaggccgtcaacctcgctccttgcaataacgggcgggtttcatcggcaaaaaccgaaaaaccgaatccttgttcctgtcccaaataaatcggagccaaagccgtaccgtactccgaaaccgccagatgccccgcattacaatgcgtgagcaagcccattcccggtttcagcagtgacaatccatattctccaattttccggcacgccgccgcatcttctctccgaatcgcctcggcctcttcccgcaagactcgtttcaaaacttccaccccagcaccttgacacttcaacaacgcaacttccattcgctccaatgccgtaaacaaatttaccgccgtaggccgggaagatgccagataattcttcacccttgcaaactcccggtagaaatcatcaacctcattcaccttttgcatacacacggaaatcccgtaagcagcagccaccccaatggcaggcgcaccccttacctttaacaaataaatggcctcccaaatttcctccggagttttcaacgccaaataaacttcccgtcccggaagttgcgtctggtcaataatcaccactgcaccctgctcataatctgcacgtgcggtcactatatcaaatatattactcataactcatattgccggttcaagattttcattccctgcaatattacacattttccccggaatctcatctatttaaatctacctctttgccattttcaacaccttccaggtacaaaacagaatcaacacgcaacacacgaacataatagcactcgtcgagtaaagaatatttcccatacccgttaaaggagaaacaatccctcctcccaaaaaggtcaaaaaaccgaggattgcagaggccgttcccgaattctgtctttccagattcaaagccagcgtcgtggaagtcggcagtataatacccaagaaaaagagaaacaggaaaaagacaatctcaataatgataacggataattccatacagagagacgccccggtgcaacaacacagaaacataaatccccatacacccactcgcaaagcatgttcattcgaccggaaacgaaccacactcagactacccagcataattgccacggcattgcaggcaaaacaaacgctatacataacaggagaaagatggtaatgttcctgaaaaacgaacggagaagatgcgatatatgaaaacatcacgcccattcccaagacttgaatcaacacgaaatacatgaatttccgatgctgcaacacctctttataataaacaaaacgctccttcaactccccttgtaaccggttctctttagacaaagaatcatgaaaccttaacaaaaccagcaacaacaatatcccgattaacaccagtaccccgaatattcctcgccaattcgtcaccaataacaacagccctcccaacacaggcgcacaaatcggagctaatccctgcacgcaagccagcatggaaaagaatttcgccaaatcctttcccccgtacaaatcagttgctatcgacttggaaatcacgatcccccccccgcacccgaaaatccttggataaaacgagccagaataaaaatctctacactaggcgaaaagacacaaccaatcgatgacaaaacaaaaaagaacatcgagatcactaacggtcgctttcttccaaatttatcactcaccggacccaaaaatatctgtcccacggccaacccgatcatgctaaacgtcaagcttaactgtacccgcgaggctgtcgtatcaaaacaagtcaccaaattgggaaatgccggcaagtaaaagtccgtcacgaagggtcctagggccgaaaccattccgacaacaataagtatgtaaattttcgaatttttctgttccataatctctagtttttatcatttttacatcgcaaatatccccaacattccacaaacattttcgtcctaatcatccacagatttgctctataatgcttttttgtacaaatatcttatctttgcttccggaacatgaaaccagagtacatgcaaaaaggaaaggatacaccaaacagcacgacaatcccctctcttggaaatttctttatttccatgttaagcaaagaatccttcatccaattatttcctctccacaagccacaacgtaacgacatcaacggcctgatcgtcatcatgattacggccggagaaggtcatttgaaaatcaataataaagactaccccattcaccccggcacgttaatctctcttttacctttccacctgatcgagaatcattacctgtcagacaatttcgcatgtaaatacctgtcttacagctttgatttcatggttgacttcccgtttgttctcaaatcggggacctcagaaaaaataggtaacaaaccctacctatccttaacaaacgcagaattcaaccacctggacgaattcttcgtttttatttcccaccaggcagccagactcgatcatccctcccgggaagagatcaccaaagccttacttttctcctttatcgcagaactcagtttcatttactctcgccaagccgtactcgtgggaaccaatcgccaaaagcaaattgtagacgatttcttccggctattacaccagcaccacaaacaagaacgttccccatcgttctatgccgacaaactttgcatgacatcgaaatacctatcgagcatactgaaacaaaccaccgattgctccctctaccagtggataacgaatttcagcctgcaagaagccaaagtattattgagatcatcggatatgagtatcatccaaatttccgaggaacttaactacccgaactcttcctttttcgcccgctttttcaaaaaacacacgggcatgactcccctacaattcagaaacaacaagcaagttcatgaaacttccgaagaatgaaacaaaaagccgtttttcccgttatcttaaaataaaaacaatgctcttatgaaacagaaattatcaataaccctatgggtggtattgacccttatcaccttcttccccagagaactcaaagcctgcactggaatcacgttgagagccaaggatggttcccgcatcgtggcccgtaccatagaatggggaggtagcaatctcaatagccaatatgttgtcgtaccaagaggatataaacaacaatcctacattcccggcggcacaacagaagggatgattttcacggctcgctacgggtatatcgggctagccgtggagcaagaacaattcgtggcagaaggactgaacgaagcgggactttccgccgggctattttacttcccacaatacggaaaatatgaaacttataattccaaagaaaaagcatccagtattgccgacctacaactcgtttcatggatattgggcagttgtaggacaatagacgaagtaaaagaatccatcaaaaaagttcatgtcatcggtatcgatccgagggcatctaccgcccactggcgctttgccgacaccaccggacgccagatcgttctcgaaatcatcaatgaaaaaccgatcttttatgaaaacaaactaggtgtactgaccaactccccaagttttgactggcagatgacaaacctgaataactatgtcaatttgattcccggtatggccccctcccaacaactggacggagtgactcttacatctttcggaaacggaagtggttttcttggtataccaggcgacatcacccctccttcccgatttatccgtgccgctttctatcaagcgaccgcaccacggcaagaaacaggacaacaaaccgctatccaatgtttccaaatactgaataattttgacatacccatcggaatagagttcgctcccgatcaaactcccgttgatattccaagtgccacgcaatggacctcggcaaccgatatgacgaaccgcattatttactatcgtaccatgtacgatagcgccatccgtagtatcgatctccgtaagatcaactttgcccgggtaaaatatcaaacagagcctctcgacaaagtaaaccagcaaccgataatcccgatccgaatcggataataaacatagaggggccactcaaacagcccctctaacacactttcactttatctttaatcatcaatatccactacctgaaacttattattaaatttaatctccaagcgatttgacaatttgatctcatatccttccgaatcatgctctatctctaaaatttttgcctccggataattggccttcacatatttaagtattgcctccggaataatggcagcaggaacttcaaccgtcttgcatttcacctctgtccaatctcccgatttatcgaattctaacttttccccgcttgcaaacaccacatcataactcttgtaaaacaagcccgtctcctgtgttatcaatgccactttctgatctttaaaataagtcgtaataaacgtttgcgccttcaccggtaactgattcatctcaatcggcttgtcattatcagcctttaccatcgtcatcgagaataaacatacgagtaaaaaaacaatctttttcatattcttctatttttaatgggttactattttattatttacatgacaaaaatatcccccgaatctgaaaagaatctggaaaaataaggggaaataagggaattatacacgagtttacagtactcacaggcatatctgtaacaaacttcccctcacacagaggaaagcctactccctgttaatccctcctctacccctgctcgtgggcatcaaccaaattcctacataacacgaacggagcatgtacacctgccagtattcatgttatgtacttactatgtacatgctatgttcatgatatagggaaaggatagagcaactataacccaagggcgaactattatcgaacaagaatgcaaagttttatcttactttaccgtaaatccgtatataaattcctttacgataataccacaccccgacaacatcagccaagaaccaaccaatagggatagaccaccaaattcccgcaaccccgacagccggaattgcagatagagtgtaagccaaagcgacacgggttcctaaagagatcaccgtcagcacgaccgacattcccggcttcctaattccccgataaaaaccgtacaacaggaataaacaaccgatcccgcaataaaaagcgccttcaatccgcaggtattgaatcccgatagaaataatttccgtttcatgtgccggcacaaaaattaacatcaagggacgggcaaacccgaacacgacaagagaaataaagatacaaaaaagagttgcagaaataactgccacccggattccatcacgaattcgcttcatttgcccggcgccaaaattttgggcaataaacgtcgagaaagcattcccgaaatcctgcacgggcatataagcaaaagaatcgatcttgactgcagctgcaaatgcggccatcacggcaaccccaaaactattgattagcccctgaaccatcaatataccaaaattcatcacggactgctggacacaagtcaaggatgaatagacagcaatttccttcaccgtttgccacttcatacacatatcttcccgccggatcctgaactccgggaacttccaaaccgtgtaaacacaaaggcccgttcccgaaacgccctgcgcaacaacagtagcccatgcagccccttttactccccaatcacaccccaaaatgaaaagcaaatcgagcacaatattcaaaacgaccgctacccctaaaaaccacaacggcacaacggaattgcctattgcccgcaacaacgaagcgtaataattatagatgaaagtgaacccgattccccaaaagataacccaaagataatcacgcatcagtgggtaaacattttccggcacgtgcaataatctcaaaataggatcaatccaaacgaaaacggagacattcaaaaccaaagtaacaaaaccaattaacaccaaagaaacaaaagtactacgtttcaacgcttccctgtctcctgccccgtattgcaatgaaaaaatagcaccgcttcccatgcacaaccccaaaagtaccgaagtcaagaaaaccattaacgtgtaggccgaaccaacagccgccaaggccttcgctcctaaaaactgaccgacaatcagcgtatcagcaatattatagaattgctgtaacaaattccccaatatcatgggaacagcaaaccacaacaatccaagagctatacttccagtcgttagggtccgatcctttttcccgtttaccattgacctcttctcctttaaaaacggcaaatcccacataattcttacgctttttactccccaggggacaaaagtaaaaactttataacaacaacacaattcccatccggatttcgtaatttcgcatcgtttttaatgaattaacagtcatgtctaaattacgcagttatatacttccgatggccattatcctagggttactattacacagttggtgtagcctgttagcatggatagttccctattttatattcattattctactcctaaatttcgtggccgttaatttacgtaagttacaaatttcctccatgcacttgtggctcatgctattccaaatcgtggtcagcatcggaggttaccacacaataaaatcagcgtacatgaatgaaacggtggctcaaggtgttttaatcggagttttatgtcccgtggccgcttccgttgtcgtcattgccagcatgcttggtgctaaaagggaaacaacaaccgcttacacgatcgtgggaaatctcatggtagccattatcgcccctgtatatttctctttcatcggatcacaccaagatatgtctttcatggattcttttctactcattctcagcaaaattagtcccgtgatagccctaccgtttttcgtggcacttgctttgcagattttcacccctaaagtcaacagctttctcaaccgctacaaaggaattacattttacctttgggccatctgtttactactcacgctaggacaaaccattaattttatattcatccacggggaaggcaatgaaaacacgattctcgccttaggaatctcatccgtcatgatcagcacgatccactttgctacaggcaaatggttaggaaacaaatacggcgatcgtattgccggaggtcaactactagggcaaaaaaacaccgccatgggcatctggatggcaaacacgtatttgaatccgttagcttccgtgtttctagctttttattccatctggcaaaatctctttaatagttggcagttgtggcatcaggataagagaaaaaatatattgacaaaagaatgaagtctcccactcgaaaagacgctgtaccatagctataacaaagttttagatttaatatatcaggaaaccacgttattacaaatgaaaaaagaggacaaatccgaaatttcctcgtctttatcctctcctgtacccagggcgggaatcgaacccgcacgtctttaagggacactggattttgagtccagcgcgtctaccaattccgccacctgggcgtgaactcgggtgcaaaagtatatcttttttctcaaactccaaacaaaatgacatttttttacaagaaaaagtagaaaatatttacaacaacattctctcatttccataacaccaagaaaatcaatcacacacccaagcaactctccgggttataatctcatacaatcctacacacatcgttaccatcctcatgtaactctattggcaaagggctatgaaagggtaatgaaagagctataaaagggcgtggccgtattattacctaacaatatccccgaattaactttggaattagtttaggttatcccctgttgacaaatcagctatttttaattacttttgcaagagatacaaaataacatgaaaactattatacgatttgtttttaccctgttattatttcttcctctttgcctttccgcacaacaaacaggtgtagtgaagggacgggtttttgacagtaaaaacaatgaaccaataccttttgccaacgtggtgatttggaaaacgaccacaggcacggcagccgacgaaaacggatacttccgcatagaaaacgtgcctttgggtttcaaccgcctggaagtgagtagcgtcggctacacgacaaaattatcggaagaattcatggtaaacacggcctcggaacgcacggtaaacgtcggactggaagaaagccaagttaacttggaacaagtaacggtcaaggccaatccattccgcaaagcggtggaaagtcctgtttctttacaacgtatcgggatcgccgaaatagagaagaacccgggcgggaatcgagatgtatcgaaagtattacaatccatgccgggagtcctttcctctcctgctttcagaaatgactttattgttcgtggtggaggccccagtgaaaaccgcttttacttggatgacgtggaattgcccaacttgaaccacttcgctacacaagggacatcgggtggtgtggttagtatcgtgaacatcgatttcgtgaaggaagtaaatttctactcgggagcattccctgcctcccggggaaacctgatgagttccctgcttgacttccgacaaatagcggggaacccggacaaaataaaagtgcgtggaactttaggagcaacggatttcgggttatcgctggacgggcctctagcacctaaaaccacattcatcatgtctgcccgcaggagttacctgaaattcctgttcgacatgatcggtctcccttttcttcccgtgtataatgacttccagttcaagacggaaacaaagttcaatcagaaaaacgaattaatcacactgggcatcggggcatacgatgttaatactctcaataaaaggatgaaagatcccgatgatgaccaaagatatatgctcaactacctgccggagagcgtgcaatggagttacacgcttggaattacctacaaacattacgggaatcgttggaaccaccttttcgtactcagtcgcagtaccctacaaaacgagatcgagaaatacaccaacaacgacaaaagccaaacgaaactggtggattataattccggcgaaacggagaataaattccgattcgaacacaatcatttgttacgacatgacatcaagttgaatgtcggggccgggatcgaatacgctacttacaaaaacaagacaacaagagaattatataccctcggagagttgaatcatgtacgctacgataagaattttgattttttcaaatggtctctcttcgggcaaatcagtaaaaatttctttctagaacgtctcgcagtttcggtaggagtccgggttgacggaaatagttacacgtcaggaatgaacaatcctttcaaacaagcatcaccccggttgtcactctcctactcgctctcccccgaatggtttattaatgcaaatgccggacgctattatcaacttccctcgtataccacaatgggatatgctgacgaacaaggagacttggtgaacaagcaaaacgggttgcaatatatcggaacaaaccactacgtggccggtttggaatatcgccccggtaaccggacaaaaatcacgctggaaggattctacaaaacgtacgaccattacccagtttccctgctggatagcatcgtgcttgccaacaaaggtaccgattacgtggcggtaggtgacgaacccgtgaaatctctcggcgagggacgagcgtacggggtagaactgatggttcgcacgcaagaatttttcgggatcgtggcatcgctcgcttacacgtattactattccgagttcaagaaaatggattataacctgcaaccgatctctgaatatattcccagcagttgggacaaccgccatattctttccctcacggcaacccgcaagttaggcctctgggacataggtatgaaatggcgaatcacgaacggggctcccttcactccttatgacgcagaaaccagttcactaatagcggcctgggatgccaagcggcaaccttatcttgattactcccgtttcaatagcgaacgggcctcctcgttccatcagctggacattcgggttgaccggagtttttatttcaaaaaatggtcattaatcctgtatgccgatatacagaatatctataaccacaagacgaaaagccccgatttactcgtaccgcaggagaacccggacggaagttacaaaatcgaccccgaactcccggatcgctacctgatgagatacatcaaaaacgacacgggaacattactaccgtccgtgggtattattattgatttttaaacagataaccgattaatattgagaatatgaagaatattatttttgacctgggaggagttgttgttgaatggaatgccaaacgagtaattgaaacctttaaagggaatcctattctcgtgaattttgtcagagagaaccgtcttttcctgaacgattggcgggactacgaccggggagacgtcactcgccaagaactgatcaacaaagttgccatcttatccggttgtccacccgaagactgtaacgaattcgtggaacacgtgaaacattcattggtctccattcccgaaactgaaattttaattaaagaactttccgcacggggattcaaactttattgcctttccaatatgtctgtcgatttctacgattacctgaaaacatgggaagttttcaagtactttgacgggcaaatcatatccgccttggaacacatggtgaaacccgaccgggaaatttacgacttgattctgaatcgctatcacttaaaacccgaagagtgcctgtttatcgatgatttggaacccaacgtgaaggccgcacaagcagtaggaattaacacagtacatttcacaaacaggcacaagggctacgaagaaatccgggaaagactaaaagagaaaattcaccataacgggcattgacttaacaatgcctcgataggaactatcctatcctttttttcgcaagaaataatagaatcgccagcacatcattcccccggtaagcgttaagcccacggggtaaccgagccatattccctcgattccccaatccaacacgaaaccacagatataagaaaccggtaacgcaatcacgaaatatccaataaaggagatcaccgccatagaggtcacatccgccacgccacgcaaggcattagcaaaaatgatctgtaaactgtcaccaaactggtagaataccagaataaccatcaacacggctaccaagtttaccacgtcttctgacgaagtatacaaccacccgatatgctcccgcaccaacaaaaagaacacggaaaccaagattgccaataatcccagcaaatgggctccagccaaagttgcccgtcggactcctgcaatatctccccgcccaaagaaattactcacccggatagaaacagccgacccaactccataatagaccataaatcctaacgtggagatagaggccaccacctgatgggccgccaagggaaccgttcccaaccaaccgatcataactccactgatactaaataatgctgtctccattcccatttgtaaaccgaccatcatccccattctattcaacactttcaaatctcccgtgttataagtcgttcggtggtaaccgacaaggtaacgccgataagattgtttccggaaaaagagaatagcaaaagccacgaacatgaaaatccgcgaggtcagagtagaaattccagctcctgtcaatcccaatgccggaagtccccacacaccataaatcaatagggaatttccgataatattcaacaggttagccgacaacataatccacatggaagtctttgtatctgtgatgccatcagcaaactgcttgaaactattaaacatcataacaaacacgagagaagtcaattgcaacaaaaaataaggccgaatcaagggtaacaactcttccggttgtcccatcctatgtacattcaagtacataattcccatcaccacagaaaggaataaaccgatcataaagtttgccaacaggctgttacgcaacaacccgccaaccctgaacttgtcacctcgcccgaagaattgtccgaccaaaggcgtcaagccataagaaaatcccatcccgaacaggatcggaatattaaacacgctattcacgaaagaagcggctgccaaatcagacgtactgaaatgtcccaccataatattatccaccaatccgacaaccacaatccctaattgtcccaacacaatcggcatcccgattttgatcgtcgccgaataatcctctctatatttttgcagccaattcatctcaacaaaataaacaaatttgaaagtcataaggtttataaagccatgtactaccccctccgactcccccttacacagggggagagctgattaccaaacggccttataaactttatcaactcctataaataccctttcgccttcaacgactcctgtactttcgtcgcaatcttcattccccattgttgtccgacagccatactttcagtagcgattgccggttgtgcggcagccatttttttaccgacaggagattcgtaaaatttcgtgatttcctgtaaatcagacaacgttagacgtttatgataaatcggggctaacatttcaaccaagtcatccaccaatgtcttcatcatctctttttctgcctcactccaaaattcagcaggaacattcgggagttgttgtttcatcatggcaaacatttgcgggataacaagcttgaatgtcgcatcacttccggaaaccacgatcatttttttcaatgcggcaacgtattctttagaaggttgagtttgtgctgtctgagcgacacttacacctccaatacccaaaacaagaataagaataaataaaatttttctcataacatcatattttaatttgtgttacaaaggtaccttttttacacaaaagtgcggacgagacgggaaaaaacagaaataatttataccttgcagcgcaataacgcaaagaactgaactatgagatacgtattttcactttttgtaactctattattagcttgcggctccgtacttgcaaacggcccgttattacagaaattacaacaaatcaaagaaatatccggtattcgggaactaaaagttcaaccttacacggaatactacgaattctggtatgaacagccgatagaccacaataatccctcgaaaggaactttcaaacaaagggtattactgggacatcgggatttcaacgctcccatggtagccatcctcgaaggatacgggatttactccccggcagaaagcgaattgtcaaaactattcaaaacaaaccaactcaccatcgaacatcgctttttcaataacagcaagcctgaaggcgaaaccccgtggactgatttaaccttgaagcaggcagccacagaccagcatgagattattcaagccttacggcaaaagatatacccgaacacgaaatggatatccacgggtatcagtaaagggggacagacaaccgtctatcaccgttatttttacccggaagacgtggaattaagtgttccttacgtggcacccattaacctagaaaaaattgatccccggttagagaaattcctttccaaactgggcggaaccccggaaaacagaaaattactcgaagggggtggaaaagatattaaatggcaaatcttcgattttcaaaagagatgtcttgaaaatatggataagcttatgccactcatgcaggaattaacgcaagcaaaaggctattcattcaacaaagtcggcgggacagaacgggctttcaaactcacgatcctagaattcccatttgcattctggcaatggggaaataacatcaatgagatgccccaaccggaagaagacgattataacgagatattcaactacttggtaaaagtgtcttcccctgatttctttgacgacaaagccatcgaaaatttacaagcgttctattatgccgctttaacagaaacaggcatgtacgcttataataccaaaccgttcaaaaaattcttcaaggatgaaccggaaccgattatcacgttcgatttcgccatgcctaaaggatatgagaatgccccgttcaacacgcaacaattgcaggatattaatcactggttacagaccaatgcagaaaacattcttttcatttacggaggaagtgatccttggagcgccacagctgtcgacctaaagaaaaacgacaaatgccgcaagtacatcaaagccaacatggatcacaaatgtcgcattgcaagtttcgagaaccttacccgctctgccattatcaaagtattgaaatcatggctcacgggcacggaagtcgaggaagaaattgaagaagttttaatttactaactgacggataaccgcatctgtcgcacctagttgttgattgacgaactttaaagcactttgcccggcagcctcagcgattgccgggctatttattaatgaatccatcaaggaagtaaattgctccttatccgagatggaaaatgccccgccacaagcgatcagattaacagcctctttaaatttgtgatatttcggtccgaatatcaccgggataccgtagatggcagcctcaagcgtgttatgaatcccttttccaaaaccacctccgacataagagatagaaccgtaacgatagattgaagacagcaccccgatcgtatcgaccacgagaacctgacatttcgtcacgtcggccgtctcatctgtatagcgagctaccgacttacgacacttgcccaaaatatctttgatatgcccctccccgatctcgtgaggcacgataatccacttgtaatttccttcctgtgcattgatataatccagaataatatcttcgtctccgggccaggtactaccacaaaccacggctctccggtcattacagaaagcctccaccttttcgattctttttgccgcatctgcaatctgttttacccggtcaaaacgagtatctcccgtctgttgcacgtgagtaatgccaatcgtcgacaacaactttacggattcctcatcctgtacgaaaagacgagtaaagaacccgagcatacgacgatgcagattcccccatttcttaaagaacggttgccccggacggaaaattgcagagattaaatacgtcggcacctgatgtttatgcagttcattcagataattataccagtactcatatttcacgaacacggcagcatccggtttccatgtttccacgaaacgacgggcatttgaaggagtatcaattggtaaataatagatataatcggccccttgataattcttgcgaatctcgtacccggaaggagagaaaaaggtcaataatattttcgtgtgaggctccatctccttcaatttttcaatcaccggacgtccttgctcgaattctcccagcgatgcggcgtgaaaccacaccaatcgaccctttccccgatcaacagcctccatccgtttccatattccttttcgtcctttcacccataacgctgctttttcgttaaaaagagaagccacgccaatagcacaacgatatgcaataattccaaaattatacagcataattattttagattttagattttagattttagatt

SEQ ID NO: 10737 - DNA, 14710 bp, Unknown
  gut microbiota DNA sequence
tttacaatcaacttttcgctgtcaaaggtataaaatttatcgcccaatggtataacttttgtaaataacgttaagcagaggagaatgaacgagttattgcattacatttactctccgaatagaagtatgtgtcagtaaaacattaaaataatcaagttatgaagatcaaaagtctattaacatgcatgatggtaagccttgtcacgatcctaccattacaggctcaggtcggcaaggaaatgaaagcattccgcaacaaagatggtataaccgtaacgatgttaaacccgtcgctttacagcctttacaaacaaggagacctatctctacctgcggaagaggctttaaaagatatgaaagagatcaacgtgatgcaagttgacatcaaacgggccacccccaaggttgtggaagaaatttctcaacgaatcaccccgatcgtggaaaacgaggccaaatacacacttgtgcgcagtcaccggggggcttacagtcaagaatacctctacgtgacacaacatgaagaacgtatcacgtctctcgttttatggagcgaggatgcagaaacgctttctatcgtggaactcaaggggaatatccaactggataacgtggatgaaatcgccaatgcactaaaagtgaaaggactcgatcgcttggcttacatcaacacgccgacagatcaggttgtatccggttccgattttatcaaaaaactggaagaacgctttggcataaaaagagattccattttcgggaaagatccttttggttcattccgagaaagtttcggcagcatggacgatatgctcaaaaaagcggaagaaatgttccgtgacatgggtcccatgtttagcggcgaatcagacatggaggggatgggagaatccatttccaacggtctggaagttattcaggaaaacggaaaaacccgtataaaagtaaacgccaaaaactcggaagtatcttacgtgatcgacggcatcgaatacgcagccgattcccttaaaaacggtattcccgacgaaattgccaccgtgaacatgattacctccccgacgaatgccaaaaaatcatacgtggtaatcaacacgaaacagaaaaaaggacaattcatcagttatgccaacggcgtgctgaaatataagtacaacaaacaggaatacaccttgaatcccgaaaagctggaagaaccggcactggttatcaataaccgtctgacaagaagtttcaatattgatccggtacagatcatacagattcgtccggcatccgaactggaacgacaattattcggtgccccgtcagcccaagtcattatcgtgaccgataaaatgggtttcttcttctaacatttttcttttaaaaaacgtatagcagcaataacacaagggtgtgtcaaacgacttttgacacgccccactataaacgaacaatcaacgcatacgttatgaatttggctgctatcacgagaacgggaagttatttcctaacattatttctattcaccattatcccttcggccggaaatgccggaaaagaccaacccgaccaaccggaaaagaccaagccttataaaaaggtaagcgaacattcgaatttgcaacaaaccttaccctccaacgatgaatggtggcaattgttcaaagatccgattctcgacacgcttatcaataaagccgtgatcaaaaactacgatgtgcggaatgctattcgcaaaatagagatggcaaaagcaaaattgcgggtggatcgcagtccctactacccgaccatctatttttcagccaactatgccccggaaaaaagcagccttagcgcagataagaaaaatattatcgaacggaacggaactgccaccgtcaacctaaactgggaactcgacgtgttcggacgaatccggaaagagagttcttctcaaaaagaattttaccttgccgcacaagaagattaccggggagtgatggtatctcttgccgcacaattatccacggcatacatcaacctgcggagtgcccaaaaacaactggaagtaacccgtgaaaacatcgaatcacaaaagaaggttatggaactcaccgaatcaaggtttaaactcggattagcctcccaacttgatgcggcacaagccaagagcctctacctgcaaaccaaagcgtcattaccgggaatcgaatcgaccatcgcccagcagatcaatctaatcggggttcttatcggtgaacattcggttgccatccgggactcgttattgaaaatccgtcccatcccgactaatccccggcaagccgcaaacggtattcccgccaacctgatccgccagcgtcctgatgtacgttcggcagagagaacgattgacggattagccgaggccgtgggggcaagccgagccgactggtggcccaagttcctcgtgaccgggttcttcggttactcgtccgaaaacttcgaacagtttaccaataaggaaaacatgatctggcagatcgcaccttctatcaaatggaccattttcagcggtagaaacttagtggaatccaagaaatctgcccaattacaacttgacgaagaaatcaactcgtacaatcaaacattactgaccgccttgcaagaggtggataatgctctggtaacttacaataaatcactcctgcaaatatccgccttgaacgatgcattccaacagtcacaattaacattagaccttgcgatagaacaatataaaaatggcttggccagttaccagactgtgttaagttcccaaatcagtcttttgaactacgaaaattcccttgtggaagccagaactgcctcccttcgctacctgatagaactttatcaagccctaggagggggatggcccgtaagtgaattttaagaactttataaactaaccatatgaaagcattttccattatttgcgttatttccattcttcttttagccggatgcggcaaatcgaagaaacaacaggaaacaactccaacaccctcggttgccgttgaccacccgcagctgcgcacggtggtctatacgtttgagtacccggggtatctacaagcggaacaaacggtaaatctcgtggcacgagtttcgggctacttggaatcctatcaatttactcccggacaacgggtcagcgaagggcaaactcttttcgtgattgagccgcaaccttataaagataaagtgacacaagccgaggcaaacgtggaaagtagtaaatcgaagctcgcctacacaaaagcatcctacgaacggatgcaggaagccgtaaaaaccaaagcaatcagcgagatagactaccttcaagcccaatccgattatggagaagcccttgcggcttacgaagaggcccggagccagttaagtctggccaatatagacctttcatactgtatcgtgaaagcaccttttaccgggcgaatctcccggaacatggtcgatccgggcaatatggtcggaacagatgccagtaattcggctttagccaccatatacaaggacaaccaaatgtatctctatttcaatatggcttacccggactttgcccagttgcccaaaaataccccatctgccctcccggttaccatacaagacgtgaataatccggaaaagacttggatcgccgctctggattacagttccccaaacattgacctcaacacgggaaccctcaacctgcgagccattgcccgcaacccgaacggggaccttcttagcgggatgtacgtgaaagtcatcgttccctacaaaagtgtccccaaagcgattgtcattccggaatcgtctctcggtaccaatcaaggcggacgctatgtttatctcgtgggaccggatgacacgatcgtcttccgtcaagttgaagtcggagtactcactcccgatgggatgcgagaaatcaccagcggccttaccctagaagatcgctacgtgaccaaggccctcatcaatgtacgcccaggaatgaaaatcaaaccaactttatgatttaatgatttacgattttagattttagattccaatcgcacaaagacaacgtttcgagaattacaaaatctaaaactaaaaatcattcatctaaaagcaaccaactcgcgttgttgaaatttaaaatctgaaatctaaaatttaaaatcaacaagatgttatctcactttttcatcaatcgaccgatatttgccaccgtcctatccatattgatcgtggttgcgggagtggtcacgctgagatcactgcccgtggaacaatatcccacgataaccccacccacggtagtcgtggaggctcaatatccgggagcaaatgccaccaccatcgcacagatggtagccactccgatcgagcaacaagtcaacggggtcgaaggaatgctttatatgtcatccacttcttccagtgccggggtctatcggcttaccgtaaccttcgaggtcggtaccgacctggacatggctaccgttctcgtacagaaccgggtgaacatgaccctaagctcacttcctcaagaagtgacaaaaataggggtcaccaccaccaaagaatccaccaacgtggtcatgtttcttacgttgacctccgataatccgagttatgacgctctttatttatccaactatgctgaattgaacctcgtgaacgaattatcacgagtaaaaggagtaggtagtgtcggggaattcggagccggaaattacagtatgcgtctatggctgaatcccgacttactaaccatccggggtgtcagtccacaagagataatctccgccattgaaagccaaaacatacaagtagcccccggggcagtcggggctcccccacttgctagcccggtagccttccaatacacgctggaaacccaaggtttgttggttagtgaagaagaattcgggaacatcattgtaaaaacactttccgacgggagatacctacggctaaaagacgtggctacaatcgaactgggaagccaaacgtactcgacaaatgccctgctaaaaggacaggcagtagccgccatagccatttatcaacttccgggagcaaacgccttggacgtggcccaacgtatcaaagcccgggtaaacacgctatcctcgtatttacccgaaggtgtacatctaaatatcacgctcgacacgaccgaattcattcgtgcatcagtcaaagaaatatataaaacattggggactgcttttttactcgtgttaattgtcattctaatcttcttacaaaactggagagccatgctgattcccctgatcgccattccggtatcacttgtcgggaccttcacgttcatgggactcatgggcttttctatcaatacactaacccttttcgggttggtgctggccattgggttggtagtagatgatgcgatcattattgtcgagaacagttaccgtctgatcgagaccggaaaatatgcagacatgaaatctgctgtcactcaagccatgaaagaggtgtcgggggctatcgtgggcattatccttgtcctcctggccgtgttcatcccgaccgcatttattggcgggatcacgggaatgctttacaagcaattcgccttaaccattgcggcagcaaccgttatcagcgggttcaatgccctgactctaagtcccgcattatgcgcccttttcctaaaacccgccaaaccatccaaattcttcctgttcaagggattcaacaaatttttcgagaaaaccacgaacgggtacacgtgggtagtacaaggttttattcggaaatcgacattagccattctggcattcttggtacttgccatactggcattcgttggtttcttacgactaccgacaactttcgtcccgaacgaagatcaagggtatttcgtggtttccatgcaattaccagatggttcttccctatctcgtacccaagccgcatcagccaaggcaggtgagatactgaaacaaatcgacggggtaaaaacctatattgcaatcaatggtttctccatgatggataatgcccaaaattccaacgcagcttccattttcgtcatgctcgaaaactggaacaaacggaaaagcaaagccttgggagtggatgccatcacgacccgattcaacgaactggcctatctcgaaattccggaagcgcaaagttatgctgtatctccaccccctatccccggcttgggagaaagtagtgggttcgaactcatggtggaagacatcaataactacggttccacatctctgcaacaagccatcgatcatctggttgatgccgggaacggaacgcctggtctatccatgctccgttccacgttcagtgccagtgtcccgcaatattacctgaacatcgaccgggataaggttgaattaatgcaaatcccgataggagacgtgtttaacgctctctcggcatacatcggctctatttacgtgaataacttcgtgaaatacggcaggaccttccaagttaaactccaaggtattcccgatagccgaagagtgattgacgatgttttgttcctaaatgtcaaaaacacacaagacgaaatggttcccttctctgccttcacgaccgtggaacaacgcctagggacagaacttcttcccaagtacaacacctattcggcagcctccctatccggaagcgcagccccgggatatagctccggtcaagccttaaccgtcatgcaacaggtattcgaacaggaattaggcaacacgttcggttacgaatggacgggactcgcctatcaagaagagagtgcgggatcgaccacgatgatgattttcatactcgccattctcgtggctttcctcattctcgctgcccaatatgaaagctggacttcaccatttgccgtgatcatgggattacccattgccctgttgggagttgtcatcgggtgtctcgtgatgaatcttccaatcagtgtatacacccaaatcggcatcatcctgttaatcgctctaaccgccaagaatgctatcttgatcgtggaattcgcccgggattatcgagccgccgggaaaccgatctccgaggcagccattgaagccggaaaggttcgtctacgcccgatcctgatgacctcattcgctttcatcctcggtgttttcccgctggtcatctccaccggagccggggcagcaagtcgaatctcgttaggaatagccgtttttgccggaatgttgatgacctcgttggtgggtacacttttcatgcccaatttctactatgtcatgcagtctttacaagaacgattaacccgaaaaaagctgaaatcctagaaaaataaaacccattattcgaacctccttcaaagatcatccaaaatttccccataccgcaatacttaagccacaaaaaagctctgggtgatctctgaaagagtggaattattggggttagattacttctttatttggattaacttatattcaaataatcaccttgaaaaagattcaactcataaacccaaatacaagaaaaatttttaaatcaaaatgtacgatttatcgggcgtacttttgacttatggtctaacacttacattcaattcaaggtaagtgtatataaaaagaaatatcaaaaggattatgatcataatagttgctaaaaagtgcataaagaggagttatgcttccatctatttcaaaaacctcattataaaatgagtatattaaatcatatttacccattcttttttttatttgtcgactattaaaatcaactataaacacatcaaaatcattaataatttcacattctttacagttcaatatatttccattttttaccaactcaacaaatgaactcatctcatccattgacaaatcagactcgagcaacattatctttatatcaccaaacataatggaagaaatatatgccaaatcatttttatcactttcaaatatatttattggtctgattaaaggcatatccatatcgaggctgaataatgatctttctagaataattgcaattccattttttctgtccattgagacaaaattgtacttatttcctcgaagcaaactatctaatcgtatccctaaataagagaattgtaaatataattctttataagaactatatttaataccactattatatattattgacgtaaattgttgtactttattattcttcaaataagctcttattaaagaatccatactttctttcgaaggaatttgagaatagtgatactgttttccactaccaaaactaaaggataaagaaatagcctcattatccatgcttccctgtacatcaacacaaggaaatgcattaaatttacgagtaacaatagccccaacatatacattccgattaataccaggagatatatacagtcttggactttgtacaaaaaaactacgtcctttttgatctgaccatacactatcctttagtagttgcaaggaagacgataaataatttttccatattattccagaagaagaaactaacgtatctgcatctgtaataattagctcttctctatcctgcccgccatgacaagcatacaaccacacatttaacaataatacaataataattatatttttcatcactatgaagtttaataagttaaacagttgtccaaaagcatactcaattttagatcaatataacggatctaattacagacaagttttggacaacaagatatataattttataataaactgatttaccatattttacaatgtctattaaagagtgattttataatttagtaccattttagcaccactatttagccatcataaataaatcaagagatggtgcaaatggcattggacaattaacttctcgggcagcataatccatattcgtttaccgtcctcaaatcagtcaacaccttccggggatagtcagacggttaatttacagtcccaacaaatagctattcactgattttatatttatattgcgtagtttttctacaataatcgaacttatagtttgtcgcgtgagattttatttatacctttgcaccgtacaatagataaaatcaacgattatgatagcagagttcagcattgagaattttttctctattaaatcaactcagaaaatcagttttgagccatcggcagatacttttatgtctgatgaatattcgtatgaagttaagaacggggtaagattgctgaaagtgggaatcatctacggtgccaacgcttccggtaaaacgaatgtattgaatgccatcgaatttttcaagatgctggttttgagaatgcctaaagaccggaccgagaaaaccggggttgtccctttcatgttggatgacacttcaagaaacgaaaagacaaagatgtcaatggtgttctatattaaccagtcgaagtacatccttagttttgaattggacgcaaagcatatctattccgagacattgattgtttatgattccattcgcccaaccaagctgtacaaccgaagttatgatgccgcaacagattccacgaccattgactttggcgtaaatctgaaaatgacgaagaaaagccaggatgtgatttccggcaacactatcaataattgcagtgtgcttgccgcatttggcaaaagcaacgtggaacggacaaggctgaatgatgtgtacgactattttgccaagcaggtaaaagatgtactggctcccggcatgctgctttcgggatatgtcaaatcacgattggataaagacgaggcaggagatttgaagaaattcattttaaattttctgaaagcatccgatttcaatatagaagatgtggtattacatgaagaggaagagctgattacacctgaattggaacaactgattcagaatgcccctattgataaggatgcaaaggctgaaatgcttagaaaggggaaaattacaaatacggaactgaccttcaagcataaggcaggcgataaagtatatgatttgtcggaagaatacgagtccaatggcaccatgaggttcttgggaatggcggtgatactgaatttcttgttaaagaccaatcggtttgtgcccattgatgaagtggagacaagtattcattatgaactgttggcttatttcctgaaagtctttctggcaaacagtaacggaacatcccaaatgctcctgaccacacatgacatcaatcttctcaacgaggatttcattcgccgtgatacgatatggttcaccgacaaagacgaacttggcgaaactaaaatagtacgcctatcttctttgggactgcataagaatctttccccatacaatgcttacaagcaggggaaattggtaaagttgccattcttgggtagtcagtatatcaacctgaatgactaatgatatgggacggacagtaacaaaaagtatcgccatcataggcgaaggagaaacggaatggttctatttcgactctctgaggattgcgtgtcggtatcctttcaaggttgcgccggattttccgcagcacagcgacatcaatcatattctgaaactggtagaatcttatttaaacaaacaatacgactttatcgtatgcctatttgatatggacagactatttcagttcccatctgaaatgcagttgtatcagcgggcaaagaaagagtataacaagaagaaatatgccggaaaggttatgttcgtggaaacgaatccttgcacggaattttggtttctgctccacttcttgcctaatgtggtttggcggcgatatgagagttacgaccaactgcttcccgaattgcagaaatatatgccggggtatgaaaagacgaaacggtatttcatacgcaccaacctctataaatacctgacagagaatggtgatttggaacgggcaatgtcaaactctgaaaagttgtgccaactctgcaaggaatcgccagaggatttgaaggcgtactcggaggtacataatgtgataaggttgcttggcaatatgtaaacagagatacattcaaatattgcaacgattatattgatttataataaggtaattaaacaagatcatggaactattatacatctatatttgggacgacaaacgtaatatcaaagggtgtgaatataatttttctccaaattataaattttcatatcagctccaatcaaaaacttttcatatggaagaatgtgattctttatataatggctggttcggagagaatatagttaatatcactgcaatagttggaaaaaatggagcaggaaaaaccaatctacttgactgtataataaaggcgttatgtggtcaaggtggaggttatgtcttttatataatataatgggaatatatatacaaatatcccaaaacgattctccgagtacaaatttacatttaatgtaattcaattcaatagaggtggttctcctctaaattctgaatttgaagaacatgtcaatgacacatttgtcactttctattcgccaacaatagataggaacttgtcaaatagaaattctcattacgcaaagtttgaggacatttcaacgtcccatattcttagacaatcattaagtcgattgactcaagaaccggaatatgctcgtatgccagaagttgacataatgcaaaccaatgatttatttagattactgttgttgtttatttactcgcatgagcaggaacgacacaccatttttgaatcaatcaaattgcctgactattttgaactaaaattgctttatttttcagacataattcctcagcatccaacatataaaactttgacacaagatatatctaataaagggtttaaaaataaattaaaaaagttcatactaacacaggttttcttgtctaaacagcattttcctgaaggttgggataataaaacgacatttaaagaggttctattatttctcaataatggagaagagtatagatcaaatctatttgatacactctgtcaacttttcgattctggaaatatcaaatatcaagaacatgaattaactggaatgagaagagggtattatgaatttaaatgcgatattgaaataaatgccgttaatcaagaatttataaatgccttgtattgttactacaattcaatacctatggctccttatgcttcatttggaacaatggagcataatgtctcaaatgctcaagttgatatcaatttaggtatttcgtctggtgaaagaactatttatacgttcttatcacgtttgatgggtgtaatttggggtaagcaaggcgaaatacatcacgctgccattaataagattatacatagtcatcaatttgatggcaaaacattaatcatactacttgacgaaccagacttacaacttcatcctgaatggcaacagaagttcatcagtttgttgacaaatttactgaatttatatttcccaaaagttagatttcaaattataatgaccacacactctccaatattactgtcggatataccacgaacgaatgttatctttgttgacaagaaacaagatggaacttgtaaagtgtgcaatgggataaaccttaaagaaacatttgcgtcaaatatacatactctatacaataatagtttctttttggatggcattcctattggagaattttcaaaacaaaaaatagaatcactgcacatgcgaataatgtccgggacgattgacagtcatactcttgaagacatttataggataggggaacctataatccgcaacatattgttacaagagtatgataacaaacgagatacactatcaaatgttaaacgagttactttattaaaagaagaattggcaaaattggagagcaataaacaatgattaaaattaacgatttcaacacacaacacattagttgtgaatatgctgactctgtgatcaaaatggaaagacatttcaaaatgggaaatcggtatttgtcttatattttaaacgaacgaaattttagagatgacattgtgttatgcccaccctcaaaattaatcaaagtaatagaatcgttcaacttacggtttccagacatagactatgacgccgaagattggaggtattttagaaactatatgattagacaatatgaaagagtaagaaaaggaattctacacttggttcttaattctttaaacttaagcgtttgtccatattgtaatcgacaatatattttcggtacagataataaccgtaaagttggtgctcagtttgatcatttttatagtaaaagtaaatatccatatttagccctatcgttttataatcttattccatgttgtcctacgtgcaataaggcaaaaggagaagaatgtatagaaattaatccttatatagagggatttgagaataatgggaaattaatggttgattcacctttgaattgcatattaagaaatgcagattgggaagttaagtttaaagccgatgataggtgtaaaacaaatattcaggctttcgctttggatgaattatataaaaaacacaaggattatgctcatgaaatagtattgaaatctgttgcatatcaaaagggatattataatgatttaaagatatcatttcgtaatattggaataacagatgaaacaatagagagaatactatggggaaattatttagacaatagtcaattatctagaagaccattgtctaaaatgactttagatattattaatcagtttctaaatcttgatgattgcgacgatatataaaatagcataacgagggcaagttggtagtgtaaaataaactgtgtcacgcattatttttctctataaacctcatcggtcggggaacggccagcgccaaggggaggaaccacccgtcccgacgagcgtaaaattacaataatttaaatcgctctccaaactttatggctaattgttgtgagattgtagcccagttagccagtggcatggtccacttcttccgtatatttcggtatgcaagataaaccagtttctcaagggctgtatccgacgggaatacgcccttgttttttgttaccttacggatctgacggtgatacccttcaacggtatttgtggtatatataagcttacgtattgcccggcagaaggccattaaacctttcagcctttccttcaatatttgtttcccccgtttcttgtgggctttgacggaatcgacggacaggcctaattgttcggcgatttcttcattggagagttcctgtaaggtcagttcatagatttgccgtaccggatcggagagttccccaatcattttctgcaggtgataatatacctcttcgcggatgatattgttcagaaaaaaactttcttcttccatcctgttgttcaagtagcgttcttgtgcctgctgacggcgcaggaaattgagggccttgttttttacggacagaaacaggaacgatttgagggcaacgggggtgtcgaacaggagacggcggctgtatagttccgtaatgacatcctgcacaatgtcttcggccacctctttgtcttttacatatttcatggcgaatacacccagcatctggtaatattcatcgaaaagaatccggtaggcttcttcgtttccgaagtgcaattgttcaatccatttaaaatccgggtgttgtgatgacatcgaatgactgtttcaatttgttaggatacattctattttatgcaaaagtaggaaataaaaacagatgaagaatgatattctccctactttttattttttccttaattccgcaacataattgataattatttttataagttcctgggcaacattttgttgcccaggtttttg

SEQ ID NO: 10738 - DNA, 10887 bp, Unknown
  gut microbiota DNA sequence
atgcgcacaatcagattacgaaagtagtaaataaattcggttcacaaggaagcatcttgcacaaactgaaggaattttcctcatctgtccctgattttagaaggtcaggcaaaggaaatcttcgtcacaggctcgatgacatcaccatgttgatgattctcggccgtgcatcggggtgcattggacgtgccgagattatagagttcggcagacacaacctcaacaaattcagtaagatgggcatgctaaggaacggtgtcctttccgaagcgaccctttaccgtgtggatgacggcattgacgatctgaccatggttgacaggatgcagtgatttgtagaagcctttcacggtgaactgctcaaaaaagaatgcggcaaggaaataatctgcgtggatgacaaagccgaacacggcatcgtacaggacaacgggcgcaattctaatattgtgtccgcatattcctataacaccggcatcacattggccaccgaagcctgccgggagaaaggcaatgagataaaagccataccgcagctaatcgacaaaatcagtatatctggaaagatagtcactgccgatgcgatgtccatgcaaaaggacatcatcgacaagatccgaaagaaagggggggatttccagatagaactgaaggcaaaccagcgttcactgcgttatggagtggaagacaggctcaaaggactcactccggcgtattcttatacggatggtccggaactcggacatggcagaatcgagactcgtacctatcggctctttgacgggcttgcaatcatctgtgacaaggaaaaatggggaggcaatatgacaattattaaatatgaagccgatacaatcaagaagtcatcaggtgcccataccctggaaaagcgtctgtacgtgagcagcctgctacaagtactccggcgtagggttcattggtgcgcatccactggtcaatagaaagcatgcactggatgttggactacaatcttctacaggacaagataaaacgcaagtcggcaagagctgcccgtaaccttgacaccatacagagaatagtctacgctgtgttttccatttggaaaggactgcgcaaaaaacgggctgacaaaagaaaggggatggctgaacttatgagacatgtatcaatgagttttaccagacttttggctttcttgggccaaaaatgaaaataacagcattttgaataagagataacgtgctgacatacaggattaatcccttgcccaattcgtgatgagttgggtaagggatactatgccgttatttctgtcttaaatgaaagaaccgtgtgcaaagtgaaaagtaaaccgagaaatatacgggaaaaaggagagaagagactatatttgccctttgttataagaagatcttgatttatgaatacattcaaatccatagacgacttgttgcgtgtcctcgaaagggagaaagtcttgatgaagcagatgtttcagaaaagaccttcgacttccttgaagtacgattatgccttggagttgacggagtataaagaggaacggatcaaatacctcatcgactatggtgtcatcagggatagcgggaatttcttggagatggaggacgtgtatctcaagttctttgaagaggtgttgcaggtgaacgagagcatcaacgtatcatttgtggacgactatttgggaaggttgaatgaaaacatcgactactacttgcaagagaacaacgagcaacggaagtacaactaccacaaaaaggtgcggcggtgtttgaagaacattgctatggtgacggtacgtaatgtgatagacttgaaacggaacatcgacaatacgtacaagaacgagccgaattatcccatcaaacttgccaaactgaagaatctcgatgagaagcgcaagaacattgccctactgattaaccgaagcgaagatatcatcgaaaaccagcagcctgtgtttttcaaagtggcgatggatactcagatgcgcaccgtggtgagtgatgtgaagttgcagctgaacgatgcttaccacaacttgatagagattgaaaagcagattatccactacttgaacctgatagcttatcagaaccgtattttcgagaaagtgcgtcgcttgaagtatttgcgcgaccagttcctgttggaagaaaagagcgacatccgtcaacaactgagcttgataaacccggtgtggatggaaccacagaccaactaccgcatcaaactgtcggtggacgagttgcgtacttctgccactgcacttgaacttatcaagaaggttgtctcgcggcagaagaacttggtgagaggtccgaagaacatagccgaagccattccgcaagagttcttggaagcggacagtgaggtgttggatgccgtcaacttgcaggaggtgtacaatgcctttgctgcatcgagcagccacttgttcaggtttgtcatgaactatcgctaccacaaggaggtggataccaacggaaagattctctacttctgccagatagcgtcgcaatatgccgatgggttggattttaccgacacctacgaaacggattgcggggtggagtatcctttaatctattccaaataacattgcaaacggaatgcttatgaaatataccgaagaaatattcaatatactgagcaaaggagggtttatctcctccaacagcgtgtcgcctgccgtgaaacgctactacgatgccattgaagaagagttggcagaatactacgagtactacaaaggaatcggtttctacttggaaggtggcgatggttattacctgtttacgcgacgggaagcgaaggtggatttggaacgtaagctggaagcggcgatgaagtggatagactacctcagtttcctgaaaacgtatgatgctacgttcggtcccggtttcaagttccgtccggcagacatcgaggtgcaaatcagttgccagatggagttgaaagagaaagccgccaaactattctctgataagaagaagtacaacgaggtggtggagaagctggtggcggagttggagaagtcgggtatgatagaactggaaaacgagcacgacagcacgtataaagtattaaccgcatttcactatatggagaacttggtggattgcataacgatatcggaggaactgaacgatgaggtatctcaataaagtggtgtttgtgaacagtgcccacgtgccgtatgctgaggtgaaggtggacggaaatgtgcactttatcggtacgcaaggggtggggaagagtacgttgctgcgtgccatcctctttttctacaatgcagacaagatgcgcctcggtattccgaaggagaaaaagaacttcgatgcgttctacctgccctttgccaattcgtacatcgtctatgaagtgatgcgtgaaaatggtgcttatacggtggtggtgacgaagtcgatggggcgggctgctttccgctttgtggatgcaccgtatcggaaggagtggtttgtgaacgaacggaacgaggtggcggcggattggagcgagattcgtgtgcgtatttccgattccggttacaacgcatcatcgttggtgaccggttatgatatgtttcgagacattatcttcggtaacaaccggaagcctgagttgctgcaattccgcaaatatgccattgtggagagtgcgcattatcagaacatcccccgtaccattcagaatgtgttcctaaattctaaactggatgccgacttcatcaaagataccatcattcagtctatggacgacaatgaatttgttatcgatcttagttactaccgcaatcagatagagactttcgagcaggagtatgacgatgtgatgttgtggatgaagcaagacaagaacggggtagtgcctgtccgcaagcaagccgaaagggtaataaaaggttaccggacgttgctctattccaaaaagcaaatcgaagatggcagagccgaactcaattatgccgaaaaggatgctcgccgaagatttcccgaactggacgaacagatagacttgctgaacaaggaggtggaacgctacacccgtttgttgggtgaagaacgggagaagttcaatcgtgagcgcgacaagctgaatcagcagaagggtagtatcgatgccgatttacagaagataaagagcaagcgtagatattacgaacaagaacgcatcgaagaggtcatcgccaaagtgtgcaaagaacctgcgttgaaatacgaactggagtcgttgaacaaggtgtatcacgaactaaccggtacttacgatgacattatgggtaagtaccggcaactcgaacaaactcttgataccgaatttgccaagttcgataacgagaccaagaacagaatactctatcagaaagaagaattgaacatgcgtatttctgttttacaaaagaagcactacgagcagaccgatgaaatccgcgccgtctacgaagagaagctgaaaaccctgtccgatagcaaagagatgttgttggaagaaatctctactttgaagcaacgaaagacgaagataaaatataccgttcattaccaatgcgagatagaagattgtagtgaacgtctgaatgctttgtctacagaagaaagaaatacatccgtgcgcgtggaacgtatgaagctggagggcgaccgttttcgacagaagtcggcagaggaagtggggaagttggagaaagagtgggaagcgaagatagagatcgttgtgcggcacagaaagcaactggataccgatatagaatcgctacgccatttgatagagaacagcaaaggttctttctgcgaatggttggataagaacaaaccgggttggcaggagaacatcggtaagatagccgacgaaaagcagattctttataaccgacatctttcaccggagttggtagccgatggtggtaacaccttctttggtgtgacgttgaacctgaccgaggtggaacgtgatttgcgttctcccgaacaactgcaagccgaatgggatgccaaatcttcggaaagagatgccgatactcagcaacttgttcagttgaacgaagggaaagagaaggagacggaagctgtaagaaagaagtatagaaagcaaatttctgccctctccgatgagatgcacttgcttgaagtgcagttgcaacagtaccctgttcagcaaaagaacttgcaagcagaacgtgcctctttgcaacggaaagaggatgaatggaagaaagaacaacttgctgaaatagaaattgccattggcagaaaagagaaggaacggcagaaatgtaacgatgcagaagcggtattgaagcaagaacgggagaaacgtatcattcaaatcgccgaagaactgcgcaaagtagagaaacgagagcgtactgccgtagatgctgatgtgcaacttatcgagaaggaacttgccaatcatcgcttggagatgaaagtgcggaagcaagaactgctccgtcagcagaaagacgaactgaacggtaaaggtgcggacactgctgctatcgatacttacaaagcgaagattgacaccatcgctgctgaactggagtatatagccaagaagcaacctttggtgtggagttacgagaaagataagcaagagttgtttgaccgtgagctggatttgcgtgcggagaagaagaacaacgaacaacatctgactgatttgaacgagaagtacgttttgcggaagaagcgactgtccgaccaatgcgaggataccaccaacaagatgcgtacccgttgcggtgagcgagatgctttgaagaaggatatggatgtgctggagaatttccgcaaagacaagaatttctctcctcccgagtcgtacacttcctgcgaacttgccaccaagaagacatgtggtgtgatagtggacgaattgaagagcttgattatatcgttgaagaccgatacggacaatttcaagaagtctgtcaatctgttcaatagtaatttcaccgcaagaaatacgttcagtttcccgcaagcacttgcgagcgatgccgattatatggattttgcttccaacctctgcgagtttatcgacaacaacaagattgccgaatatcaaaaccgcatcagcgagaggtatgtgaacatcttgcgccgtatctccaaagagacaggtgaactgacccggagcgagagcttgatacacaagaccatcaaagacatcaatgaagacttcatcaaacggaactttgccggagtgattcgtagcatcgaactgcgtcccttgcagagtaatgacaaactgatgttgctgttgttggagatgaagaagtttaatgatgagaatgcgttcaatatgggtgcggtggatttgttttcgcaagatttgcgtgcggacgtcaatctgcatgccgtgaaatacctgaatgcatttagtaaacttttgaaagacgaaccgtcgcggaagaaccttgtcgtgtccgattcgttcaacttgcagttccgtgtgatggagaacgacaacgatacgggttgggtggagaagattgccaatgtaggttcggatggtacggatattttggtgaaggcgatggtcaacattatgcttatcaacgtgttcaaagaaaaagcatcgaggaagtttggcgatttcaaagtgcattgtatgatggacgaaattggtaagttgcatcccaacaacgtcaaaggtattctcgactttgccaactgccgcaacatcttgctgataaacagttcgcccaccacctacaacgtggaagactataaatatacgtgcctgttgagcaaagatgcgaagagccacacccggatagtgccgttgctcacccgtaagtaaaaagtgtcgatagaaaaggatatggataaaggaagatttacaccgtctgtggcaaagaaactgttgcgaatgctcgcaggggagactgtgccttcaagttccttgccgcgttggttggcgggtgagttagagggagaggggttactgattcctgttacacacggaagtcgtgtctcttaccgcctgaccaatgtggatgtctgtcgtaagttcatttgcgatacttacacttccggtacgtctcttgaacgatggttggaagttgccgatggcgagcatgcaacgttggaacgcagtatgcttgtgcaggaaacaggaaattccaagtccatcaagttgagaaccttttgcggattccttgtgaacagttacgaacctattgaggcgtggatgggggatgaggctttccttattgcaccatcggacggtgtcgctcttttcattcagcaaccggacgtgttccgcataccgtcggatgtcgtggtggtcggtgttgagaatggagagaacttccgccatatccgtcggcaaaagcacctgtttgatgggtggaaagtgttgtttgtatctcgctatccccggtcgtccgatttgcgtgattggttgataagcattcctaatccgtacatccatttcggtgatttcgacttggcgggtatccatatttatcaatctgaattttacaagtatttaggcgaccgagcaagtttcttcgtccccgaagatgttgaggaaaggttgagccgtggtaatgcccgattgtacgatgcgcagtatctaaagtatcgcaatatgacactgacagatatgcgcctcaatgcgcttgtgcaattgattcatcgttataaaaaggggtatgagcaagaaggatatattcgatgtgtccggtgtgacgtttccgattctgcaccgatagattgaatacattaaaaaaaaaaacaaataatcgtataaatagtatatacaatgaacccaatagacattgccctccgcatcgctaccacagcccatgctggacaactcgaccgtgatggtcaccccgttatactccatccccttgctgtagggttgatggggaagactgacgaagaaaagattgccggttttctgcacgatgtggtggaagacactgattacacgtttgatgatttgctccgtgcaggtattcctgtcggtgtggtgaatgccctccgattgttgatgcacgagccgggaacggattatgacgcctatgtgcaagccatcatcgactctggtaaccccattgccttgcaagtgaagtacaacgacctgcaacacaacttcgcacgcagaaaagcctatcccgaccttcaagccaaacacggaaaagcgttggagagggtgaaggctgctatcgaagagtattcaaaagtggaactttaccacgcatcttcggatgagaatgtagaggtcggaatctttgcgtgtggctgcttttggggtactcaacatcagtttgccaaacaaaaaggggtgaagcgtacgttggcgggttataccggtggtgaagaggcgttcccatcgtatgccgatgtgcgtgaccacaagacccatcacgtggaagctgtcattgtagagttcgacccgacggttgtctcctacgaaagcctctgcaaactcttctttgaaatacacgaccccgcacagacagatggggtaggtacggacatcgggtcgcaataccgtagttgcatcttctacagaaacgaaccgcaacgtcaagtagccgagtacgtgatgcagctgctccgcgacaaaggcgatgaagtgaacacgctgttgctgcccgaaagtcagttctacattggcgaagcgtatcaccagcgttattacgacaagacaggtggtgagccgtattgccatattaggaggaggaagttttaagagcggtatacaggaaaaaggttgcccatagtgttggtacaactgttgaggcttgccaaagagaatagttcggtatggcagatgttctcatcatcagcgacttcaaattccctttcccaaagagcaaaacatggtagcttctaagcgaagaattgggctataaaaggcttcccaagccgtaagtatttcatttgacgaaggtattttttgtctttctatatgcttacgcttatttttattggaaggtacttaacagtagaaaatcggtcgtggaaccagaacacttttgttgaatatacatttgattcgttggaaaaagtgtagggttatgggtgatattcgttggaaaaagtgtaaagaatcggatttattcgcttgaaaaagtgtaaaatcatatgagttgtatttgtttttagccttaatagtaacgtctcaatcctccttgtattataccctgtctgatataattatagtaacgaaacgataaattatacccatactgatataatatcgaatatttgtgctaactttgtacccgaaaaggtataaaatatgatgctatgaataatctttctactacggtcaaaatgttgcgaaagcaatataatctgacgcaagaagaactttcgttgaagtcgggagtaggattacgctttgtgcgagacttagaacaaggcaaagaaacgctacgtcttgataaagtgaatcagcttcttgactttttcaattatgaaatggtagccactcaaaaaacagtaaacaatgagacaagcacatatattttataaagaccaattggctggtattctgacagaaaacgatgctgggtatgagttctgctatttgccggaatacctctctcttgaaacggcaaagtctgttagtctgacattgcctttacaaggcgaagcatatacaagtcctgtgctgtttccatttttcgatggtttgattcctgaaggatggctgttggatgttgcattgcggaatacagacatcagtattcttgaccggatgtcgttgttgctgatatgctgcaaggattgtattggagctgtaagcgttattcctttagaagaaaaggagggaaaccatgtgtaattgtttatattgttatcgtccgctcttaaagggggaaagggatatgcacacggcttgcataaaaaagttcttcggaacaacaacattgcctgttcttgattatacgacagaacaacttgatcagcttgctctgcaaatcattcaagaccaaacctctttgaccggtgttcagccgaaattatcattgcatttgaatgagcatgagggcaacaaacgattgactattgtcgggctatggggcggttatatttgtaagccacagacctcgcaatatgaaatgatgcctgaggtcgaggatttaaccatgcaccttgcagaggtggcacgtattgaggtagttcctcatacgctgatgcggatggcagatgatacgctatgctatcttacccgtcggattgacaggactgctgccggagagaagattgcgatggaagatatgtgccaactgaccgaaaggcaaacagagcataaatacaaaagtagctatgaacgtatcggcaaggctgttttgaaatactcgtctttgcctaaaatggatgttaccaatttctttgagttggtgcttttctcttggttgacaggaaataacgacatgcacttgaaaaacttctctttgtatgaggtggcggatatgatacgtttgacccctgcttacgatttgctgaatgcggctatcgtcaatcctaaggatgacgaagagttggcattaaccttgaatggtcggaagaaaaaacttcaaagagaggattttattaggtcagcagccacgctgggtatagagaatgtgattgtagaacggttgataaataagtatatcaaactattgcccaagtttgaagctgtcattcaaaactcttttctaagtgctgaattaaaggaaaagtatggcgaattgttgaaggaacggcttgcgaggctttctataaaggctgtaaaacggtaaaatacacaatgctatggaggacatatgctaaaagagatgctttatctatagcgcccaatttattagatcaatagtgtgtcagactacttacctatgcatcattatattcttattgattatca

SEQ ID NO: 10739 - DNA, 2142 bp, Unknown
  gut microbiota DNA sequence
gggtaatcgttccgccatttctctatcgtcggtaacccgcaggactgcggggtgtcacgaatcaacacgtacgccagcagggccacgaacagggccaccgccgccgggaaaatataggtaccaatgataaagtactttgaactgtccaccccgtagaaccacgacccgaaccacatggccccgtacacggccatcgggcccacgagagcgccacccacgttatgggcgcaattccagatagacattttcgtcccgcgctccttcacggagaaccagtgagtcatcacgcggccgcagggaggccatcccatcccgttaaaccacccgaccaggaagttcaacaccgccatgatcacgatggaagtcgtgcttgccccgaacagctcgatcggcacggccatgaacatcatggacagggccgccagtaccaaccccaggggaaggaacacccgcgcgttgctacgatccgaaacgctccccatcaagaacttcgacagggcgtaggccaccgcgttcaacgacaacacgatactcagcgatcccttgtcgaacccgtaaggtccggcggggtctgttagaaacggcatcgccatcgagaagttcttccgcacgatgtagtagccggcgtaaccgatgaagattccgacaaagacctgccaacgcaggctcttgtaagtcgagtcgatcttaccttccggtaataaatccttgtgaggtgctggttttaaaaaattccacatgttattagattttattgtaaaaaccatttacaaccacctaataacttaaaaacaagtatgttaataaaattcgattgataaagaggtaatgccttagtagctattctaacttgtattttgtatcataaaaaggatggataaaacctcacaaatttattcatcctttttgttgctcacgacaagcctagattgtcgctgttagttgtttttctaatccagctaatttctgtgaaagaagttccatgtccctgctcaccttctcgttcgttatctttgcataaatctgcgtggtttttatatttgtgtggcctagaattcggcttacggtttcaatgggcataccttttgccaatgtaagcgaagttgaaaaggtgtggcgtcccacgtgaaaagtaagtttaatcttgaatccacattgtttaccgatgtttttcaatatattattacatgaccagttacttggaacggcaaataaacgatcatccccggtttggccttcatattttgcaattattcgtttgggcacatccaatagtcggatattcgaatcgacatttgttttctgcctacgcgtgatgatccataaatggccatccaaaaatgtttgcagattattcttggttaaatttttaatatcggaataggctaatcccgtaaatgccgcaaaaacaaatagatcacgtacaagctcataggatttatttttcatgggggctttcattaacaattgtaattcctcttccgaaagaaagcctcgatccacttgttcaggactaatcatataacctgcaaatggattaacaacaagcaaaccttcatttcgtgcaacagagataatatgctttactccgatcatatacaaccaaattgtatttgtacaacacccccggaccgtgcgtaaaaaatgctcgaaaccgttaataaaagagagatttaattcctttaatgatatatcttcacgattatattctttcagaatgtaagcttgcattagtttataaagattacaatattttttgtacgtattcagggttcgaccgttacctaccttacgagcaaataattcattatgccaagcgaacaacttgagaaacatatcttgctttataccaattcccaaataagcattttttacttgttctgctgtaacacctccacccgcttgtatgatttcttgataacgattgtttattgttacccgaatttgttccaactgccggtttatatctttcgctttctcactttttcccatggctttccctgccttactatcccataattcagggggaacactcattttaagactgaattgaacaattcccttgtttatagttatccttcccattaatggtaggctgttatcacttttgggaacgttacgcttgacgtaaaataacaactt

SEQ ID NO: 10740 - DNA, 150 bp, Unknown
  gut microbiota DNA sequence
acacatcccggtaaattgaatcctgctatctttgcccgtatggtagctaatgcccagaaacatggtaaaaaagatcaggaaagacaatttactgctatgttgaagttatttgatcccgatgcctccaaaccggcgactgaaaagaaaaat

SEQ ID NO: 10741 - DNA, 305 bp, Unknown
  gut microbiota DNA sequence
gaaagacaatttactgctatgttgaagttatttgatcccgatgcctccaaaccggcgactgaaaagaaaaatgtgagggtggcggtaacttcttttttcagtgacaagcctttggtaattgatgataagatacctgccggtgatatcaatgattatgtaactcctactttttatgctcccaatgccagttggttggtgcaacgcaatggcatggacaaacgtcatagtttgatgattgcccaaaatgccagtgaagggaatcacatgcatgccaatggcatcagcatggaactttatggaaaagg

SEQ ID NO: 10742 - DNA, 7959 bp, Unknown
  gut microbiota DNA sequence
ttcaggaaacggcacatatcctgcatgatagaatccaattgggcctccacgtccacgtgtttcgcccccaccggatagaccaacgaattcttaaacgttctcttttctttcatattcccggacatggaatcttcttcaccttttcccttcaacgacagcaagtccaacaactcatcctctctccaacgggattcttcaggaagatttccctgcacatccttagccaatatagctccagccactttagccacataatcattctccgaatgagaaaaacgttccaaatctcccgcaaaagaacgatctccatatgacgacagcattcggatcaccgcccacaaaggttccaatgcagggtaagcccggaaatccttctccagtgcgcccaagtccagtgtttctaaacgtccctctataaattcatacttcacgatcaaatgattgatcaagcaatcatagtaccctttcaaacgataatcacctaacacgtgagccaacaagcgaataaaataaagtaaattcagattctccaaacaaacctcttgcgtcaggtaaagctgcaacagccggatcaactccttcacatacttacccgaaaccccgatagaacgctcgatcttacccgtgttaaacttcccctgtccgtctccgtttttatatttcttgcactcttctatataactgtaaaccagattagcgaccgcctcgtgccggtcaaatcgttccttcgtggcacccagaatctttcctttgatcctccctaccgaggggacatcagtaacttccaaaagataatacccccctctctcctcgctcaccccctctgtaagaggggtcgaaaccaagaaaccactttccgacagccatgtcaaaaaaccgtttttctcactcaaaagcaaggcgttacattgatcgccttcccgcaaatgctccacagccacctgattcagttcctcccagatcgagaactgcaagcgatcatcctccgactcgaccacagtcgccgtcataatatccccgggatgaagaatatctttcaaactatccaaccttgctcgtgtcacctgactgacatgtaaaacaccctgtccatcatactgcgggtccacaatcgtaacgaaagccagcgtgggtttaaaattatgcaccagtttcacccgtatattcacgacagcccccacgggcggccgtctcttctgaatcacgctctttcttaattcatccgaaaagtcagcgagaatacttctccacgcttgggttgtccccaccaatccttcttcaaaactcaactttttcttactgtacccgagtttcaaagcgacaccgtcaatctccatcagcgtgtcaaactttaatgaaaccggagcagcaagcgtgattgctttcgtttccactaacaattgcccgtgtccctcgtacagacgcccctgacaatttctaatcgtgtcaaccgtcttttctgcaatagattccatcaggacaggaatggaaaactttaacaactcctcccatgtgaacacggcattcttctggttaaacaataaagaattaaacgcattcttccgaattacttcatcttccttatcccgtaacacatacaagtacctgaaaaacatggaacgcaagcttgccagttcttcctgcacggaatcccccaacaagatccgggcccctagaatccaaacagcctcctgaatctgatcccgggtatgtccttcaaaacacagcgcatcatcctgttctctcacaagagctacccgttcgttaaaacgttccatcaccctaggattaggtttattcaacgtgttatacaccagtaaaacgagtccccgtgccggcaataaatgcaacttcggactaaaccgaacgatagtcagtaatgttatccacacgagcgatttcttgtacaggtaacccgataccatcaatttctccaacttcgaagtaatatacaccccttcttcccctgcatcaatcaaccggatcgcctccctgctggcaatagcctcatccagataacgttccacctgcattcgggcatcattcagcttgaccccttcaaaacatttcaaacaatcagacccttcaagcatccattccaatatacgaataaaaatatcattcagaagatcataatcttccaagatcatttcctctccccctaactccgcacgcacaacacccaagaaagaaaatatccactccggcccttgttttccaacaaccgtgaaatcataatcgcaaatatactcatcaagaatactcgcctcttctttcgtgagaggaagttcctcgaacaagtgttcaggagatacaaaatccattattcttatttttatttaatgcaaaaaatatttaaacatacactttttggtaaagcgccgcacctcatgacaaaaaatcaatgtctccattccttctccgatgaatcgcaaccatgcaaaagtaacaacttttttctgaaaatcagcacttcaggctattacaattttatttctctctcttccaacatttattcttcctcataaaaaaacattttcaatctcgcccatttttgctacattcgctcacatcaacataaacacaaaaacatacaaaaccatgatccgctacttccaacaacaagacgaagactccgtcatccggatatggctagaagcatctgctatcgcccactccttcattcctcgttcctactgggaaagcaaagttccggatatgcgtaacgaatatctgccacaaagccaaaccctcgtcaatgaagacgaacacacaaacgagatcacgggattcatctccttaatcggcaactacatcgccgcccttttcgtctctcccgaccgacaaggccaaggaattggacattctcttatgactcgtatcaagttacaacaccccgaattggaattaaatgtttacgcggaaaacacgcaagccttgacattctacaaacgccaaggctttacgatcacaagtgaacaaaccgacaaacaaaccggccggcaagagttcacgatgaaatatcaactagacgcttaaagcatccccgacaattcctgctccaacatccccgatcccctcaaattatttctcaaccgtgcattcccatcccggtcaacaatgacatacgagggaatcccgtccacgccgaaataatcacatatataatcccattgtttacgattcaaacgataatgctctccctcgattcctgccaccatctccaaccatttggattccggggaagattcgttcgtgatatacacgaaaacaacatccttatccttgaacttattcttcctgggttcaaaagaggcaatcgccccccggcaaggtccgcaccacgtggcccacaggtctaccatcaccactttccccttataacgggccataatagcatcgaataactttttctcggataccgacggaatctcccggattcgtttttccgccttcaccttactttccgcaactttcgcatcgatctgctgtttcacctgttcaaaagccttcgtgtaataagggtcgatagatgccaggttccgccgttgctctttcgtcaagggtttcatattctccagttgatcataaataccctgcaatttaaaataatcgatcaagaacccttcctggcttcccagtatcttctccaaccgatccaacgaaggaatacggtaacaaacgatatcaaaacaatatgggaaatcacgagcatataacatatccagccgattcacatccaactcttgcaacacggcaaaatgcttatccgtgaactccggagctttgaaatcaatctcccgttgatcccatccgatatgattcgcctccctgtaagccgtctccaaattagactccccggaacaaaccagcctcattacaaaaccttttaccccaagctcccggtatttccgcactccatccggtagtgccttatcattcgccaaacgctccatctcggcccggtaaagcttcatcacgtacgcgatatactcatcggcattcatcccgtttatatccttgtagaaagaatacatagaaaatccatcctcgtactcatcctgcaacgcgtaattcaaggagacaaaccggctctccccaaccacgtaagccaaacgatgagccttcatccggtctttctgatagcgggaagccctccgggtagcctctcccaaatcgacatacacctccacgtcatctcccggatcaagcacaatcatcgtacggaagagcgtgttactcaaataaagccatgtcgtggaatattgatcaaattcgaaggtacagctatgatcctgatcgatcctcttcgacaactccttcccggggttaaacatatcgctcacgaaaagctcgacatcccgcccgtccatcaaatcacgataaccgcataaatgcacctttaccctcgtctttcccattttcaactcagccggcggtaacgtggtcgcttctttccagtcccgggcagacacgtccgacgggatagccacggcagtcatttcaacatccggattcaaattcaaaccccaaatatgccagccccccaggttcatccgactctcgatcacatcgatcgaattcactcctttcggtagcggcgggaaaaacaatttgaacgagagcaatccggtatcacgcatctcaaatttctcattcaacttcaatccttccgacttcaaggcaaaatacttttgcccgttcgccaagatatagatcccggcatccacccgagcccagccaccgggatattgttcgacatcggcataaataaccgtggccgtatcgtttaaaacgatacgggagatttcgagtgacgcagaatttttagcctgaaaggccgggtaatcaatcacccgttccctcggttggcaagcaacgagaatgcccacgaacaggaacatcaagacaattcgacttaattttatcatatttgctattttatcaggtccacacaaaggcctgttgtttcctcgatataaatatacaaatattttaacaaaatacttacttttacggcgtaaaaacaaatatatgccacataatatcacgatatatacagacggagccgccagcggtaaccccggaccgggaggttatggggtcgtactcatggccggtgcccaccgcaaagaattgtcggaaggtttccgccgcaccacgaacaaccgcatggaactactcgcggttatcataggcctcgccgccctacgtttcgaaggaagcaacgtaaccatctactccgactcgaaatacgtggtcgatgccgtcgaaaaaggctgggttttcggctgggaaaagaccgggttcaaaaagaaaaagaatcctgatctctggcgacaattcctcgccctttatcgcaagcatcacgtgaaattcatctgggtaaaaggacatgccaacatcccggaaaacgaacgttgcgaccagctcgccgtagccgcctacaaagccccgaacttgcagattgatgaatattatgaagcagaacagagttctgacgaacaactttttagtgaataggcaaaaaaaattatcaattattagtcaaggagattctaaaataactattttcgcgctacaatctaaaactagaaaaagtaacatcattcatcacaaaaacttatagagatgaaaaaaatattaatcgttggtgcagggggacaaatcggttccgaactggtaccccacttgagatccatttatggaaacagcaatgtagtggcagctgatattagtgctgaaaaatgtaaagcattggcagaagcaggtccgttcgaggaattaaacgctcttgacggggaaggtttcagtgccatcgtgaaaaaatacaatattgacaccatctttaacttagttgccttgttgtcagccacgggagaaaagaacccgaaactagcttgggacatcaatattggagctttaaccaactctctgtacatcgccaaggataacaactgcgccgtgttcacgccgagttccatcggggctttcgggaacgataccccaaaagataaaactccccaagacacgttgcaacgttccaataccacgatttacggggtttgcaaggtaacaggcgaacttttaagcgactactacttcaatcgtttcggtgttgacacccgtagcgtgcgtttcccgggattgatttcatacgtgactcttcccggaggaggaaccacggactatgccgtagaaatttactacgatgccatccgcaaaggttcattcacctgtaacgtgaaagaaggtacttacatggacatgatgtatatgccggatgccttgaacgccgttgttcaattgatggaagctgatcccagtaaattaaaacaccggaacagtttcaacatcgcatccatgagcttcgagccggaacaaatcgctgctgaaattcgcaaacatatccccgacttcaagatggattaccagatcgacccggtaaaacaagccatcgctaatagctggccaaacagcatggatgacacttgcgcccgcgaagaatggggctgggcaccgaaattcgaccttaccagcatgacaaacgatatgttgatcaaggtaaaagaaaaatttgacaaaggattgatcaaataaaaattacatacaaagagccgctttctacaaagtggctctttttcgataaactcacaactatttctttctattgtttttcaaatctccccttcagggagccggactcccggaatacttcgctcccatccccgtcaacacgtctcctcgggaaagatgacctacttgtatacaatttacagaagtttgtacccgaattacggaacgtgaaagtacaccaattatttttccgataaaatatcttatttttgtgagtagctaataacgaaaaacatggaagagatactgaaaataaacagcatggacgactataacaagctattcggactggaaacccgccacccgttagttagcgtcgtcgacttatcacaagccacccgatggcccactcaagcagtcttcaattacggcatctacgcccttttcctgaaagacaccaaatgcggcgacatccgctacggacggcagctctacgactatcaagacggcactatcgtcagtttcggcccgggacagatcgccggaattaacatgccttccggagttcgccccgcggcccacgggctactgtttcatcccgaccttatccggggtacggcactcggacaagagattcgcaactacacgtttttctcctacgaggcgaacgaggccctacacctctccgaagaggaacgccaaaccatcatggattgcctgaataaaatacaagccgaactggaacacgccatcgataaacacagccgacgcctgatcacggctaacattggtgtattattggattattgcctccgtttctacgatcgacaatttgttacccgcaaccaacaaaacaacgatatcatcgtccggttcgaacgcttgctcgatgaatatttcgatggcccgatgccacaacaagcaggcttaccctcggtcaaatacttcgcggacaaggtctttctctccccgaattatttcggagacatgattcgcaaacaaaccgggaagaccgcctcggaatacattcaaaccaaggtcatcgaacgagccaaggaaaatctactttcctcggacaaaacgatgagcgaaatcgcctacgacctgggcttccaatacccccagcatttaagccggatgttcaaacgggtggctggatgcacacccaacgaatttcgggcccagaattgagttttaacacccctcatcaagcgtttctccccatgataccccccttaaatcccttatttcataatcaccacgttaatcctaacggattacttccggatcatttccgaataaagaattaaaatcacgctattaaaaccctattaaaacgctattcagtatagcgttctaatagcgttttacacggtagtgatc

SEQ ID NO: 10743 - DNA, 20817 bp, Unknown
  gut microbiota DNA sequence
attacattttaataaatgcataatttttcattcataaaataaaaattaattatagaatataaaaaggaggtgcctgtaaattaactttttagacacctccccatgactctatcaacaaacctcaaccagttgttacaacgctcgtataagttcaacaatccgttcattattaatgataatcattccatgtttatcattggtaatccccggctctaacttatatgtataagtcggcacgctcccgttcatcactgtgggcaagtaagcaaacgtcacgttatcacaacttttactcaggtcctgcccaacctctataatatgtgtcgatatcatgaaagaacaagcatgtcgcttcgtcagcgcggaagtcactgcaaaagtagcatcgtaagcatccttgacattcgtccccttgaaaagttcgtcaaaaatcactacaagacgctttgaaagactcacctcaattgcgacctttttcacacgaagcacttccgcataaaaatgactgtaccccatattaatattatcaggaacattaatagaagtatacataccgtcctgtaccgtgaaacgcatactacgtgcagcaacagggaagcccatgtgcgccatgtaaactgcaataccgaaagacttcattaaagtagactttccagccatattcgctccggtcaagaagaaaatattcttttgccgggtaatcgtcagatcgttatcgactgcctttcggatacagggatgatgcaaaccttttatttccatagatatctccccgtctttcatcgcttctgcaaaacagaaattatattctcgtgcaactcgcccaaccacggtataaagatctatttccacgaaaagatcaagcaattcctgtaactgagtgatccattcgccacgcaacaaacgatcaacagaaaacatctcgtaaaaacttaaactttggggcggactctccaacaaacgggtaaaaactttattacccaaaagattttgtccccataaaacacgttcttccaaaggattaccggcgatatctttacttacccgcgtaagatattttttcccttcacgcaaaaaagcaatcgtcgcttccatctgccttcgccatatagcaaaatgttcatccttactaatcatctccaacaatctcatcttagcaagggacaacaatttcatcatcccggaagtccggctacctttccccacatactgatccacctcttcaaattcttcgggagaaccgggaaattccaaatcatgcagcttaaaataattaaaaatcaaggttctcctgttaattgcatccgaatccgttaacggattagcaaacatctggtccattagtcgctctgctcctcgggtaaccaattcaccatacaaactataaacggaattattactatatttacctaaaatattcaggtcatccaaagtctgtttatctgtctcaaaactcattgctctcctccctcaccatttataatatcaataattttctcgttgttgataataatcattccatgccgatcattagtaatcccctctgtcaactggtaagtataaactggctttccaccttccattttagtaggaagatacacgaaacgaatattcttgcaccgttctttcaaaaccacccccacctctataatatgcgtggatatcaagaacaaacaatcaggcacgcccgcaaaagcttccgtcacggccaacgtggcatcataagcatccttgacattggttccccggaaaagttcatcaaacacgataacaagcttttttgtttgttgcaattgcataaccactttcttcaaccgcaatacctctgcatagaaatgactataccccatactcagattgtctggcaagttaattgtcgtgaacatcccgttgcgcacggagaattccattgcctccgctggaacaggaaaacccacatgagccagaaaaatcgcgatagagaacgttttcataaaagtagactttccagccatattagctcctgtcagaaaaataacattactattctcatctacctccaacgtgtttcccttcggttttttcaagaatgggtgaaaagccccttttatcttcaaaacattacgttcaccgggacataccgaagcaaaagcaaatcctcgttctttagccactcgtgccacggcaatatacacatccatcaagtaaacatagtgaagcatcttataaaaactatcccgctcctcgaagcgaaatacccgatcataagcaacagcctgttcataatttatcttcttcttacccgagtaccatgcccatttctcattatccaacaactttctcaaattcagattcacctcagccacagctttactatccgagtctaccgtcttactcaaaaaatcattcagggtattcaacaattcgagacaccccaatattccattctgaatccaagtatatcccgtatcggctcccatcagatttttcatcttccactccaaagtattattctgatgttgcaactgactacgcgtgtccgtgttatccagataaaactcaatcgcatcaaaaattgccgcccggaacgggaactccataccacaattctgatagtaatgaatagctgcgctcctattagcaatcaggtcacattccgagaggggatgctggaacatttcttccagcaattttgccccaccccgggtatgtgttctgttaaagatctcgtacaccgatttgtttgccccggcactcaatattgccagatcattcaatgtttgtttatctattcgaaatcccatttatttcagtttattctataactcaatcgcaccaaattttgaaagacacactacgaatcatttgttagttcctctttctacgaatcatcaggattattccccacaacaacaacatcacgggcaataccaccataaaagcaatcttcacatacggcatatccggacgttccaaatgaatcttatcatccggacctcccggacgacgcacgtccaaaggagcttctccataagagaaccaatggaaggtaccagtcaccaacggataattcgccacgggtacccctctctctcccgcaacaccatcattactaatacaactagcattacccagaatcatgattcgttgttcccggtccccaaccatacgtgacaaagccaaagccgtcgggaacatccgctcaatctcgcctaccgcggggtttaagacaactgtatcattcacgaagtcacgagtttccaactcattccagcatcccgtggaatccgtccgcaataattcacgtacgacaaaacccttatccgttgtataatccaaccccacggcatctttcatattcactttaaatttgcgtgtcaaccacataaattcatattgataagaaagctctttcaccgtttccggcacgggatttaccatcatagaattaggaagaatatccacttttctttgcactagagtacccggcaacaaacgcacacccaatggttccacgatcgagttcatgatatcctgtttgccggcaccagccgcaattaacaagttccctcctcgctcaatatatttattcaatttaactgtctcttcctcagttaaaggtttactcatatcggcgataaccaaaatattgatataactcggaatatcagaatctcctgaaatagacacttcctccgtgtcaaacccttgattcaataacgaatggcggaaagttttttctccagcaaacaacaaatagtcccgacggagttgcccggttatggaaggttctccatgtccagtaagaaatcccactttaggcaattccatcacaaaacgcttgaaagtcacaccaacttccgcctcactagggaatatctccacatcattaaataaacgcaaaaaagccttttgcccgtttttccgctctatcaaccgaacaaacacgttcccttccggctctaaatcaataattttctttatttgctccggggttaaaagttgcttaagattccatcccttcttctcggcctcctcttcggctatctctttaatcgtcttaccgggataacgattcattaaccacgggttattagttacagtatcataataatacacgtacttcatcttgatatccggcttaaagcgaagatattgtttgaaacgttgtttatcgttatttaccatcttgggaattccgagataagcgttccgatccaaataattcacataagtcgtaatcgtcattccatcttccaactgattcataatttcctgactcttcggggtcaaagtcatccgtttcgtctccgtcgcatcataaaaacacatcatcatcggacgggacgtgatataaccaatcatacaagtacccgcaatcacacccaaatatttaccccacgtcacactctttggagcatactgacgagttgaattcaatctcaaaatcgccaacgacaaaaacatagccaccacaactgcaaaataaatcacatcctcactacaaatcaaccccgcaatcatctcgcccgaacgaccggaaatacaaagccaataagtgatatcccgcacgaattcataactctgccccacttgattcaagtaatttaaagctgccaaaataaccaatgttccaataccggccacaacctgataagatgttaatgaagacacgaacaaaccgattgccgcataagcacacaacaaaagatacaatcccaacaaaccagacaaagcctcaccccagccaaaattatcgataacgcatccgccaaacaacaccatcacgaataacacacccatcaacactaacccgtacaacatcatagacaaaaacttacccaaaataatatgagtagacgtcaccggagatgcgtacaacaacttgatcgaaccactactatactctctactcatcaacgacattgtcagcaaaggcatgtaaagataaagatactgttgcactaccgtgaacaaacctctcattcctcccaacaaattggctgtcaaaaatccccaactataccctaacgtatttgcctgtgcttgttctccaatcaaatcaataaactgcattcctacctggaacgagaacaccactaaaatgaaccacgcaaccggagaataaaacaacgtggctaactccgcttttgctattttatatattcgtctcataatatcttacttcatattaatttacatactactttcttttccctctcgccgcatttttcgacaactgggcaaacacggcatccaatgaactcttttcaataaccaactcaatcaaaccccatcctcgggtaacgcactgctcggcaacccgcttagccgtatcctgatctccgtcataccgtaaacggaaacgtctttccgacaacgtctccactttagaaatacccggcaacatcaaatcacactccatcggaggcgtatctagttcaagcaacaacgtgttcggctgaatataattatcaaactgctctattgtccccgaaaaaatcatctgcccgttctcgatcatcttgatctcccgacacgtggcctgtacttccgaaagaatatgagtagacaacaacacggaacgttcttctgcgatctccttaatcaaatgacgcacttccacaatttgatttgggtccaacccgttagtcggttcgtccagcacaacaaacttcgggttatgcacgatcgcttgagcaattcccacccgttgctggtaaccaccggaaagattacgcaacacccgtttactgaaatgagtaatcccacaacgctccttcgcctcatccacggccgctttgatacgagtcttatcaaccatatgtaattccgcacaatacgtcaggtactcgtccaccgtgaagtccaaatgcaagggagctttctggggcaagaaacccacgttctttttcgcctccaccggattctcccgtaaattaataccatttatataaacatttccctccgtctgtttcaacaccccgcaaataatattcatcgtggtcgactttccggctccattagaacccaaaagtcccaaaataccccgttgattaatctcaaaatcaatatctcggatagcccactgaacactgtaacgatgagacaaatgttctacttttacaatcgaattttccatacaacaatttcattaaattatttcatacaacgaacttaaacacctcttttaaatacagaccgatcctatgctatcgctaaaaagcgatagcataaaaaagttctgtcattattaataaactgctttacttactccgaatactttgcattagcatttccgatcttctggaaatcaatgccatattcctctaggaaatatttcttcaatatatcatgcttctttttcactagcggataagtcaaataagtcgcccaagaattggactccgtttccgcatgactaatcatattcatcagataatgcctcaaatcattcgtcctcgacaattccgttgttccataaacaatgtaagtacaccaatcatacacggatccgtaagactcttccatatctatactcggaacaaatcctctcgttctagcctctactccagctgtagccttcttggaataatcactcacataataaaattcatctggcgccacaagtgctccggaattaatcaaatgcttcaggaattcctgctgcaacacatttttaaaagatttctccaccgctcccgataatgaaacgatatccttattcaatcccgcaatagccaacgtattcgtggtcaaataaactttataataaatcgccggtctctcgtacgtataggtctgtttaattgaatccgccatcaatatccggtaaggtaaattcttctgcaaaaaatcctcaggataaaaatccaaccagattcgttccattacatccaaccaatccccggcataaacagggtctcccaatatagtcccgtatgaataattagcactactacccacactcacttgagtccaattaaaatccttctgcgtgtactcgtacagaaaatacgaaccatacgtgttgaaaagctccacgatacgatcatccgctgaagattttccctgtggcaattgataacttcctacaaatggaatatccggtcctaaatccttatcatccgagcaagccgtccacgtgcttaaagcgacaagcacaaaaacaaatatctttcgcataattctcttttttatgattattctacaactccttgtcttaaaggttcgctatcagaaacgttctgcaccaattgacgattcttttccatcacactcggagggatcggaagcgtatacatccgatccttttccttcaacgtgtacaccatcttcggggcggtctcactctcctgataaacatgcttgatctctggcataccataacgccgcaagtcaaaccaacgatgtccttcaaaacaaagctccaaacgccgttccttacgaatcgtatccaataatgccacgggatccgtgatatttacatcttcatacccctcgatacgtttttttcgaagttcattcaaatcagacaatgcctccgcacttttatccggcatctgggcataagcctcagctcgattcaaataagcttccgataaacgcaaacactgtctcggttcaccctcaacaccatacttattataaatataccctctaaactttcctcccgcagcataatcctcaataatatacatccccattctcttatcattagccgtatacaaactcaacaagtccgaactaaaagtaaaagcactactaaaactagcgatactacttccaaaaatccataaagtttcattcattgtataactattcatacccgcaaaatcaccgtcttccaaagaagtcagatcactcaatcccttacctaagcgaatagcctccgtagccgcttgtgctgcatcactccattgttccatgtaaagatacacgcgggataataaaaccttcacggcaggaagatttattcgataattccctatcacgacctcatatttctcgaacaaacgtgcagaagcattcaaatcttctaaaatccgttcgtataccttttccacggtctcccggggaccaccgatttcctcgtttacagcggaaaccaacttcaagggaacacccaatgccgtcttattataattataaggttcaccatacaagttcaccaaccaaaaataataataagcccttaatgccaaagcctcggcctgcactttttcacgttcggcttccgtgccgattgcatcaccaatataatccaacacggcattacatcccttgatcctctcgtaaaactggtaatattccgtggaagccaatacaactccttcgttccgtcggaacatatccggctgccaagtaaacataggaaaccacgcctcagcttccgtacttcccaaaacatttcccaccaattcctgtcccaaccagttcatctctttatcatcatccaactgggcacaaatcgccccgggataattagacacactgggataaccgctccccatcagcaactcgctaaaatccgtaaccgttttaggaataacctcatcctgcgattcttcatttaaaaaatcggaacaacctccccacgacaaagtccacaccgcaagaatcacccacttaaatatatcttttatattcatctcttctattttaaatttcaacatcaaaatgccacactcaatgacaacgacatcgtacgcctagtgggccatccacctgtctccggatcaatcccctcccatttcttatcgaatacaatcataaatgggttagacatacttacccctaaactcaaactattagcatgtatggcttgcaaaattttctctccgaattgataattcaacgataattgcgtgcaacgaataaaatcagtatcggctactcggatatccgccaaattatacatttgataaggagttttataacttccggatcccggtaatgccaatgcatctgtccggcctcgtcccggcaaagagggataaatagtctcatccccgggatttttccaacgattcaacaatttccgcgaaacatttaattccggagaaggaagccctttttggccattggatgtattatacaaatccgggatacgtccctgtcctccaaactgcatggaaaaattcgcttgtaaccgcaaattcttataacgaaacgaggttgaaagccctccactaaaatccggttcatccttaccgctataaaccaaataattcataaaattatccgtatccaaatccaaattcttaaacagaggtgttccatcctccgggtcaagtccgtcaaactctaaagaataaaaacttgaatacgactccccgtttacgatacacgtcccattcaaaaaatcatccaacgtattcacccgttcattattcgtttgtttatttttcgtaacagctgtattcactgaaaactgccaggtgaaatccttattccgaacaggaaccacgttcacggttaaatcataccccttattctccatctttgaaccgaaaatcacggaattttgcataccattctccgccggcacatccctggatgacaatacatcactatccttcttgaacatattagccaccaaattcaaacgccccttcaaaaaagacaaatccacgctaaaattccacgtttttgttttctcccagcccagattatcataaggcaaactcctaatgtttaaagtatattgtttatactgcttatggaaaccgccatccgaagcgatcaaataaggagacacggtttccaccgccattccctggtaaccgtacgaggccgaaagatcaagcccgtcaatccaatcccaacccgctgcaaaatgttcgttccccactctccactttaaaccagcagaccaggtaggacggaattttttatccggatcctgcccgaagcggttagaagcatccaaacgggcattaaaattcaacacgtaacgattatcatacgagtaaatgcccgtaaaatattcgctcaaagaattattctcccggttcaccaccttacggtttgtcctcatatcctcataaagatcattatccaacgtagttctcccgactggcgtataagtaagaggcacactcgcgaatccttctccccggaacttcaaatagccgaaagtcttattatttgcccccgttgttttggctgaagttgcttcaatacccaactgcacggtaaaacgatgtacatcattcaatgttttgtcatacactaaactattccggaaagtataagtccgtacggaagtctcctccgtgtataacaaaccaccccatggcaaacgggaagctttttcttccgcactattggccaacacacttccgtactcataccctctcgtttgggtgatataaaacgaattctctgtcgcccaacttttaatattagaagaagacaaatcgtaagaaaacactccctgatattgtaagcctggcaacaactcccaatttaaatccaaagttgcggacaatttctttgaattattcttgtttcctgtatttttccgttcattaataatattataattgtacactcttttcaagctcttgaccgtactcaagacccccattttctcatgatagaaatacgtcccgtcctcattatatgcgggaattacccgagaagtattataagcataattaaacgggttcacaccataagcaaaaccatccgtagtccgataactcccgttaagcataaaactcgtacgaaaagaggaagtaaacctcaccgtcgtgttcgaactcaccgaaaaattagccatttcattcccgatagcttccccgatcgtttcggaaatattaattgaagtccgattagaaatcttatccgacccaccggtcacgctcaacgaatgtgtatggctcactgaatttcggaataaaatatcaaaccaatccgtgttcactcgttccaaccgacgaaactcctctagcatctcactttcggtaatttccttgctattcaacttcgctaccaatccctcatacccgatagataaaatggaagacgggaaagacactctctcttcatatatctcctgtgacaaccgcatccgttcctgtgaattcatctgctcatacaacccataatgaggccgctgtcccacggtcaacgtaccgctatatgaaacagaagttctccctgtttgagctctttttgtcgtgatcacgattaccccgttagctgcatttgacccgtaaatagccgtggccgaagcgtccttcaacacagtcaacgtctcaatatcattaggatttaaccaagaaatagcattggctacaatcgtacgcatgtcctctatatccccggataaatcttcctgcatagcaatcggatcgcgctgaatcaccccatcaacaacccaaatcggttcttgatttcccagcaaagtagaagtccctcttaccctaatcttcggatttgccccaacttgtcccgtattcatacgaaccgtcataccgggaacaactccttgcaacatctggtcaatagaagtcacgccagccactttaatatcatctacttttacggaagttactgctcccacataactacccttattaatattcatgtacccggtcactacaacatcctccaacgttttcacatcctccttcatcaccacgttaatcgtatccttcccggcataaacaatttcctgtgtcaacattcccacgaacgaatacaccaacgtaaactttttcggggcattcggaatcgtcaacgagtactttccatcatgccccgttgctgttccgatagccacccctttcatctgcacagtcacgccgggaagaggctgttttttcgtatcagaaacttttcccgttataacgatcttctttacttccttatcttcctgggcatcccgaggccgcacaacaatcatatttccgttaaaaacgtacgtcaaatctgaatccttgaaaacagacatcaacaccgactcaacggtttcattctccacgtccaaagatattttccccagaggctttacttgctctatattaaacaagaaataaagcttcgtctgacgttgaacctcatcgaacaactcctccacacccacgttcttcattttcaagctcacgcgttcctgttgcgccaaactattggcagacaacgaaagcgtaaagcaacaagtgagtaaaaaaaacagtttcataattactaaaattttacgccatggtcttttaaaaaaagaatggcacaatcgtttttttttcatacatttgtacttaaagttattaatacctcaacaagaaactacgccaaatagtttctgttgtccttaattacaaacgggaagtacgccaaatactttccgtttttattttgatacaataatcgtctttccctggatggaaaacgttacccctgtcgacaaggtaatcgcctccaaaatcacactgacatctttataccgttccatataccccgagaaatgcagttctttcacggaaactgtttgataaaaaacattcatatcataccagtttgacaaaacagcaagaatatcttccaatctctgattttcaaaacggaaaatgccatccttccaatccgtgtaaacggctacatttacatccttcacatcaaccttcgtatttccttgcttaaactcggccatctgcccgggcctgatcatgctctccatccctgacgacaaaaccttgaccccgatacttcccttgaccaatacggtttgaatgttcccttcttggtgagtattcacgttaaaagaagtcccgtacactcgcacctccacgccttccatttctacaaaaaacggacgctcgggatctttggctacctcaaaataagcctctcccgacaaatacactttacgttctttttcatcaaatttaacaggatacttcattctagtagccgaattcaaatacaccaatgtcccatccgctaatcttactttatactcaccaccgcgaggaacctcaagctcgttgaaacggatctcgtctacattttttccctcggaagaagtatataccaaacgatctttttccccggtaaccgttatctccttgtcctccgaaatcaccccttcttcctcttccttcaaaaataccttccgcccgtcatccaaaaccaacacggcttgcgaacatcccggctgaattggtgcaacagacgaagctactatagaaacctgttctgtttcatgcatcaacttccacgaccccacgactaaaatagggaataacaacacggctgcatatttccaccagttcccaatacttctcgaggagactttcctcactcgtttttcaaaaacagagaaagcctttgtatcatggatcttttcataaacatatcgttctttcgaaaataaatcctcttggcaaatttgttcaaataattttctatttcgaggcgcctcttcacaccagtcctctaattcctgccgttcctcctcggtaatatctccaagcaagtatagctgtaacaagcgaacaattctatcggaatattgatgctccatttgataatttttgcaccatatacaaccatgatacaaaaacggggtatcctaaattcatcttttttcaaaaaaaaatcaaaaaagattcacaccaccttataaatcaataatattcagaattattaacaaataatacgacttacctaaccgctcacgtaaaaaatacatcgccttctttttctgtgtttttaccgtttctacagaaagttccaatatttgagctatctcctcgtttttttcgccctgcaaatgcaatttaaacacttgacgacaacgctccggcagttcatccacggcccgatgtaacgcccgatacatctcttcccgcatcaaccggtaatcctcatcctcttcatcctgttcccacaataaaatctctgcatgtcgccgctcaacctcttgatgttttaaataattcaagcaacgatttttgaccgaatcatacaagaatgcccgaaacccgtgatatgaattatactttttatcactctcccaaatagcaataaaaacctcctgcacaacatcttccgccacttcctgttgcttcacgtaacgcagagcatataataccagataacgataaaatgtaccaaataactcacggaaagctggcatttgctttctatttatctggtctataaactcatctggtaacattcccatgtctctctaataattgtttgcccacattacttcatggcaaagctatgatttttcattcaaaaaaaaacaaaatatgccacaaattcaaagaaacataaaaactcccccaaaagtttctatcgattacatgccattttcaaatagggaatcttattacccgttcccattgaccaacgaaaatcgatgaacacctcctcagaataactcttcattactaaaaagataattactacatgattactacgggatcactacctttataaaccttatagataccttatagaaaccttatatgaaccttatatataataaggttcataaagtattttaatagtttaataaaaatattatttcaagtattcatcaggtagtgaccatgttatcacacagaatttttcatagaactccttataaaatttgcctgacatacaataggaactaaaaagtcctgttttgtatccatgaattaaacttgcaacaaaaattattaataatattctttaaagttgaagaaattgtttataccattgtatatatttaggatctgtaagagaatccacaatctcttttccccacgcattccactcttccgttctccccggctccatcgcaagaatattcgcatataaatccgcgaacgggatctcttccggcttcatacctttgcttgctttcttgtattccttaacgctgcaaactttattcttaaacagtttgacaacatttgccaaacaaattaattgttccgaatcctgtaatttactttgcttaatgaatcgaatcattctatctatatcttcaacagaagttcttgcctttgcgttataaagaacctggttaagatcggaattaatttgaaatccaaccagtttatccactttctcggcacctaacttttcacgaaatttctgaatattcgataacaaataattcttcatatctgaagtaatcatggagaattgaggatgatacaacacccaaaactcgggagaagttctctgctcgtcatcaagcaacgcaaacaattccacggcaacaagcgaagttctcggactagacaacttacctaacgccatcaaatatttcaccatgaattcgggtgagcgatctcccatgttatacctcatctcaagtaccccaacggctttattatcatcgaaagtttcgttcacctgtttaatgaaatcaccttgcatgagattagacacccggtgacgaacagccccgtatttatcaagcacaactaccatattgggaacaatgacaccatatcttctggctatattagccccttcaccctcgccaacgtgtattttataattcacaaagaacttattcaagtagtcacccacctctttgctagagaagagtttttcattgataagctttgaagtttgaccgtcgttgtggaaatacaagaacacacacctgccctcgaaaaaagctcgatccatgacctctttcagtgatgccaaatcttcccaatacacaccatcctttcccgacattcttctggaagtaagtcctatgttaataattccctctttgactacctcatctttcacggcttcttgagcccgtaaagcaatctcccccaaccttctcgtctgttctttgccattggcaagcgagataaacaatttcgcaccctcgaatatcattcttttttcagaatcgtcccatacattcaaattggcatcaagaatatccagataacccttttcgtcataatttccccgggcttctgccaattcggtgattttcaaaagcgcctctttacggggtacatcgttagtttcaagcaaagccttaataacggggaccttctcgtatttcttcgcaggtagctggtacacgatcatcatgttcaattcagttataaaagaattatagatcaatttgcctacctcttcttttccgacttccttttcaaaatactcccggttcgcacaaacaaacttcatctcctcaccctctatagttgttgcccgtgagcgtaacaatggccaataagtcgaattcagtttatccttttctgaaagctttccccaaagatcatcgcccacgttttgagccttcaccacctcaccggaaatagaaagcaatctccagtatgccatttgctccgttttatccaatttccccgcctgatacaatgcttcatactcggcaatactattcgcttttaaaccacactcgacgttctctattaactcttcaagaggcatcgccccgacaagtttgtgcatcaatttaccatcagcattaataattaaaaaggtaggatacgcatcgacctcgtactgtttaccgatagccggaccttcacctttctccatgtcgattttcacacaaacgaagttcttgttgaaataatttcctgcagcttcaagcgtgaagacatcatttgccatcatcttgcacggtccgcaccacgaggtataacaatccaaaaatataggcttgttctccgctctcgcttgctcacgagctttctctaatgacaattcctgaaagtttgtttgagcggaaataaccaaggaacacaagagtcccacgaataccaataataactttttcattttcttttacttataacattaattctgtttttgatttctagcattaagcatatttcccagtccgatttgcaaaggtcgatgctcggtatgttcgtagatgtactcgtgtaattttaccactcgcgcatattgttcctccgtcccagaacccgcgataaaaattgtcactggaaaataaaaccaaactaaatcctcaccatcaattttcgggaattctttttcacataacacgagtactttttctattttttccttgttcttgttatctgcccaagcagcacgcaacgcttgcgccaaagatacatacacgtcaagacgtgctcgagaattaaaatgatggggtttcatttgcttgatcactttatccaagtcatccatcttttctcgaccgcaaatcatatcccttaacttcatttcaaaagccatcgagattctctccaatactttttcttcacccatactctcacgaaattggtcgaaatgtgcaaatagaaaatccatcggttccgaacaaatcggggacaaaatctgattatcataaatgtaccaatactctctattcgacttctccgcatccgaaatcactttaaacagttccgcacggacttcttgtgcttctctaatcatttgggccttcaacaattcctgtaaataatttgtcaggaaagaagcttcccggttaccctctccgtactgttttcccaaactggcaatagatgcagacatagcctcttccaccatttttttaaactctaacggatcaatcgtggcaccgacaatttgattttctaacccttgattggtatttaacaacaagaatgtcgggtatgcctgaacattaaactttttctctaggtttttgccatcttcctccgctccagtgtcatatttcacacacacgaaatgtttgttcataaactcgcccaactgcacatttggaaatacatcggcagccatcactttacaaggaccacaccatgacgtgtaaagatcaacaaaaaccatttttccctccgctttcgccttttcacatgcttcatttaatgtcaatttctggaagtttgtctgcccgaaagccagtacagaatacaaaattccgacataaatcaataaaaattttttcatttcagttcattttatacaatacaaaacattcttttttattacagcgattatttcccgatggaagagagtcaaactctcttccattagtattaacaccctataaataaattaataacttatattgacacccctatttcttttaatacagacactataattctatacttagtcatcacggcatcaaatgctccgtacaatgcttcgaactcttctggtgtagaagtgaatatcgcactgatatacataccgacatcttgagtttctgtgggcatattactataatcataaggattcggctctttcaagaaacctacagtccgcggatcggagaacccatatcgattataaaaataccaaccagcacaaccgtacaaattttccgtgtagcaactgcgtgtcgtctgatagaacgctgccaattcttcggcataagcagcaaccggcgtggcaaggaccgcattcagaactgcacctttcatgttttgtcgttccacatcgctcatgtccctaaattcggtaacacgggaaatcagcacggtgttcaatcctttgaaagcctctttacttgttgccgaattatagggcgttaaagatttcaacaacaagaaactgcgaattttaatactctcaggcagaacaggcacgatttcttcacgcaggaattcaagtccatctacaacatattctctcggacacaactcataagacgaaaatggattcggagtctccgtccctcccaaggcagatgagctaaactgcaggatttcatagtgcgtgtaagaattcccccagttatccacacgggtttcttgcccgatcgtatcattatagaacacgggaatccccgtttccacgtagaattgataaatcgcccgatccaccggatcatccgaattttcaatcgtgaaccaatctttaccaaggttggaaggagtcaaattatcttccttgtcacaagccacgaacaacacggacaaaagcaatatataaaggaatttattctttttcataatcaatctctttgaagttctctattcgggcgaatctcgttctgaagctctccccggttaaattcaatagcgtaattcggaatcggaattatccaagccgcacgatcttgcgtgtaagcattcaactcgtaataaccgttttcataccaagtccgcgaatttgcttcataagcattattccggtgacggatagtgaaattatccggaagagggtgaatactattcacggcataacgtcgcaaatcaaaccaacgatgtccctcgaaacaaagctcccgacgacgttcatcgcggataaagtctatcaatgcctcccccgtttccgttaccgatggagctgctgcgaatcgtttggaacgtaacttttccaactcggttttcgcatccccatcccgggtcaacatcgccaaagcctctgccttattcaaaatcacttctggcaaacgaatcaaaaaatccatcccaatctcatcattatcattataatccatccacgtcttatacttatcgggaatagccgcatgtaaagaatttttgaaaaaagcggttctgcgtaaatccccatcactataacatctcaacaaatcctcggatacttggtacgaaaacgcttgctgcgggtaggtataatccggattcggattattccaatcagtcgaagaactcaagaatgttgaaacaacagcattccccccttgcgtgaaaatcgtttcggacgatgtccaagaaatcacgttcttcccatccgtccaactgtttaaatccatcaccgaataagctcccgccattgcctcatctgccgcagcaatacatgcctcatattcttccatatacaaatacactctcgacaacagcgcgttggcagcaacttccccaacccgtaatgtcgaagaaggcacaataccctccaaacaaacagtagcacgtttaagatccgtaacaatctgtgaatacactgcttccaccgagctacggctaaaatatttatcctctatatgctccgtgatttttaaaggaactccggcatcccgtgatgcagtagctttgctataaggcattccgtagatattcaccaacaggaagtaataaccagcccgaagaaaacgcgcttcaccttccacccgattcaacaattcgatatcctcctctttcgaacggaattcatcagccatataaataatggaattcaatactcctatactcttgtaaaaccgttcccaatcattatccctgtactggtcattctccaaagtcaaaaacggatcggaaccccaatgataaaaagaacccagtacattacgcgggtaactcgaagtataagggaatcccccctccacgaattcttcagcatcatcatccatcacgtgcaaccacgggtaattcatggtaagtccactactgaaacccatcgtttcctgagtattggaactagggttcgacgattgcataaaacattcacctcgaagcaattcatccaaatcctgcgccgtggttgcatatcgctggttctgcgagtattcctccaaaaaatcaccgcaagagccaagcccaaaggcaagtacaccgaatatataaaataaaactctttttttcatcgctcaaattttagaaagtgatactaagattacacgagtaagtcggacgtaccgaaagatttacactcggcgacgaaccagactgagtaggatcttgtccccgtaactttttatgggctatcgtgaacaggttcgttcccgtcaaattgatataagctgatttaaggcctaatttcttgcagaatcgatcatccacattataacggaaagaaagcgacgatagacgcaagtaatttccacttaccacccggatatccgaattgtcatacatctcgtaaatattagacgcaattctatgtgtcgagttcgggccactactccaccacggattagaa

SEQ ID NO: 10744 - DNA, 22584 bp, Unknown
  gut microbiota DNA sequence
atcacccggttttctccagcgatttacaaactcccgccgcaaattactcgacggatggggattggttgtcccgtattcagtacataatttcagcaaacgaattttattacccaaactataagccagattaaatgataaaccaaaattccgataccccaaataattcgagattcccccctgcaaataaggctcacgccgtcccgacctttccattacttccaaaaagacatcttcccgctccatattattatactttttactcaactcctcttgcaattcatcctccgccccgtaaaaaataggagaaccgtctaccgaactcaatcctttaaagcggtatgaatagaatgtattcaaaggttctccggcaatatccacgtcaccggtcaacatatcggtatattcaatctcatctcgcaacacgttatttcgattatttatcgcattattcaccaattcgttcaacacttgtcccagctgaggatcaatacgccaaacaaaccctctcttcccgccatccaacccgacacgattgattggagtaaaattcaaactcacctctattcccttgtttacaagtgttccactatttaccacgtattgcgtgattccattaatttcagaaatcgttttagtcaaaaatgcatctcgcgtcttcttataataccaagaaaccgaaccgttaattttgtttttcaaaagcgaaaaatctaatgtcaaattcgtggacgccgtcttttcccatcttaaatcaggattcggataatgagctaccttcgaatgaaattcgccatatttcccagtataatcagtctcttgccgaataatcatattcggagtctggttactcaacatatttccctggtaaccgaaagaccctctcaacgccatgtcatccacccaatcaacagatttcaaaatatcttgcttcatgttccaacgacctgacaacgcccaaatcggcatcatacgatcattcgcccgtgatccgaacaaattagaagcttcccctcgaatatgtaaattcaccatatagcggttgtcataatcgtacccggccatcgcataccacgctaccgaattcgtcaaattttccgtgataacacccaaagcattcgcacttgccataaattgattataatatcccgtataagtctggggaacagaagagaacaatttaccccgatctctatgatatccccggcgtgtgatattaaaaccatcgtatctttgagaattcaattccaaaccggcagaaccactcacattatgcttaccctcgtttcccacgttcttcgtgtaatttgcttgcacccgagccatccagtttgtgttgcgtacatcactcttacgcaattcaccaccgacaggacacatatcattccgttccgtctggtccgcacgcaatttgtgcacgtaataggtatcctccgtgaaataaatctcctgattcgtgttacttaccgcataagataatgttccttccaatttcaaatcgtcaataacactataaccgatatgtgcctgcatattaatcgcacttcctttggttttatccccggaattatccatttcattcaacacgttaaaattatacaccggcatagagccactcgtccgttgataaaaataacgggatccatcgggattaaaagccggaacagcacgactcatattataagcataatccaggacgcctaattccgaagggttataattacgactcgatacattgccttgaagctggaaacgtgccgtaaaacgttcgtaattagccgtcaaattcaatgtcgtcgaataccgcttgttattctccccttttattgccccattttcatcactcatcccaagagaagcataataacgaatattagcagaaccgcccgacaaactcaacgtgtggctatgtgaaaacacatcttgacaaacaatatcgaaccaatccgtgttcaatgtttcgtaatacgaaaccaaccggttatactccttataatcaatcgctccattgtaataatcttgtactacagcctcgtatccgacccaactatccacattgttataatatactccccgctctaccaactcacgggagacatcaaccctttccttcgaattcatcagatatatagctcggtcactgtaacgcggacgccgcgtaaaagaccccgtcccggaataagtcacactgggaggaccagcctttcctttcttcgtcgtgattacaatcaccccgttacctgcttttgccccgtaaagagccgttgctgaagcatccttcaacacgtcaatctgttctatatcattaggattcaaccccgaaatagcatttcccaacagattcacgaaatccaagtcattgatttgcgcaggatccacgttcaccggatcggtcaaaacgaccccgtccagcacccacaaaggttcccggtttcccagaaccgtcgaagttccccgtattcttaatttcggagccgcacccacctgtccggaattctgcataaaaatcataccgggaatacgtccttccaacatttggtcaatcgtgttcactcccgccacttttatatcatccatcttgatggtttgcacggcactcgttaatttacgtttatctatattctgatacccggttctcacaatcacttcatccaattgttctgcagcttcttttaaaaccacatgaattgaatcttgaccggtatattttacctcttgcgtttccatcccgatgaatgaaaaaagcaaagacacattttgcattttgggcaatgttaaggaaaatcttccatttacatctgttgatgtacccaaggttaaacctttcacgataaccgtcactcctggtaacggttgttttctctcatcggtcacctttccaataatacgtacctctctttcctcatttttcacttctcccggaacaataataataacaccttgttctatccggtaagataaattcactttacccaaaagtacatccaatacctgttctaattcctcatcaacaaactttacagacacatctttcacttttttcaattcattatgattgaaaaaaaacttgtaacccgtttgctgacgcaattcttgaataatttccaacatgcttgctttctcaaaatccagacttattttcttttgagagaaaccattcgcggaaactttcaacaatagaaacaatgtaaaaacacatatcaatttcataaccagaaaccatttttttacacacgcctccctaacagggatgccatcatctcgttttttttgcatacatttgtcttgttaatgtaaagattactatattttattaacacattgaccggataggtggtcccaacaccttccggttatttcattttcacaataatcactctctcttttaattcaaattcaacatttgttgtcaaggatataatatccaagataacattacatttattatacttctccaaatctccagtaaatacaagctctttagcttccggattctgataaaatactgtaatatcataccaccgggccaattgcttcatgatctcatccaaacgcattccttcaatgatccacttcccttcggtccacgccgtgaatatatctgtattcactcgttccacgtttatgccatttgtctgaagatcataggtaatctgttctccgggagaaatcgtcttggcatcagccattccttttccttgaaaagcgacactcccttctaccaaggtagtttgcacataatcttcatccgaataagcatttacattaaatacggttcccaaaaccgtaacatctccaccaactgtttcaacaataaaaggatgttccacatctcgagccacatgaaacaaagcctctccctccaaacgaacacgtcgttcttttccctcgaaacgatccggaacatttaattttgaatcggaatttatcatcacgctcgtaccatccgccaaaaccaagttatactcaccgcctctaggtacgataattttattatattctaccgcttcgtcaatctgaccactaggtttgaatttttctatcgcttgtccaaaagcaatagaatccgttaattttacttgttgaccggaattaaataccaacacggcctttgttgttcccggctcaatggatatgtcctccgagacaaatgtcgtttgggattcatcattttccagaaaccagtaaccgaatcccacgcatagaggaaacaacagaattgccgcatatttaacaattgctctccaaatatgtgtttcccgagatttatctgcataaacgacaaattcattccacgctcccttgcaatccaccacacgagtttcttttcccgtgtaataggtttcaaaatatcgttttgctttacgataatattctccattaccctcattttctgccagccatctctcgacctcttccctctcttcgtctgtagcaacatccatgagatgtctcacaatcagatcccaatttatgtgccttttatcatctgtcatgatactttcaattaatcattcatatacaagacacatccatttgaaaaacggagtacaagaaatatgattttctttaaaaatctttagaaacctccttgtaaatattcaatgagtaagaaaatgggaaccaatctctcacgcaacatacgatacgctcgttgtacctgagttttcaccgttgtttcggcaatatttaattgctcggcaatctctttatttttctttccctccaccactttcaataaaataatctcccggcacttatcaggtaacgaattcaaagcttcttgaaggcgtcgatgcacgtcctcatcaataatcacgtcttcggttccggagaaaagctgtgcctcaaacaatttattgttatgctcatccctgattttccgatcccgtatcacattcaaacaacgattccgcaccgaagtgaacaaataagctttcacagaagtggccacttgcaatgctccggcatgcttccataaatggaagaataggtcctgcactaaatcccttgcctcctcttcatcatacaaataactctcggcaaacagaaccattttggcaaaataatactcatagaggtatcgaaacgcctctttatcgcgtttttttatacgagctaaaatcaaatcctcttcaatatccatgagtacattcaaattgtatggacaaatttatgtaagaaaatcgaataatcatgttcactcacgagaataatatgaaaaacaatatcacccaactctctcctaactcactacacacaaacgcataggcccgtttcttttggctttttacggaattctcgctaatcccaagctattccgcaaatcttctacctctttttgggaaagtactgtataatccatccggctctggacgataatccgacaagccatttcgaaaaagagagcccgctcaagcacttcgtcaaagtctcgaccacataccacttgcccgtgattacttaacaaaactgcatcatgctcttgcatagcctctatcaccgcttccgctaattctggtgaaccgggacgaaaatacggtaacacggcaacctcgcccacatggtaaggaacttccaatgtcacgttaaaatctaacggtttatttttcatgcaagccaccaccgtggcatattccgattgaaaatgcaacaccacattcacatccggacgattcctgaaaatccccaaatgaaaaacactttccatggaaggacgtaccccgttttccacttgcccggaaatgatatcacacacggcaactttctccgggggcaaaaccggtagccacgaacctgttccggaaacgagcatcttgtctcccacccgccaagataaattaccactactgcaaagcatcagtcgagcctccccataccgatgggcttgagtcacaaaaatttcaacctgttctttcgtgatcataaacgtatcataagaatttacccaaaagtataagaaaaagaatttccacccaaataaaacccggacattcctgcagacgaggaagtccgggttcataaagcacacgcatttaatctataacccgggcaaagcattcaatatttccaatgttttcccatcagaaggccgcggcatattggcattcaaaaacttaccatcttgatcaatcaacatgaaccgaggaatccccttgcaacgaatagcctccatgaaactcttgtcgcctcccatgtgtaactagattcctcccaactgtttcacttgaacaaatctttcccacgcattccgactatcatcacaagaaatactgacaaaatagatgtttcgcccctcaaattcctcttccaactttttcagatgaggtatttcggcattacatggcccgcaccacgtggcccatacatcaatggacacgtattttcctttcaaatccgacaagctcacttttccccgttatatctttaaaagtaaacggtacggcaggctgtcccttaaacaagaccttatttgcatcatacacacgctgatattccgcaacataatccactcgatgaaccctcttacggaaaattcgatccattccttccgtgttttccataccatatattctcacgtattccatgacactcgtcaccacaaaattctctaccaaccgcttatcccggtacttttccacctctttcaacacgttcattaacaagatacaagcatcatccccccgtttgtccatccagatcgtgaaaagcaaataaggctcttctaatgaatcccagatactcgaagatgccccaagcttcttttttctcaacaaccacatgccttaattctgagcgggatttttctgacacctgtttccctccatgccccatgattacccaaaaagccaactggtaattccactcacggagaatacgttctctctctcgttttgtgaaattcacatctaaccctaagacaactgtcttctttgcttttcgtggtgcagacaggccatttcccattcctttcaattgtcgtaatattgtttccgttcgaggatcagaaggacgtgtcgtctctaaacgcaaacgatcacgccgagaaagcacatgagatatttgggaaacgtcgctattaacaatttcccggtctgacaggcaaggtaaaccaaaaagtacttcctttgccttcctcggaaaggaccccgatctctcctcccagtttacggacaattgtttggcaaatagccaaccccaaccccgttccgttggtaaaactatccaatttgacaaaacgtttgaagatttcaccttgcttttctaccggaatgccttttcccgtgtctgaaacgaaaaatcgcaacccattttcctgctcttcataaccaaaatggatatgtccctctcgggtaaatttaagcgcgttattcagaaaattcgaaatcacctgcatcacccgattcttttccgtgtaaacaacacattcatccatgtgagaagtgaaagaaatatcaataccgggatgctccgcaatcttctggcgataactcatttccaatccccgcagcatctcgtttatatcgaccatatcataaataaattccaacgttcccgcctcaatctttgataaatccaaaatatcactaatcaactgcaatagtaattcattatttcgattaataatggccatgtactcctctttatccttcggatcatccgtgtttacgagcaattcactgaatcccacgatggcattcaagggggtacgaatctcgtgactcatgttagacaggaagattgactttaaccgatcggacatctccgccgcttctttcgcccgtttccattcattggcaacccgggtacgctcggaaacatcctcgtatttcaacacgacaccccgaatctgcccctcgttctttatatcataaacaggcgtggccgtgatctctaccgtgaactcgtcatcaaaagtaacctccttcatttcccgctttcccgtctctaacgccttatgcatcacgcaacccgggcaaggagaatcccgatgcatgacactcttgtagcaacacaacccggccttgtacctgccggccagcggatgctcggaataccgggccaagttctcccattcaatcatgtaatccgggcgaagatacaccaatccattattcgagtgatcaagaataagctgattgatctcctgaattttctccacattttgcttcgcctccatcaaggtcttctcgtacaacttactctcggttatatttcgcaatgtcccaacaacccgcaaaggttttcccgcaatatcctttttctcgatcgtcaaatacaagtcatagtaatcctcatataaccctcgaacatcataacgaacctcccggtgcaaattatctatctgcccgttttttatatccgcaaaaagccgggacatgatttcccggtcatccggatgcatgttattaactgcctccagcgaggactgaccatcccgttctttataaaaattttcattcccgaccttaaattcggaatatttaaaccggataaggtcttctttcaagtcccagatcatcggaaccgtgttcgtaaccgagaaagccatccgcaattgctgattcacctcttgaagttgttcctgtatacgaataagatctgttatatcccagcgagttgccagcaaccaatgatgcacatcattagacaccacatttttattcacgatagaaacgtgtctcccgccatcaggagtctcgtacacttcttgcacttgataagaatttccttcttcaataattttaaaatcgacatcccggtaatgctcgcctcgttcctttccatatacctctatatcagttttaccgataatttcttctcgggaatatccaccctgtaactcacactgtttattccagaaaacatacttcaaatcatcatctatatcttttatgatcagaggcattggcatattgtccagcaccgcattcagcaatcgctgattctgtcttatcgcaacctcgttcttctttcgtcccgtaatatcccgttcaaaacaagccaccaagttttcttgtacacgcttgaaccgcccctcgtaataagttatcttaccatgaacagacacggtatactccacctcgtacactttatccgaaatcaacgcttccctcaaattggatatcacgatgtctacaaacgagggatcaacacaatccttcaaattcctaccaatcaatgtctccaccggtaaagaaagtttcacaggatcagcattataaattttttgtatattaaactggttatctaccatgaaaatcatgtcgggaactgaggcaataaccttttctgccataatattttccatactttcccgtggaatagagatttttctcctacgagaaaaaaagaacacaaggtttcctagaatcactactccggcaataatatatccccacatgacaatatgatttaatttttacgcaatatatcgcaaatataacaataataaatcaccaaacaatcccttcatcgggatatagccgaaataaaaaaccgtgctgataacagcacggctcctaggtacaaattaaaacttaaacttattcacttaaatatgcacgtagcatccataaattcttttcttgctcggaaatgtaaggattaatcatatcttgagttccatcatcaccgatttccgcggccaaagccaatatttcacgttctttacgaatcaatatccccaaattccccacaatctccttcacgcaacgattcccgtcggaaacctccgttacctctttaatctcagcctgtttcatgtaagcggaatacgaatgtaacggggttccttccaacgtaagcacgcgttcagcaatctcgtctaccttctcgatagcatcattatagtattcttcaaatttggcatgtaactcgaaaaagttacttcctttcacgttccaatggaatcctctcaaattctggtaaaaaatctggtaatttgccaacaagtcattcaaatggtttaccaactcttttgacttctctttgtccaatccgattaaatttagtgctttcatattatttgatttttattgttacttctctttatttttctaatacaaatatagaatatgctacaatataaatcaaatcgattgtttttataaatatatttgcaatatttataaaacatgatttacaacacattataattataaaatacaagcatttctctaaaaaaatatcttatgattttcaagtttaccgataacttcatttttttcaaaaaaaaatccatcaatcctttgcagagttcaaaaattgcactacatttgcatccgcaatcaagcaatacgggcgcttagctcagctggttcagagcatctggtttacacccagagggtcgggggttcgaatccctcagcgcccacaaaagaggttcaaaagaacctctttttcattttatcaacttttccacttgagccttcgctacccccattcccttactggaatgaaagtagcgaaatctcaaagcacacttttatcaatattttgacttaattactaaatcgacacattgcgccgagttaaaaaacttccgggcaaaaacgagcacatccttcgctttaatcttgtcaacaatagagtcaaaataaatcggggagtccattcgttttcccgttttattataaaactggagattatctgtccaaaaaacaatggtattataagcgacatcatcagccgatttcttctccttttttatagcaagaataaaatcttccacctcttcatcagttataccttgtttcaaaaattcctgaattcgctcacgtactaaactcctcatctccggcccttcatccagagatgttgcaaaacgaataaaaagctcctgttgataattgggtgaagaagaagttccccctaatacttggacgctatatgcagctccttgatctcctcgaattttttcttgaaaatgatactgaaaatacattttcaaaatacgcatacacaactcttctgtcggattggttttcaatttgttataaaactctatactgactagatatttgcgatccggcatattcacttcaacatctttcgttatattctctcttcgctcgtagacatgctccactgccttctcctttctaaacacggaagaaacggctcccacatatttaatcgtcaactcacgagctttctctctttcaatatcccccaccaaataaaatgtaaaatcagaagcatcttgaaaacgttccttatagatttgaatcattcgattataattcattgccgcatagtaagtagtatcctttctccaaagacgaggtgattccattcttctaatcgaagataacatctcactaatcgtatcgtttagcgtcgcctttaaattcgcccgattcatccgattaattgccacaaaacgattataaagcacacgatcaaaacgaggacgctccactgtcaggtagaacaactgaaaagcaagttctgcatcaaccgatgccccgacaacactaatactctccgaacgttcctctaaagacagattcacatcaaccgtatgatccttcagaaaaaatcctaacgtacgcatatcatacttatacaaaccaccttgcaaaaacaaggctgataacgcatcagcggatggcaaatcctcggctttcagaacagaacgtccaccgggacttcccgccaacatattaaacatgcctttatcaccatccgtatatttataaaagactctagccccgttatccaatatccactcttccgcatccaacgcttttatcttcctctctttcacgatcctccccggcttaatttcgaaatcaattaattcagcattttcctctaccatctgttcttgaggacgctccttttccatatcaaccgaatgggaatcccgaatcatcttttcaatctcttgtgcatccgggaaaagataagtagaatcattaccttgcatgaggaacacccaattatcccgtcctttgtaccaaccagtgatccaatcctgaaaacttttagcagacaacgagtcaagcaccgacaaagtggccgcaagtttctcatcaaccgtacatacaggcctgcctaacaaaaagttatcttgataaatctggagaaacacatcattaggcatactcttttcttgccccatattcgatttcaccccttgccgataattctcaattaaaggttgcaaaacctcatccgcaaatccaaaacgatgtacatattcgacctgctccaatacttgttgcaaagcctccctttcctttcccggtaatgaggtcaataccaaattaaaactatcataatttctcaccaaactagaaatccatgcaccagcccccaaaagataagactctcccgcttctacatattccgttatatatcccctcataatcgaattgtaaaaatctcgcagcaacatctctcgcaacatctcttccaaagaattcacacgaggacgagggatacgtttcactaactggattgaattattaggaatttcattatcaattaacttagcatataaaggctcttcattatcctcaattctataaacaagcctgggtttcggattttctcttttaggaatgacctcaaacaaacgtttcaccgtagcctctacccgtgcgacatcaatatcccccataataatcacagcctgttgatccggacgatagaaatcgttataataaccgcaaagttgctctggagtaaaattttgcactacctctacggaaccgataatatcatgaagggcatacttactcctgttgtacaggtaaggctctgccattttctgtactcgcttagatacattcattctgatccgacgttcctcccggatcactttacgctcccgatccatatcttccggcttcaacatcagaaaaccggaccaatcccgcaaaactaacacgcaagaatctaccaattccgaggatatcgtcggtacatgatcaacatggtatatcgtttcatcatacctcgtaacggcattaaatgtttcaatcccatgtcgctgcaaaaaagccggcactccttccggaaaactttccgtggcatgaaatgccatgtgttccaacacatgagctaacccattttggtcctcgtcttccatcaaagaaccgacattctgcacaagataataatcagcatatcccggttgggctgccgtatggcggatataataagtcaacccgttctttagcttaccgcaacggaaggtattggaatccttctgggcgatagaaaaacaataagaacacaggaacaacaacaatagtaaacttctcataacacactcaaccgatcttgaatcattttctgtaattgcaccatcaactgtttattctcaatctccgcactcacgataaaagcctgattataacactgctttgcctttgttcggtccccagtttctttccaacaatctcccaacagacaaagtacgcgggttctcaacagtacggacatctgcggaaaagctaacgctttttccaaccatggaatcaccttcgggtaagcattttcaggaatattaccttgatataacgagaataaatcttccaccggtcccgtgtaattattaaccgtcaatgtcgagctcgctccttgaaaatatttattcatattttcaaaaaacacatccaaattctttcggtacaaattataatacccgtcagcaaggaaattaacagcttcaaaagcagtaagatccccaaacggtattccaccgtaaacctgattcaggtctccattcaaccgctccagttcctgcttgtattctaccttgccattacgacacaaggatatgatatacccgttatacaaactgataatatacctgttcacgtctgccttccccacctgttccacgtatccctgataattcttcaccaaagcatcaaaaatcgggtcattcttatctttttgctggtgaaacattgtcagtagagtaaaatcctcagggttcaccatcttatccaatgttttatcagccacgtaagcatcgaacaaggattctatacgagtgatccacttttcccggttgtatccctcctgtgtaccgatgaaagccggagcttgcaacaataactcttgccgcaaatccaaatttttcttttccttcttcaccttctcgtacaacttttcaaaactcaaagcttctcccataacaaccttggcctcatgcacaaaagcagcaggctctttggtgccgttaatcgattgaagcacttcccctttcacgttaagaaacaacatcgtaggcaaagcatttatcttgtatttttgtactaacgctttgttctcgggagactcgacatttaactggcaacaaacaaaattcttgttaaaatattcccctacttcaggcaacacgaaaacctgttcccccatcagtttacaaggttcacaccaatctgcataaaaatctacaaaaagattctttttttcctttttcgctttcgccatggcatcttcaaatgtcccttcaaaaaaagtaatctgagcagatgctgttcccagtaatcctaaaaataagattaccaaccataattttatatatttcattgcaattgaatttaaagaaaaaagcgtgtcaaaatccacgaaacggacttcatctaatagcggattttgacacacccgaaaagattagttatctctcacttcaaacgtgaatatatcctccaaaatagccgtatgaccttcattttcaatcttcagagacacggtataatagcccacgggagaatccaccttcgcatcaacatacatccgtcctcccccgataacagtcatatatttagcaaaatcatcggcagcctcctgcccgttactactcttcactctataaagagaatagtgcaacggttcggttcctaacacttgttcaatctgagccgtagtccatggaatatttttatctatttgctcttgaagttgagaaatttgctcccggagtgtatagggatcagctaacccgatattcccgcacatcgaagaaattgtatttttctgagaacggatttttctttctgcaggagctacaacctcatctttccaatacgtatattcctcggtagctttattcaacaactcttggtaatactccttatctgacgccggagcattcagccaagctgttctcgcccgcttataagcttcatacaactcatcccttttgcttgacaatgaaacaaattccttttccaattggtcggtctctgccagcagattttgaatttccggagtatacttctcaaaaacacgttccaattcgttgatattatcttctagagcagaaaaacgtgtaacctgcaaagtatccattgaataagaagcttcagtcgtgtacaaataaccgacagtgacatcattacaacctgcaagcaaggatatcacccataacatggcaatatataaatgtattttcatcatttcctttttcttaaattttattcaaatcaaaagcatatcccatggcctgtacgacaccgttatttgtctgaatatctgtcgacacaaccctaaaactgactgaaccggaattagtcctgatatacaatgaaacttctcccgcttcctctatttgcatataaggttcctggtgagtccacataaatacagatccccttaatgtctgtgtttccatgccatccactttttcccctgtattggcaacaatctgtcctctaggaatatcgttgaccatcaatcgcttcggcacgattaacttgcacaaaatattcttacaatcctcaaccggaatatctatcaccctcttgtacccattttgcaacatgtaatttaggatactcaagtttgttacaccaaagaatgtaatttgctcatgttccccccgtccttcaaacaattcttttaaaccggcatgctcaatcataatcattgtagaatcccaatcatgtggttgtgtatgaaaatattcccacatcgaacaatcatgaaccccgtcagataaccctccgtcgtgataattccattttgtacatgatcctaatgctaacaccataacaaggatcactcctttcaacatatatgttatttttgccattgccaataagtattttgagtcatcaacgtatttttttcaaaagccccgctactaaccggagcgtaaagtgctccattttttatatcttgatctgtaagttcttgaaacttacctctcaaatattttttgtaataaccgttacgcacaatatcaaaataaaattgcccctcaccaaaaagttcgcgtctccgttcgtcaaaaacttcttgacgtaaactctccttatccgtgggtccgtcataatcggtcaattccgcacgggcacgcacccgattcaaatcatccacggctgttgttaatccaagatttgccctgcattccgcacgaagcaaaattaaatcggccaacctccatacaatccaatccccatccgtggctattaccggacgatcctgtacaaattgcgtattctcctgaataattacgtccctccactttgcaatatgcgcgcaaggacttgcctctcttcccacctccacgaaatcacctacttcatcatcccattctgtcagcggataagtcaattcacccaactgataccagaactcccgccgccgtgcatcattttcatccggataaatactttctaccgtttccacgtaaattttcgtatagtcatcccaataatcctccgcgagcaaagcgatcgccgactcgtccgttgtcgtataaggataagtcatcaacatctggcccgggagttcagccttaaaacgagtttcatattgacgatcaatatctatcggatcattatctatacaaaaaattgtctccacgctcgatctcgcttttccgaatacattcgtgatcaacccgccaatactttccaagtcgtacgcaccggcacgtccttcaatcacctccgaagcgtaagattcggcctctttccaatatttttcctcacgcgtcaaacctcccatccaagcgtaaatatttgccaacaacgtattcaccgttcccaagctggcatattgtttggaagtaatctgtttcccatccacatctctcaactgatcataagtcggaagagtcaatgccaattttgcctctttagccgcttcttccagtacttccagggcaggccgtttaccctccggggctatagactcagaacctttagatatgggagcatcaccccaaatctgggcaagccggaaataagtcattgctttagagaaatgagcttgccccaaccagaactcggccctttccttggatatattttcaaaacgatactcattctcgataatcacgttagccatatatatcgcctcgtaaaaattagcccaactcacattcaacaccatactttcctcgggcaaataagtatccggatccaatgtccaaaatccctgataagtccactcaatattatcggcatccaaagaattataaaactgaggttgatcccccacgcaaatattcttcatgtaggaagcaataccgttatgcaaagccttaagttcctcctcatttttgaagtaattgacaaaagtcaccgaatcttccggctcgacagtcaaccaatcattacatgaaaacaggggaacaaataataaaagtattaatattttcttcatgtgcttacaatttaaaagtttacagacaaacccacggtaaatttacgaggtaagggataagaccccatattatccacaccttgggtaggatttaccagttccggatctaaaccggaataattcgtcaacaggaacaaattctctcccgtaacaaatattctagcccctgaaatcttcaatttattaagaacccgttccccgacattataccccaacgtcagttgctttaaccgcaagaaactaacactttcgatatcacaatcataacgtccacttgtttgattcatcaaataagcatatacttgagatttcgggtaatcggccttagaacctgcttccgtccaaattttcacatcattgacatccacgaacaaaggttttgcgctcccatttgccgtcatgctcacatcatcgtaaactttcacgatatgacgccccagcgaatagttgaagaaaatattcaggtcaaaatttttccagcgaagttggttaataaaaccaccgtgagctaaaggtagaggactctctgcaaaataaacatcagcatcctcggtaatcctaccgtccccgttcaaatcaacaagccgacgactccccggaagataaatccctgccgtaattccggaataaagaggttgtacctccttattagccaaataataaaccggaacttcatccaatgaattatagaacccgtctgttttaaaaacctttatctgatgcaaaggttttccgataacctgttccataaaatcaaaaccgtcagcacttttttcaaaacgattccaatttcgtgaagcattgaatttcattttccattttactgccgtgtgtctcaaaatatctgcctccaattcaagctctaaaccttgattggaaatcgccatcccgttctgccattggaattgatggtaataaatatctcccggcaaagaaatttgattcaactgtcccttcgtgtaacgatagtaataatctatgacaagccgcaatcgataatccagaaaactcaagtcaaatcccaaatcatattgattagtctcttcccaacttaatttcttgttaataactcctcctcttatatccgggaacatggctatatccccatgaaaggtggttccattagcagacaataatccttgggacaaataacgttgactgaatttttgaccggagacaccccagctcgcccgtatttttccaaaactcaaccaatagaacggcttcataaacttttcatccgaaaaagtccaccccacggctatagaagggaaagtagcccaacgcacatcttccccgaacacagaagaaccatcgcgccgaagcgttgcttcaaataaatacttttctttataattataagtcaaacgcccgaaataactgttcatccgttcttctgaaaaacctgaagagtattcaaaagcagacacataaaaaggatcagccgccgtacccgtattattcaatccgttagctcctccccaaccagcaccgacataatgaatcttatcattcggcccgttcatcgcttttcctttattattaaaggactggtctttttggaacgacaatcctagcataatcttcaaattatgcttatccaaataattatacgtgtacgtcagcaaattttcattcaaaatcgacaaatctttcgtaatcgtcccctccgaactggaaaaatgtgtataggcatctaaagctcgtggtttaaaggtattctgattctgttgattataatcgattccagcagatactctcaaatttaaattacgcatcaattcgtaatccaatgccatattataacgtaaagaatagctttgatttttctccgaaatttcgttatacttttgaatgattaaatctccgatagctcctcctcccggcaacagagtagaagtagttttggcctcagaactaattccttcaaacttacttcccccggctccagcagaagttcccctactacgatcactgtaagtaagtcccaactgcgtatccatacgcaaacgtttagctggatgggcagttaaatttgacaatacgttaaaacgcttaaaatcagtattgattgcgattcctttctcgtcataataaccggccccaaccatgtaacgcacgttctccgatcccccggatgcttgcaagtttgcgttaatcactcctgcggtcctgtaattttggcgataccaatgcgttgaattattgtaaaaaggattcaaactatcttgtaacaccacggcatcttgaggccccgtttttccccaaaaccagttatacatgggaccgttagtgcttttattggcgtaaacttcttcataagatgtaggaattttccactcaccggacgcagttttgtaaggagcaaccgtgttacgcaaagcatttaaaaaaaacaatctttcgtaccgtcctcctgactgttccggagctttcggcaaccacgatgcagagtaagatacattggcattgaattgtgctttcccggcacgcccttttttcgtggtaatcaaaataaccccgttacccgcacgagaaccgtaaatagctgccgaagcggcatctttcaaaacctcaatagactcgatcatggagggatccaaatcggataaggtgttcgctcctgttaccgaagatgtaaatgcctgcataggcaccccgtcaatcacgtataggggagtcccatactgtctgtctgcaccttctccctccatggccaaagaattatagccacggatagcaaccaaggaaccgccaccaccgggagaaccggatatattactgacctcaaccccggccatatgcccttgcaacaaattctccaaactatgagtcggcaattctttcaactcctctcctttcacggatgaaattgcactgatcacagtacgctttttctgggaaccataagccacgacttgaacttcatccaacccggaaatgtcctcctccattttcactaccaccaacttccctgccgtgtaagcaactttctttgttttaaaaccgacaaaggaaaatactaacgaacctttctcccttggcaagggtaaaacaaaacgcccggcagtatcggttgacgtgccgaacgaggtactgtccaaaagtaccgtaacacccggcattggcacattattttcatcaacgaccttaccttcaatcgtatacacctttttcttttcctcctttacagcacggattatcaccacgttatcatcataagaaaaagtcaaccctaatgaaggcaaccactctttcaatacctgatccaaaggtttattctgaactttcagacttaccaaacctttttgctgaatcatctggttattgtacaagaaatcacaaccggcctgcacactaagctccgtgaaaatagcctttaaagaaacattctccatctccacgtttaccacagcctgttgagaataaacattagcttgtaccgagatgaaaaaaacaaactgaaaaagacaaaacaatttcataaagattaacattttccggataagaataccccgcggcgctcttattcgaattcgacttttttgcatacttttgtttttaagattacacatggtacaacaatcatcttacacatacttgttgtactttacctaaagttggaaattggggaatttccaacttttattttttccttatcacaacatttttcccattcaattcaaattcaaccaaatccgtctgttctatttttttgaacaatccctccacacgatcatatcgcctcaaacgtcccgtgaactccaaagatttaacctccgcattcgcgtaaaaaacattcagatcataccacaaagccaaagtttccataatctcctccaacgtcatctgatcaaacttataatacccatctttccacgatgtatataatttcgtgtcaacaaccttcacttcgaaccggttgtttttcttgttataaacgacctgctttcccggtacgacatttatctgttcctttccattcgttatctgaattcgtccttgttccaaggtcgtctctatcctttcacgctcaggataagaagtcacgttaaaggaagtccctaatacccgaattcggacatcacccgcctgcacgaaaaaaggacgacactcatctttagccacctcaaaataagcctcccctttcaatcccacctctcgctgatctccggaaaaagcaacaggataataaatttccgaaccggcattcaaaaataccttcgtaccatctgtcagcacgatactatactctgagcctctaggaatcataagagtatcatattttacttctagcggaacaacagaatcatacgaataccttaacgtgtaatcagcattggcaatccggatgctatcttcacgaatcatcaccccttgatatttatcaagttcgattacttcccctgtattcagttttaaataagccttagaaacatccatcttttgaagttccccgggaacatcaagatcctcagcctccattcccgatctccagaacatcagcgcaacccccaacaagacagcaacaacagccaccccggaataataccacccgatcctccggtttctctgccgacgccatacctccttttccattcgttcgaaaacaaactctttccgaccaaccgccttttccctcatcaaacgggaactccaaaacatcccttgaagaagttccacatccttttctcccgcatgttcctgcaaccatctttcaacaacctgttgctcttcttccgacacgctctctcccgccaaataagcagctactatttcatgaattttatcactcattattattcctttttccctaaaggaacttaactattcatttcgggtgacagcaggaaacaatttttttttgaaaaataatactagaaccaatgtatcatccgcactgagtgctcgccgaagaaattgaaaagccctccccatctgcgtcttaac

SEQ ID NO: 10745 - DNA, 15462 bp, Unknown
  gut microbiota DNA sequence
attttgccaagatgttcaggatgaagaatcacttcaagattcttagcatggcggtggagagtggtgcgggggcggctaaaggagggggacgaggattgggtaatccatttgttggtaagtcttttgaagagattgatcatatgttcaggatgaaagggcttgaagtaaaatattttgatcctgtgggtaaaaagggatcatatattaattctaaaacagggactagttatttcatcgatcctggacgaatgtataaaaagggttatgaaggaccacatgttgatgtcttctataatggacattcaaaatatgagaaagcgaaattctttttagatggttcacctaaacaatataaagaattaaaaacaaaaaaataaataattattatggaaaaattattgacgtttgaatttgataatgtaacccgtgaagttgaattaattataaacaaaataggagcaaaatatatgatcgatattttagaaaattttatcaataatgataaaaatgagcatactcatttgtttactaaagaatggggtaaaggtgatttaagttcagaaaaacaaaatttagatgagaatgttgagttaataaatcttgtgacagttcgttattttaaggatgatgagtgaaatatagcttttgtttttggaaagttattttaggcgtatagatatatgttaaatcatcgagaagtgtaaaaatgaaaaaacttctcgatgatttttatacgagttaacgagagatagagacatgttgtcacacttcttcaagccagttaaccggggcgtatctttacaagaagtcgggtacgacctggaatgctcattcgagtttcgccgagaaagacatcacgtacgatctgaacggtaacctgacctcgctaacccgcacgagttcaagtggtgttgcttcgtcattgtcttacacgtatgacggtaaccaggtaagcaagataaataacaggacctcgtacgcttatgatgccgtgggaaacatgacggttgacggtcttcgaggagcgagtatcagttataatatcttgaatttaccggaaacggtgagtataggaaatgaaaaagtttcttatatttacacgtcttccggcgagaagctggcgatacgagtcgggagttctttgacttgtatcttagaaaactttatgttataaagttacttaccccaaaaaatacagttgcagtaattgagaaggaaataataaatctcttgtaatttcctaagactggtttacttcactttacagtaaacttttcagggtaatacacggtgtttatccgctgcgtattcgatatacttagggattaaagacgtattaacttcgatacaaagacgtttcaaagacgttcacgaacgtgtttgcaccgaagttaataggtctttgatctatgattatctggtaattcccctaggtgttcatcctttttccatttgataacgggtgataatacttgggggcttgcattctggaattcgcatttcacgacaaaatggtatataatcaccattatttattcttgtagtttttataatcttcgataagtccctcgcacatccaatttgctagagcctgtcggttatcgtccagcaggaaacgttgctgatcccggctgttctggatattgccaagctcgacgaagacggcaacgggtagggattgcttgattacgaacaagtcacgtggggacacggtgccggaaaaaccccgtaggggttggtgtttgtcgtatttccggttgaaaacattttgtagcgtgtttgccagatgtttgcccttggcacttccatcgtaatggtagaaaaacacgtctatttgcttactctcgctccggctgtcgaggtgaataaaaagagcccggcgatagtgttccttgtctttcttgaatagttcgttgattttgtcgcaacgttgttgcagacgtttgacctggttcaagggaatggcttgtcccatacaggtttcccggtcgctgacgtcaaggaatttatcgttgcgtatgccgtcttttgcgtcttggatgatgatgtgtactttggctccttttgacatgaggttacgggccagacggagcatgatgtcataggcgtactcgttctcgtgtaacgggtggccccgtaattctccgatggccccggggtccggtcccccgtgtccactcacgagataaaagcaggccccgtttaactcgtcggaatcaatagtgtattttgccagttcctctccgaatagaggttcgtttccttcattgtttaaaggaggaagggaatatgtgactccgagtttcaggccgttatttttgtccagcttatcccggttcagttcgatgaaacggtcgaaatgaaatgatttcgtgcgattgaaacgttttaaaaattgcaggactccttctcccttgtttgctttggctgtttcctgtgcggtagcgggaaacatgaagataattaggaataaaaaagaaagtatagcgagcgagtgtttcataggcattattttgttacaaagatatagattttgttgtaggtcgcaagtaataggttgtaggtttgggctttgtttcaaggggttttaatatttagtaacttgttgctttagagggtctgaatattttgaaacgaattctaaaaaaagcaataatatagcctgttgacgcaactttttaaaaacgtaagcatctatttaatgtattaaaaaaaacagctatgaaaaataaaacatggaaatttgcacttatttgttcgttgatcgtgatgggttttacagcttgtgacgatgatgacgaatattactacgtgggcggaggtggctcatggcttagttatggtaacctcgaaaaaattgataatgggagccgttccaagtttgccattcgtcgggacgatggtagccggttgatcgtgacggaagggttgcctattaattttgacggggctaaggaagatcttcgggtgtacgtgaattactcgatcgtgggtagcgaacgtgacgagaccgggttggaaggtaatatgaattattacattcgtctttacggggttgatgatgtgttgacgaaggtgccggtaaaacagtcgttcattaatgaagatgaggaagtacggcaagatagtattggtaatgatccgatcaacgtgcgagaagcgtggttcggtgggagatacttgaatgtcgagttccggattccggtaaaagacgggtctaaagagaaacacttcattaatttggtacaggacgacgtgggggctcataatgacacggtgtacgtgaccttgcgtcataacgcttacggtgaaaagcccgacacgggtaacgatcgcgggaattattcctggggtcggggacgggtttcttttgacttgacttctatcgtgcctgagggacagacgtctgtaccggtaaaactactctggactgaatacgggaaaaacacttcagaaacggttaaccgggaagatagtggtacctataccttgaaaaataccggagaaacgggtaaagacgagggattgaatcaggataagagtaaggtggtggcgacagaggatgttggtgaatgtgtggttgaataggtgttgtgagataccgaggcaggtacgcttcaatcctaaagagaaagagccgaaccttgcgggttcggccctttgtcaataaagcgaaatcttgatacagtatttttagaatattccgaatttcaagcctgcaaaataggtccttggcaagcccggaccgtaaatgtaaccggaatcccggaattctcccttgtcaaaatcgtcctggtaactgtcgaacacgttttgtagccccatgttaaattggagcgtgtagcttttgccgatcttgatgtcgtatgccaatttgatcgtggcgtcaaagaaagaatccgtttttttcaacacgtctttttcgatgtacccggcggagtgtcccacgtacatcggacccgtgtaagttccggagagggctgccgagaagcttttgaacgggagcaggttcagcgtggcgtagccgtattggtcgggggaacgcaacagtttgcgacaggcttccacttcggggtctttgctccacgcgacaggtttatcgtatttactactttgcaaggttgccccgaattgtagttgtacggatttgtgtggggcgattttgccttcaaggttaaatcctttcaccacggcatctgagccgttacggcgttccagtattttgttctcgtcatctgattctatttcttccagcacgaatgggttgtggaggctcgtgtagaatccttccagcaggagattgatttgcacgggaccccaggtggtataataatccacggatgcgctgtaactgcgggaacgttcggtcttcaagtcttttgccacttgtattagggtaacttccccgcctacggccgccacgtgaaggtcctcatcgtaggtctggggagcccggaatccttcggaatagcttgcccgcaggcttaaatcggggatcgggttataacgaatgttcaagcgaggactgaatatgggatcgtcgatttccgagtttttatccagacgtcctcctaatagaaagctgaaacgtccggttttccactcgttttgaaggtatgcgctgtacacggagacttcttgattgatttccctgtggtaacctagcatgaggtcgttcagtttgttgtaggagtattctactcctgcggtgagggaagagggcataaacaggaagttgtcgaaatcgtaggagtactgggctccgcccacaaccgtgaagtctttggttttcccgtaagcgttcgtgtcccgtctggcaccgtagtaggattcccgtccgatgttctggatggaagagtacacgttcaggcggtgtttgtagtccttcgacgagagggagtaattcaggcttccgccgtgaatgttgtgatcggcttgttctgccacatcagcctcgtgaggaggtctgtctaaattgtttcctccccgccggaattctttgatgtgatggtattccagggtgagtttactgaaatgagtcggtttgtagtaagtcttgaaaccgagtgttgtactatttattttccccagttcggaaaaaccgtcatcgtcatgatcataagcttggcgatcacgtaccatcccgaacaggtagataccggcatcccgttgctcattgacaatggctccgttgaaggaggttacgttgtcgaaactttccccgtcgatggcggaaagggtatgccctacttggaaaaagttgtacaagggttctcgcgtgatgatgttgattgttccggctatggcgtttgatccgaagagggcagagcctccaccccgtagtatctctactcgttcgaccatgttggcgggtatttgttccaagccgtacactccggcaagcgagctgcacatgggacgactgtcgattaatatctgggagtaggggccatccagtccgttgattcgcacttgttggaaaccgcagttttggcagttgttttctacccgtagtcccggttggaagtttaatccttgggataaacacacggagttcgtgttttcgaatactttgggagatagtacgttgacgataacgggagcttcccttcgatccgtttcattccggtttgcggtaactacggctccgtcaagtagaacggcgtcctcgctgatttcgaagttgacttcttgagtttttcctttcacgatcacgatctctttttcagcacttttgtaaccaacaccctgtactcgaagcgtgtattttccttccggtaggtttttcaggaagaaatgtccggtttcgtccgtggccgtgccgatattggttccttttagtaatatggtcatgaaggggagatgttcgccggtctctttcaggataatgtgtccggtgatatgggcgtccgtggctttcttcgcggtgttttcttcatcagcccaaccgtaaagggccgggcaaagtaatataacgagtgtaaataagtttttcatttgtacgtaattatttgtacctcatttctgtggagtaatgagggttgttttttgttaaagtggggacgattatagtcctttgtatttcttttgggaaatactctttagtttggaatggaattaattacgcgaatgtgggaggagccctgagttggcttaaggtgaaaaactgcttgtccggttcgtctgcttgattccggatgtgataatgtttccgggttacggagaacgagatctgtactattagcgctgcgctaatcagggtgacgaaggtcgttaagtaggcaattaacgtcagctccttgggggagtgcgtgtgatcggctttcccgtcagcatcggcgtgaccgcaaaagaaatgggaatggacaatcgtaaccccgttaaccacgtgataatgcgagaaaaaggtgatacttccataataactcagaaacagagctagcaggaacaagtgtatcagtttatttacattttctcggcacatatccaaatcgtttgcttgacaaatgtagactatttctaaataataagcatgaattttttcttaaaaatgtattaaatgttgccgaagtcaagttacaggttggtaggttacaagttgcaggttattaatttagattttagattgaagaatttgaaaataggccttatgaggctttaattattcgtaaatcactcaatctaaaatctaaaatttaaaatcaatcattctctgtttatcgtgatcgtgtttcccggaagggtggcagtaatcgagttatcgtacatcgccgagcaggtgatggctggaagtaggtacgttccggagtacgctgcattaaagcgaagtttgaaagttttcgattggccttgttttagcgagaaatagaggtatgcccggtcatcccggatgtccacgttgtcggttccttggaacgggttcacgcctgtcgtgagacgttcattgaggaactcgaagccggaggggaacatgaaggttaatgccaattcctcgtataaaccgatatttccggtattttggatcgtgatttcggccacgatgtcttctccttgtttataattgggttcgttgttccgagtgccgttacggtaatagttgaccgccattttcaacccggatatttcgctttgcgtgatcactcctaatggggtagagctattgatggtacgcacgtgaagcgttcccgaagagttgtttttcacggtcacttccgatttattattcttcacgaccaactctttttgcaacacggtttttgtcgtcttgtaagtgtcttttccgatttggacatcaataccattgccatccttgaagtatcgttccacgtagttaccgatagcgcacagaccaaaagcactttcttgggtacttaaccattcgttggatgcgaatttgcgggccattttctgcatgagcttgtatgcctcgtctttcatatccatgttgatcatgctttgcatgatgatagcgttgtcgcggaggtcagaaccgtaacatctgccaagctgacgatatagttcagcttctgccggaagattggctatcagtgctttggcaatcttttcgtgtttgcccaaagcgtaggctcctgccagttgccagcgggcgatcgggttcttgtaggtgtcttccttcatccggttcatggctgccatattgggtttgccggcaagagcaagtacgtagagacgataggattgttcgatttccgagtagtaatctccccgtcgccaagcgtttgcttgtttggccaggtagtcaagggcggagtttttcatggaagtcgggattcgataaccgactttctcggcttgaattaagaagtcggtgatgtacgtggaaacccagtcggaaacgtagttggaattcgaccagtagctgaatccgccgttgcttacttgatagttgcgcaagcgggaaataacgtctttcacgtgcaattctgcggttactttttgtgcctcgctgagatccatgatccggtcgagcatgagttgcgggaataccgcagaggtgatttgctcaccgcatccgtgagggtagcgaatcagatagctgagacgttgttctaggtttagtgcggggatagacgtgatttcgaggaatgaagcgggttccaggccttccatcgtgttgttgaacgtgatggtttcgccacttgccacttcccgtgcgtctacccgggtgaccttgggattcggtacgcggatgtcaacatcacagctgaaatgggctttttccgaaccgctttgtgccgtgaaggtcaacgtggatttaccgatgttttccttgatttttaccttgaaaaatatgatctgttctcccgtaccggagaagtgagcttctttgcttgcgggttcaatgatttcgattttatcatcggttttaatgttcacggtaacattcttgatgttctctttcatggcgaacagggtcaccggaatttcgatcacgtctcccggggtgaacaggcgaggcatcgtgacgttgagcatcaacggtttgttgactttggtactttgcgaggcggaaccataacgtccgttgtcttcggcaataaccatcgtacgtacttccccgatgtattcaggcatccggaaggtgtgcgttttcttttctccactcttgatgctaaacggacctttaaagattaccacgggggtaaaacgatcgcttttccggttttcttccggttccagagattcgtcaccacccacggcaaacgctttttccaagcgtcccccgaaggctccgatgacatcatcgtagaaatcccaagttttcactccgagggcctctctggcataaaatgcggggaagggattcggtgtcttgaaggaggttagggacaacaatccttcatcgacaatggcaatggaataggtcatcggttttccgtccttttcactcacggaaaccgtgaaatcctgtgatgggcgaagttcccgtgccatatcgatcttcggggtcaggcgtaaattaggatcatcaatattgatgttcagtacaccgtatagacggatcggtttgtcgttgttccggttcttgtggggttgtatgagggagacattgacataaatgttaggacacatttcactgttcgcatcaatctcgaaagaggtggagccggcagatgtgggaacacggaatatgtcttttacggttttcccgttttcaacgctcacgagtgccacgctaccctcggaagaagggaaggtgatttttattttctccccggcacggtatgcttttttatcgctggttaaggtgagtagggaggccatccccggaatgttcatgtcattccgccaagagcttacgtagaaggttgttccacaagagtggccggagaatttgtctctagcgatcacgtagtagcgtccccattggttgcaggtaacgtcaatattgaatttaccattttggcttttcacggttttattgaagaccggtttacggtaggagcggttcacgtatgatccgatgttgtccctttcggaatcccaccaccagcgccattccaatgtataaacttcaacttcgatttccctgtcagaaaccggctttccgtcggccgtaagcacggctcccgcgatggggatcggtttgccagcggagtaccagttatcctcggaatctgggagtttcacgccgacatattctttataaggtgaatatttgaatccagctgtcgttatgctgaagtccccgccgggttcgaatacccgcagcgtgaatagtgcattcaacattcccggtgcgttctccgtgctgatttcatcggccgatagggtaaaattaccctctgcatcagtagttccttcaaaaaaggtcgttgtggttgagttaaaataacgggatcggtcatcaaaactatattctttgtatcccgggaacgtggtgttactctgggataactttaattcggtgttgactttcagcgagctggttttggctccatgcaaccaacgggtctgcacgggaatggaattatctgggataccatttcctagaatgtcattcggtagattggtcacgatactgaggcgattcggtttgatactttcgatccggacggttttccagaaagagactcccccgatacgtacaactgcccgccagtaacccgtgacggcttgctcgtctgttttgaaggtgaaacaatagagaccgtgttcgttacgtccttcccgtttcgtttgtaccacgttaccattcgggtcgtatagttcggcaataatggggtgtcccatgggaattgtcttctctttgtcttccagcatgaaagagaggtgtatttcattccccggacgccacacgccccgttctccataaatgaaaccttttattccttgttgcacgacttcgccactgatgtcaaagttgctgtatgatagagaatttgcatcgtttacttttaaataagctttgtcgtttcctttgacggcaagtacgatgaacggtttcccttgtactcgggcggttacgattcccgaattgttggttacggcagaatcaatcttctggttttggtaattgaagaagagtatcttgcaattttctacaggtgcggccgtgagcaggtcgttcacggctaccacgtatttaccgtcacttccggttttggcagtaaggccgagagaggtgacaatcaagtttcttctggggaaacgatcggacacgtagtaataggagttggaacagggatcatcccgttcttcccatgagtagtcggacgggtaattatagtagtaatcgtcgtcatcataattgtcgtcatcaaaggaagaatcccaatcgttttccgtgatcccgttttgtccttcattagcgcaggcgagggtggtgtaggatttctggaatttcagttggatccggtagatcacccctttctccagttggatatggtcagccaggtttattgtgtagtcctgccatttgttagcgtctatcgggtgaccttctttctccagtgggattttcttatccaggatgatgcgtcccacccgacgtaacaggtaatcgctactgtaattgtaatcaccgtcttgcaggtagaagttcatgttctggttgaatattttcacgacatgtaattgtacggctttcagggctaccgcggagaagggaatcagcacgttgccctcggccggggtaaatgttccctcgccaatgaaggcaacggcgggtttggcagaagcgaaactgacgttgtaggtggcatccgatttcaatttttcaccgaacgagtttttgatgcctttatagatatttacttgaacgacaccttgcattttatcccgttcgttggaatatactcgaatgatgtttccttgtgcgttaaaattcaagcgattcactccatctacggtgattaatccctgtaaatcctgagaggcatccacgttgtccgagagggttatgtctatggtctgggaattttcatcgctcgctttgacttccagtatggagaatattttcgaacctgggatctccacgataaggtcgttaccgttctttacctttttatcgaaacttaattccagtgattgtgtttcatctgtccggctgatgtccgggatggtgaagtagtggatgtagggtgtgtgttcccattctagtctgtgggacaagccattgattgttgctttcacaagtaactctatttcggagggggccacggcatcagaattcgtgatggaggcccggtaggaaaatctgttgttatccgtggggtcgatgttcaagctaccttcttggaaggcaaacacgagaggaaggactttcacactgaaacggaaggttgacaagtcggaaggaactttgccgagtttatccaggtagagactgatgtcgtatgtttgcccgttttttagaggcttggtgggggtaaactcgataatgttaccgtcccgtagagatacggttccctctgctttcggggagatctttaatagtttttcgatctgcatgggaagactgtcccctgcctgtagaacgttattttccaaccgaacatagatcgggtcggaagattttatcattccctgtgtaaaaccggaaatgtatttgctatactctagcttgctttgttccttggttttatctttgcacgaaaggatcgtgatcatcagtaatagtaaaggaaaaagaaaaattctttttttcatgctgctaatgtttattttatcgttaaggcaaaattaaataaaaaaacggtataggaacttattgttcattttaaatttatatttttgcgaaagtgaaaaactggaccctaattagggagataaaatagataatatgagaatagctgttgttggaaccggttatgtaggacttgtgtccggaacgtgtttagcggaaacgggggtaacggtaacgtgtgtagatgttaacaatgccaagatcgaattgttgaataatgggggtatgcctatttatgaaccgggactggcagaattggttacccggaaccgggaagacggacgcctctttttcactacttcgttgcgagaggcattgaaggatgcggatgctgtttttatagccgtgggaaccccgcctgatgaggatgggagtgccgacctgcactacgtgctggacgtggctcgtgaaatcggggagattataaatgattatattgtcgtggtgacgaaatcaacggtacccgtgggaacgaattacaaggtgaaaggagtaattcaggctgctttgggaaaacggggagtggacgtggcatttgacgtggcttctaacccggaattcttgaaggaaggggatgctgtgaatgattttatctctccggatcgcgtggtgattggggtggagagtgatcgcgcccgtcgggtcatggaacgtttatatcatgcttttatattgaataacactccgatttatttcatggatatattatcggcggaaatgactaaatacgcggcgaattcgatgctggctacccgtatttcgtttatgaatgacattgctaatttgtgtgagattgtcggggctgacgtggaagccgtgaagaaaggtatcggtagtgattcccgtatcgggaagaagttcctgaatgccgggtgcggttatggcggctcctgtttcccgaaggacgtgaaagcgttgattcgcacgggggatgatcatggacatagcctagagttactgaaagcggtggagcgggtgaacgagaaccagaagagcgtgttgtttagaaagatcacttcacacttcgggacggatttgacgggaaaacgttttgccatgtggggattgtcgtttaaaccgggtacggatgatttgcgagaagctccttcattggtgttaattgataaattagtgggggccggagccgtggtacgaggatttgacccggtggccatggaagagtgtcggagacggataggtgatcgtattgaatacgcggagaatatgtacgatgcgttgaccgatgccgatgccttgatcgtggtgacggaatgggccgaattcaagattcccaaatttacttttatcgaaaaagcattaaagcacaagattatatttgacggaagaaatatatacagtccggaacagatgaaagaattcggttatatgtattatggaatcggacggaaagacaattagcaattgaaaaatgaatggatttatgatttgcgacaaaaaagtgtcaggtttgtgcgtggaaatctaaaatctaaaatcaataaatctaaaattggaatggttcattatcgaatattgtttatcgtgaatcctatatcggggtttgggttggggtgggagattccttaccggataaggcatattgcggcgtacaaggatatcgaatacaatatacgtttcacggaatatgccgggcacgcgaaagagatcgtggagcaggccaagcatcagaattatacgcatatcattgcggcaggtggagatggtacggtaaatgaaatcggtactgccttgataaatacgggaattgcttttggtgtgatctctttggggagtggtaacggctttgcccgtcatttaggtttttcccagatgatgaataaagcgttgaaacagattttgaaaagtgaaaccacagatattgatgtcgtggagattaatggccattactcgttgaacgtgagtggtttcggctttgatgccgaagtggctcacttttttagtaggatgaagatccggggtatattctcttacatctattcaatcatacatatgtggtttcgttaccccagtaagcgttacgtgtttcatatagacggaaaaacgtgggaggaagattgcttcgttttgagtgttgctaatagttcccagtatgggaataatgcctcgattgccccaaaagcctcgttacgggacgggttggttgatgtttgtattctaaagaggccgaaatattatcaaatacctcgtttcctctattgctttatgaattccaagatcgctcggcttccttattttagcgaaatccaatgcaaagaggctattttggaaggagacttgaataaagcccatatcgatggagacccgtatattttggaatctccggtaaaggtaaaagtacttcctggagtattgaaagtgattgccccaaaactatccaggaagaagaaaaatatgacagtttgatttaatctaaaactacttgtcctgtggggatagggcaatctgtttctcgataagctgatccaaagagatgaatgtttcggttttagcgataccggggatgttttgtaacgtgttgatcagaatatccatcaagtgctggtgatcgttgcatcttaatttaatcaagaaggtaaagccgcccgtgatgaagtgacattctgtaacttccgggatgctttcaatctctttcacgacagtcttgtaggtgtgagcgtggtcaaggataaccccgataaaagcgcatactccaaaaccaagcgcgtcgggtttcacgataaaacgggaaccttcgataataccggaatcttccatctttttcacgcgttggtggatggcggctccggatatgccgcattcccgggctatttccaaaaagggaattcttgcattttttacaagatgagacaagatcttgcgatcgatgtcatcgatttgatattttacactcattattttctttttacctgttaaaacttaatacgctgtacagttgtttacgctgtttgtaatattgccatccatcttcgttcgtgatggttttgattaccccgtcaatcaaattgttgaaaattgtagcgaaatcaaagacttcgggaggatagatttcttgattgtgaatatcattcagtttggcaatatacatgcgggcaaccatttcacttgatacgtcgtttttatacataccttgttgcatccccttttcgatgttaattttaatcttttcatagataaaattggaacgttccagtttgtgctgttcgaatagttccgggaacgcctcggctaatttg

SEQ ID NO: 10746 - DNA, 12157 bp, Unknown
  gut microbiota DNA sequence
cgtgttcgcgcactcgaccaggatattgaactttttcaacaacaggagtaccaacgcttccgccgagtctttcaacgccaagctcaaagacttcagggctcaattctggggcgtgcttgacattaaattttttctctttagagtcgctaagatttttgcatgaaaagaatgaaattcaaaacaagaagaaaacgaactccaccttatttttcacgtgagcccaaaaaagggaaggggatacatgaaattacatcaagactttttccttcttttttgattttccatttcagctattcttcgatactcaaagactcgatcttcaacaaacgttccctaagacgaggcatatctttctgcctgatagacaaagttatctcacattccatctcaaaatttcgggataaaatgtccggttcttcttctttcaacactttcatcacgtcattcatcacgacataagtaaaacgcacgtgaataacttcatctacggtacgctccacgacctcggcatgattgatcgcatcagcggcagcttctttataggcttgtatcaaaccggagacccctaacttaattcccccgaaatatcggatcaccacgataagcacgttggacaagtcattggaaataatttgcccgaggataggtttacccgccgtagaagaaggttccccgtcatcattcgcccggaagcgctcccggtttgctcctaggcaataagcataacaatggtgtcgggcatcataatatttcatcttaagcccggtaacaatatctttaatctcttcttcggatttcacgggataaataaaagaaataaaacgactgcctttttccttgtacaggccttcggcaatcgcatttacagttctatatttatcctcctccataaaggaacgtgataattagttacggcaataaagtttcttttggagttcctccacttgagccttaaaagcacgatcggtctccatcaaatcagtaacagccttacaagcatacaacacggttgtgtggtccttcttaccaatttgtttaccgatgtatgccaacgatgcattcgtgtaagtcttgctgaaatacatggccaactgacgagcctgaacaacttcccgctttctcgtcttctcctgtaacatttcgggagccatgttaaaatgattacaaataacctgctgaatatgttccacggtcaactcaactttctgattcttcaccattttacccaaaatatccttcaccacatcaactgtcagatctttatggttaaatgtagcctgagccagtaaagaaatcattgctccttccaattcccgcacgttattacttacatatttacagatatattccaatacctcatccgagaagtcaataccatctttatgcgccttaaaacgagcaatttccatacgagtttcaaaatcaggagcttttatttcggcagacaatccccaacggaaacgggaaagtaaacgttcttccaaaccactcaattcagccggtgaacgatcagatgtcaaaatcaattgttttcccgattgatgcaagtgattaaatatatggaagaatgtattttgcgtggcagtcttaccggccaactcatgaatatcatccaaaatcaacacgtcaattaactgatagaaatgtaagaaatcatttatctcatttttgcgtacggcctccgtaaattgagtctggaaaacattcgtggtcacgtacaacacgaccttgttgggataattttgttttacctccataccgatagcttgagccaaatgagttttccccaatccggacccaccatatattagcaagggattaaaagccgtacctcccggattttgtgcaatagccacggcagcagactttgccaaacgattacaacttccctcgatataactgtccaacgtgtaggaaggattcaattgagggtctatctgcaaacgattattattacgctcaaaaggatttttaggggcaacacgatccggtttaccattcacgtataccgtgtttggttccacctttttcatgttattggaaggcatcgttacagaaagagggtcacgaggatggctctcttctactacaaccgaatattcaagttttgcattcggaccaatagcggtacgaacagcctttctcaatatatccacaaaatgctcttccaaacattcataaacatattgactcggcacttgaattgtcaacacatcatctttgaaactcaatgcacgaatcggtgcaaaccaagttttaaacgttcttggtaacacctgctccttgatcaagtctagacattccgaccaaacacttttacaatcccttttcatttatctattagtttatatccctatcttatttctaggaaatggaatgctaaattcgaaaaaaaatcttggaaaaaaaatgatgctttcacttgttttttatcgattcttgcttacgttttagatatcaatattttagagatacatcaatgataaccaatactttaatccaaaaataattcaattaccaatcgtcttttttacaacaaattcttaacataaacgcaatattctaattgacctatcatagggataaagctttagcacctaaggggaaaaaatgaaatacgctattttttttgattcttaaaatctgatttttatgttaacaaaatccagtctcctaaaagtattatttagaacaattctaattttcaaataaagtcaattttaacaatataagcatcattataacgctttataacatcgtctaatttcctttgggcaggtttcaattttttgtagctatcaatgatgtaaagatatttatccttatacttaacctccttcaatccaggattttgcatatacaactcagaattaatatccaatcgttctaaagactcgaaaatcaccacgccatattcttcaagagcatttttccctgaagaaaaatcaatcagagaaagatttataaagcgtttcggattatacctaaactcaactaataaacgattcaaattttcactcacttgattcaaattataatagagatcattatcatttaaaagagcacctatcgttccctctcctctatttattttattcattattgaatcggttgtagccaaaatataatccaagctcatcaacgtctggtgtaaacttgcttgtcgtaaagaatcgcttatcgcagatacattacccaaaatattagaaatctcttcgttattatttctcaaattacccgtgatgctatttacatcctgcaagatagaactgattctcgcagactccccttgtattaaggtatccaaatttcccgaggctccctccaaattacgtaacgttcgatcaatacttccgaaactattacttaaattcttttttgtttcctcattaaacaacccttgaactattaacagcacggaatccaatgatcccagcaaacgctcggctttctgtttcaatggcaacatttgctggctcacctgttccataagcccacgctccacctgggaccgcaaggtatccccacttaccgcaaacacgtgggaatctcccggtactaaagcaacaacttttgaccccattaaatcagcactctgaatcatggccaacgtgtttgatggcagctccaaccctttatccaccgagaacttcacgagtacccgatcgaaccgttctcccgtaaactgaatcgaaattacttgtccaacctgatatccccggtaaataacgccactagacactttcaacccttctacactatcatacacgccataaaatgtacttttggattcaaacaaggacgaacctttcaagaaatttattccccaaatcaagataaaaaccgcagccaatgcggtcaaggctaatttcgcttctcttcttattttcatgagtattattttattccttcatttattttttctgttctaactttcttgcctctactacggtaatttgttttcctttatagacagcaataataaagcaatcccttaccgttttccgaacttcttgttgaaactctaacgctttctcgtaactcgaagttttcttcacgtaataccggtaacggtctgttccctttagctcctccaccttatctttcaatttcagatatcgaagatcttttatttgtgtcttggaagaggcaacttgtatagcataaaacaaatcattcttaccagaaaccgttacactcttctctacttctttcttttctaccgtggaagttttctggttttgcttttgcacctgcggagtctgcttttgtatcactttttgttcatcctgcccaccggtcaacacgacactgttacgttccacgttattcttataggcctgaaaagccgtaaatatagcccgggcaatattcgtttgtcccgattcagacgttaaaatcttttgatcattcggattcgaaataaaaccggtctcgatcagaacagccggcatccccacgtccatcaacacgataaatcccgcttgccttacttcccgatccggcatacgagttctagcaattaactccttttgtataggtgcggcaaactccatactattcttcaaatggctattcttcaaaaaattaaacatgatatatgactctgcctttttcggatcaaaaccatcatatttcacagaataatcctcttcgtaatgaatagcctcgttctctttcatggcaacctgaaaactggcctccgacttatgcaaccccagcacgtatgtttccacgcctcttacgcttgatttagaaaacttgttcacatgaatggatataaataattgcgctttggccttattcgcaatccgtccccgttctctcaaatccacggcgacatcttttgatctcgtgtacacaaccttcaaatcaggataggcactcttcaccattttccccaatttcaaagcgattgccaacgttatatctttttctctcagctttccactgatggcccccggatcttttcctccatgtccggcatcaatacaaatacaattaattttacccaaagcctcttgtgcaatcaaagaatttgaaccttctaataaaaagattaccaacaagaaacatatgaacctgcactgatttatcatgtatttaaaactttttaaaaagaatcatgagcattaacaaccattatttcttacatttgcaaagcaaaaatgcaatatgcgtgatgcaataattagtcacaaaaataattataaaattgcaagttagattatatacagggctttttattaagaaatgtatcattttaacaatgatcgccctgcccataatactctcatcgaatggcttggcgtccgagattattttcggacaaaatctctttatcacggccattgacacaacgggacaacccggtgatagcattcgtatcgtttacgattctgcaggaatcccgatagacactattcgtaaggattccacacaatccaaacctctattcgacgacctgatcgattataacgcagacgattctgtcagattttcaatacaagagaaaaaagtatatctatacggaaatggtttcgtgaaatacctcacgacagagttaagagccgattacatcgagctggacatggataaaaaattagccatggcaaccggagtacccgattctgtcggcaaattaaaagggacacccaaatttaaagatggtggtcaggaatttgaaagtactgaattacattataattttgacacgaaaaaggggtacgtaaccgagattatcacccaggaaggagaaggttatattcaagggaaaacgaccaaaaaaatgagtgactccgtctattgcgtgaaacacggtatgtacacgacctgcgacgaacacgaccatcctcactttgggctaaacatgagcaaggcgaaaatgatcaaagacaaaaagatattcgtcggtttcaccaatttggaattggaaggaattcctttaccgatctttatccctttcggcttttttccgatcacgaaaaaagccacgtcaggaattatcatgcccacttacggagaggaacgaatgagaggatttaacttgaggggggggggatactatatttatatcaatgactatattgatatgaacatcaccggggacatttacaccaacggttcttgggggttacaatacgcaacccaataccgtaaaaggtacaaatttaacggaaatctgaacttcacgatcagtaaaaactatgtcagtgaaaaggggttgcctgattatcaggaatcatctgactggtctgtacgctggacccacacgcaagatgggaaagcaaacccgtacagttcattctcagcttccgtggatatgtcatccgctaataacaactactataatgccaacacggtggacggaattgccaaccaaagaaagcaatccagtatttcgtggagtaaaaaatggccggaaagcccgttcagtttgagtggttcattcaatcatagccagaatagccgggattcctctattgctataacattaccgaatttgagtctccgaatgacacaaatctatcctttccgtaaaaaagggaaaagcggtgaaatgaaatggtatgataatattggtgtatcttattctgctgaattaagaaatagtatccaaaccaaagaagacaagttgttcaaatcttcttttgaaagagactggagtaatggatttaaacacaatattccgatcagtttacaatttaagattgccaaggacgtgaccttcactccttctttaaattacaacggttacttgaacctcaaaaccattgaaaaaatatggatcccggacacgagtgctaacggtgggcaatttatcactcgggatgtccccgggttgaattactcgcacgattattcagccagtggatcaatcgggtataccccaaccatatatggtatgttcatgttcaaaccgggatgtaaagtcgttgccatccggcacatgatacgtccttccatatcggcatcctatacccccgccatcaaacccttaggtaactacaaaaagagctacttcgatggagaaaaagaggttgaatatgacattcacgaaggtttaacctatcgtccgaacactaccggcggcaaacaatccgggagtattagtttcagtttggataacaatgtcgaaatgaaagtccgaaatgacaaggatacaaccggagacgaagaattcaaaaaagtaaaacttttggaaagtttcagactttcaacatcttataatcctttcgccgacagtatgaacttttcaaatatctccataagcgcacgtaccaaaatattgaataacaaagtagatttgaatttcagtggtaccattgacccttacgcaatagatacaaataatgtaagatataataaatatcacggaaaactaggacgtttaaccaacgcaacaatctctaccaattttagtttttccgcagataacggacaaaataaagaaaaaaagaatgacctagtaggagggttttacgatgattacatggatttcgatgttccttggaatataagtatcagttacaattttacctattcaaggcccagtccttatagaagtccaacgattagtcagattgttaacttctcgggagacctctcgttaaccccaaaatggaagataaactttcaatcgggatatgatattaaaaacaaagaagtaacttcaaccagctttggtgtcacgagagacttgcattgttgggaaatgacattcaactgtatgccgttcggacagcaccagtcttacaactttgaaattcacgtccgatcctctttattgagggatttgaaattaaccaaacgagattcttggtatgatcgaagactttaatcaaataaataaacgaaataaagcagacaaatgtctactttatttcgtttgtaccaagtaaaatttctaccttctttgtctcaccgcctcatacaccaagattgcggcagcagcagaaacattcagagattctattttcccatactggggaattttaatttgttgatcagccaacactaacaactcttcatcaataccggtatcttccgctcccataataatcatacatccctctttcatatccacttcggtataaaatttatccgctttctccgtggcagcaaataaagttaaccctcttcgtttcaattcttttatcgtctttttgagattcttctcccgacaaacaggcaaatggtacaaagccccggcagatgttttaatcgcatcagaagatatttttgcagaattcttattcggaattaaaatggcgctcaccccagcacactctgccgtacgggcaattccacccagatttcggacatcagtaatccgatccaagataagtattaatggcattttcccttccgccaccacagtatccacgaccgtatttatgtcttggtaaggaattggagaaatctctgctaaaactccttgatgatttttcccggcaaatggtttaaacacctcttcgggtacatactggaactgaatctgacgttcacgcaccagcgaaaataattgttggaacaaatccccctttattccctgacggaacataaccttgtcaatttccttctcatcctgtatagcctccatcacggcccggattccgaaaatacactcttgtttaaactttgccatcttattcgttattattaatttctagctttcaattcttccaaatgcccattctcctcttcccattcttccatacaaacttccaagcgttttttcatctcatcataagtttttaataacccatcattaatcacgccttctgccatttttccctccgcgtccccgattttttgttccaaatcagcaatttctacctctaacttctcgatcttcacttctgactttttaatctctttattccattgtttccgttcctcaaaagcaattttattttcagaaacaatctcctcttccacaacatcctcctgctgcaattttcgagggtgcatctgttcatattcccgaaaacattccagtttcttagcctctaggaaatgcgcaactcctcccaggtattcctttattcccttgttggagaattcataaaccttatctgccaatccaagcaggaaatccctgtcatgagaaacgacaatcacggtaccttcgaacttcttcaacgcatctttcaatatatctttcgtgcgcatatccagatgattcgtcggctcatccaagattaacacgttataaggttctaataacaaacgtaccattgccaagcgagtacgctctcccccggaaagcaccttcaccttcttgtcaacatcctcaccggaaaatagaaaagcccctaatatatcccggattttcttccgaatttcacctactgccacttgatctaccgtatccagaacactcaacgaaggatcaagtaaatcagcttgattttgcgcaaaatacccgatattcacgttatgcccgatcttcaagtttccctcatagggaatctgatccatgatcattttcaccaaagttgttttaccttctccgttccttccgacaaaagcaactttctctcccctcagcacatcaagatttacttcatgcagtaccacgtgatcaccatacgctttactcaaatcccgcccactcacgacaatatcccccgaacgtactgccggctggaatcgcacattgatccgtgcagaatcttcctgttctatctcgattcgttctatcttttccaactgtttgattcgggattgcacctgtactgctttcgtcgccttataacggaaacgctcgataaaatcctctgtatccttaatctgtttttgttgattctcgtaagcacgttgctgttgctcgatacgttctttacgtaattcagtaaaacgtgtgtacgatactttataatcatatatctttcccagtgagatctctaccgtccgggtagtaatattatccaaaaatgcacggtcatgtgaaacgagaaccacagccccgggataaccttgcaagaatgactccaaccaagatatagactctatatccaaatgatttgtcggctcatccaataaaaaaacatcgggacgagccaataatattttagccagctcgatccgcatacgccatcccccactaaattcctcgcaccgccgttccagatcttcttgccgaaatcccaatcctttcaacacgacctcaacttcaccgtccatattatccgctcctcgcatatgcaacatctcggtcttcacgttcaatttatcaatcagcgccatataactatccgactcgtagtctgtacgctcgcccagttcccgatgcaaatgctccaattctgcctgcaaatccagcacgtcattaaacgctgtttccgcctctttccgcacggtcttaccttctgcatacactttcgtctgtggcaaatacccaatttttaacccggaaggaacagatacactcccctcggaaggctcctgtatcccggccaatatcttcaataatgtagactttccggccccattacgcccagtcagaccaatccgatctcttttgttcaccagaaaagagatagagtcaagcaatgcgtaatctccaaataaaacacttacattattaattgaaatcatatatcatcatgcaaaataaaaccttctatattttaacgagtgcaaatatacgaaacttatagacacgggcaaacgagtttacccgtgcgttacaagttcacaagttacaggttgcaaattcaaaatttgcacataaaaataacctgcaacccgacgaaatcatataaaaaatgacaaatatcttgttttatccatcaaatattttttatatttgggaaatttagaaagaatactaactacataaaagaataaatatgcccaaaggagtatttaaactaccaaacattaccaatgaacccatcaaaagttatgccccgggttctccggaaagaaaagaattgaagtcacaaatcaatcaattacgttctatcgttgccgatgttccaatgatcattgacgggaaagaagttcgctcggggaaactggtagatattcgtccaccacatgatcatcatcatctgctcggacattatcaccaaggggatgccagccacgtgcaaatggcaattgatgctgcattaaaagctaagccggcctgggaaaaaatgagctgggaaagtcgggctgccattttcttaaaagcggctgatcttttagccggaccttatcgtcaacggatgaatgccgtgaccatgttaggacaatccaaaaatgctttccaggcagaaatcgattgtgtggcagaattagctgacttcttccgtttcaacgtgaaaaatatgtacgaaatataccatatgcaaccgaattccgctccgggaatctggaatcgtacagtatggcgtcctttagaaggatttgtttttgcccttactccattcaactttacctctatcgcaggtaacttaccgggagccccagcattaatgggtaatgtttgcgtatggaaaccatccaagactgccgtttactcggcacatctgattatggaaattctaaaagaagccggattacctgacggtgttatcaacttggtttactgttcaggtccgacggctgccgatgttattttctctcataaagattttgcaggtatacatttcaccggatcaactcaagtattcaatgatatttgggctactatcgtgaaaaacattgataaatacagaagttatccgagaattgttggggaaaccggaggtaaggactatatcttcgccgacccgacagcatgtcctaaagaagtggcaacagccatcgtacgcggggcattcgagtatcaaggacaaaaatgttctgccgcctcacgcgcctacattccagccaatatctggcccgaagtagaaaactacgtgcaagaggatatggccaacataaaagttggtggagttgaagatttcacgaactttgtaaacgctgttattgacgaggcctctttcgttaaattgtctaacgcaattgatgcagcaaacaaatcggaagatgcagaagtgattatcggcggtcattacgatatgagtgcaggatattttatccaaccgaccattatccaagcttttaaaccggattacattaccatgcgggaagaattattcggtccgatcttaaccgttta

SEQ ID NO: 10747 - DNA, 2459 bp, Unknown
  gut microbiota DNA sequence
cgtaccttcaccaccacaaatcgtaatacagaaaacatggcagaatttataaatcccattggaaaaatacgaggaaagtttggaaacgtgatcccatacgtgggaaaaaacggtaaaaactattgtcggtcaacatcattagaacgtaaggctggaggagaaggacagaaacggcaatccgtggcattcgggaccacagcgagccgaaaaagatggctaacctcggtcatccgactaggatttcccggtggcaatggttacccccaaggcttctacgggtttacaagtgccaacgtgacacatgccgtctcggtcgagaaaatacatccggaaattcccgtgaaccgccggaaaaaagccacccaggaatttcaaggcacgattgattacgggaaactacgggttgcggcaggacaactggttattccgatagtcaacgcggaaattgatgccgagaacagaaaggtttctttcacctctcccggaatcctgttcgaatccgtcgactgtttcatggacgatagaatttacgccgcccttctttacgaaccgaaacaccgctgtcttgtcaaagaactggggaaacggggtgaaatattgaacatgaccgtggattttccccgagatgcaactgccgataaactcattatttacgtttttgccaaaaatgccgacggtaaagatgtttctgattcggtatgtttacgaaaaccggaacaaaaaactttaaattgaaaatatcaattaaaagcttcacgcaaactaaaattcaaacacaaccgacatcaagcaatttcgcaaaggcatcggataatacttagttgattcataataagtatcaaaaagattgtctattcgaacttgcggagaaattcggatattcccgatatcgaaagaagaaccggcaagtaaattatgaacagtatatgccggcgtactgtacgattcatctgtggttaaaaatcttttgtcaaagtaagaaacttgataggcaaagaaatgttttttgtatttcacagaaagacgagtattccatttgtatttaggaacataaggaatttgtcgcatataagaaccgtcatccttgtgattctttttacgagttttagacacggacactgtgtaattggttgtaacactcagattaaaatcttttgctttgtagtctccccgcataaaaacctcacatccgtatgaaagtacattccgtacgttctgaggcgtccagaaccattgttttccatcttcaggaagccaaataatccaatcgtcaatagtcatcaagtaggaagagaccactgtatttaaatgaaaaccatgctccaaccggggaacataggtaaaagtaatgtcataagaatagcccttttccggtttcagtcctgggttccctcccggcctccaatacagatcgttcatactaggaaagcgataattatatgacacgtttccacggattgtcaaaatgtcttgcagaatttgagaaagaaatcccatggaataagtagatacgtttttcccgtcattccattccgtcataaattgcccgttgatcaatagccacgggaatacgctccaacgagcattggcttgccatgaaaacacttctcgatttttgatggaaggacctgcaaccgtcgggatttcataatgggcagaatcaagcccatcaatataatattttgaagaatcgatttccatgtaactttccgcatcaacccggtcgtacgcgtaagttaacgtagtattcaaatacaacccggacaatggattgcaatggtagtctccactaatcgtgtatgtctcagatttattcgaattaccttcaggtggaaatacaccattttcgccatcgttccatttatcataacgcaatcggtaatgtaaataagcggcttttgcgaaaaattgatgcttccctttaatataatccaatcccacgtatcctctcaaatttgtttctttttgctgttcatgatctaatacattaacagtaagaggttgaggaagttttctttttccccattgaaaccaccctatcgttgacaacgtcaaatctggggataatttgaaataagcttcctgcatcactccgaactggtcgtattgagcttcttttctgcgttcccggaaaggttttgtcgggaccagtattttattaagataagtgtaatcattgtcagaatgttgatgataaaatcgtgtttgataggaacttttagtttttccgatcaaaagatttcctcccgcagtataagtattatatgaaccgtattccccgaaaatcttatattggtttttcttgttccatccaggttgattaaacaaattaacacttcctccaatcgccccggttccacttttcacgtgtccgctaccatgtatgagatccacgttatcgataaaaaataccggaatttgtgaaaaatcaaatgtcccggccataggaggtgtaatat

SEQ ID NO: 10748 - DNA, 8120 bp, Unknown
  gut microbiota DNA sequence
ctttactctcgggtttataaatttgcttatatcttttagttgtaaaagcaatgcctcaaatatatactaaaaaacagggaaaaatcaaaagaagtatgataaaattatgagaatttttgctacctcaaaaacaggaagtaaaacacctcaaaaacacgaaacgcttttgttgatccggaaaaataaaccccgaaaagtcgattaaaacttttcggggtcttccttttagcgggtagccgttatgatcctagtactaacgtttcacgtgccatcgtttctgcagccaggcgacgatgatagaacttaacactccggccagcaggctcacggttccggccagcaggctgtcggatacttgcgtgaggaacgtgttcaggctcaaggaggaaaacatgccgattaaaaagtaaatgttcatgataataatgtaagatttagaatttaaaatttagaatgaaaaatcaagaaattgccaagtgtcggctgtcggaagccatgcgcccgtttttcgacgtggcgaaacagtaggcgtgaactttggccgggtcccagtcttccgggaggctaacgctcgtgctgccgttttctcctctttcccggagagtcacgagttttgtccggctgagggcggtctcgtacagggctgcgtacaccttgtcgctggcgcaggagaaaccgtcaccttcgtcgtcctgcatctcttgggtgaaggaatacattttagtcgactcgtcatagctgacgctgactttcggcgtgtagagggggccggaagcgcagagcaggcgttcaaaatctaccgtggcggtgtatttctcgtcgacttcaaccctgcttatgttgagtgaggtaaaagcgttcgaggtcgagcctcgtcccacgccgacaaaacctttccggatgacggggagtaacttgcgggcaatgctgacgatggctttcattttcgccctctgcgccagtatttccggggtcttcacgtccttccgggagaaaattttggctttagcgatgttctccttgttgaaaatgcacgtggtgatgttacctactgattttctgactttacctaaaaggtaagaattgaattttgccataatgtttaacatttaaagatgaataaattggaaaatagaccttgcatctcgcccgtgggcctcccgttcgaggtgcaggtttaccgttatcgaattaccggttcagttccagtatctcacgcgggaatgccgggcccgggtcgattttccggggtgtgatgtccgagtggcgtaggagataacggatcgggtaacgatccatcaagagcaggcacacgagaacgaccgttttaagctgttcgtccgtgtagcggtgccaataggtgggttgcccgttctcctcgtcaacgaacacgtccgacggttgtacttccttgccacattcggcgatgaatttttcgccttccctacgaagtttaccgagattatcgagttcgataccgatggagtagtggttcaggttaacccttccgagatgaaagcttttcccggcgtgccacgattccacgttgaagggtacgagctggataatgtccccgttgcggtcgatcacgagatgggcggatgccgccacgtccggtcgggttaggtagtaagcggatgccagaccgttcgaaccggccgtgtaatgtaggacgatggtgtctggggccgtgagcggccgggtgtttttagagcatgtcaggtgaactgcctcgcagtctaccagacggtggtttaggatatccacggggtgaattgggaatttagaatttagaatgaatacgagggttatttccggggacgtttgaggagagagctgacgagttgctcgctgcctcgtccgatgatgtatccgccgagtccgatttccaacaaatcccaaaagcgggaagtgtcggcgagaatcggtaggttcaggaacgttccggcgaggatgatcagggtgaagaccagcatcacgatcggtcgccacgatctttgcagccagttgccccgggcttcttcccggatcgaggccgcttgttccgagatggttttttcctcgacggcaatcaacaggcgcaaaatatcggtttccagttgtttcttctcccttccggggagggtcaggcggtcgacgatttcgcctaccgcgctgaccaggttcgttaccgttttcatactttttcgcgacttaaagattgttccacttcttcccagtaaaaatagagacggctgccgagtttgtgaacgggaatattgtagtctttgatgtcccggtacaaggtgcgttcggcgatgttcagtttccggcacagcgtttccttgtcaagtaatagcggggggatattcccggcggcttttttcacgaactcccggatttccgcaaactctcgcgtgaaatcctgaagaagttccgatacttggtagagaatggcgataattttttccgaggagtccgtgttgttttctgtttgtatcatttcctttttcggtctagtagttcaatatgttcccgtaattctttcaatagtttttcaaggtaagccgtcgggtgagggcgggccagcgtgtgactgatcaacgtgtagtagtctttctccgcgggcaagttccatacttggcagaaatacaggatgaattccttgatccggtacttgttgtcgggcgtgatggctagtgacgtgtggagatgcagggccatgatctcggcgatgtccgtgtcgttcccgggtaacgtgccgggaaacggcaggggtattttccgggattcaaaccatttcttttgccggagaaaggaggcttgttgcaggcggagatactcttcgagtagttcccgttctgtggcatcgagatattcccgttcgacgggcatcccctcgtgcgtgatcgtcaggtaacagtgagtggcgtgtccgtcctcttccccgaagatagtttgtagttccaggagggcttcccgcacggagacggccagcacgttgtcctcttcttctttccgccggatctccctcaggcaggcgatggcgggcagctccacgtcgagcaggtggatgcggtaatcggtcagggagtcggccccattaaaatagaggggttctgatgggttgtcagagaccacgacttcggcccggtagagagcggtgaggtactcttttaagatttcgtgttgattcataatttaaagtatttatcatttgaaaaatatttatcgtcttgcgaggcgaaaaagcagtagatatgtgctttgatcccttttttgcgttgcagggagaacgtggcaatctcgtcttcccgcaggaacgggagtttgtcgagaacaaccggggtaaacgaccgattcccgtacaacacgaccacgatcagacggtcggtagccttggcggacggggagcccgagttgtcatcccattgtagggtgactttatcctgcgggtcaatggagagcgtcatgttattgacatcttgccgtcggccgatcccgatttgcaagcgggagaagtcggcaattttcccttcgggagtgaacacgtgatagttctttttcatgaagagggcgtagccgtttgttttcaggcgatgtccctcgcttttccacacctctttgagcaaggtttctttgagttgctggtaaaaacgcagggccacggtcaggtgggcccggttcttttgttgttcgggcgtgttcgcgtcgtgatattccagcgggtaggagcggatgcaatcctgatcgccattccggtaaaaaatagtgttaccgattcggcctcgcaggcctcttaataatgagttgcaatgttttgccatggtattaaaattttaaagttcatcattcgtttatccgaaaatccgcgggatcatggggacaatccggcaagaaaaaggcctccccgggtttcatgctgacgtgttgccgggggatcatagtcagttgacaaacggctatgaaacgtgggcgatacgtcagtcactcctttgtcatgccttatttctccttgaacacccccttaactctttccgggttgccgggtatctcgtgattttctgttgacaaagatagggcatgccgtggcggggagcgtgacgggtattgtgtgacaatccgtgtcaaaacgtgacaatgttgctggttatgtggaaaaattgatataatgttgggaaatttgatggaaatttgatggaaatgggtgaaaatcggtggtgggaggatgtcgtgggaggtgttccggtaatgtatgtagtgatccggcgttttggggcagaaagagggtaggcctaccggatcactatattcaaaaagggatttatatcgcgtgattagaaatgactctcgaagtgataaaattctgcagcccgtggcacgatggtgtcatggtagataaatagttgtttcccgtccttgtacaaaaagggatgttcttcttttccggcagtcaagtctcgcagccagtagatacggtcaagcggcacgttatcaaattgtaagaaattgtagcgggccaatcgtgtacccgcgtttttccagccgttatcccagtacatgagttggtaggagtgacccacgacgatatgattttccgcgtttgccggggcatagcgtatttttttcactttcatggagcgtttcagcggcattaggtctattttcccgtaagaggagtattgcatgttgggattgtaggcagaatagtatcgcaggtaactatatttactggtgtcggcctgtaatttgcaatagcgtttttctgagccgttgcggtttatttccccgggagagtatacggggagtgccgtggccggttgcagggaatcttcgggtgtgtactcgtcagtgagaaattccaagagtcccatgttactggtagggaaggagtctggggcaacatagcggtagtagcggaatgggcgacatatttccggggttagttcctgcaaattgaggatgggggtggttttgatcgtgccgagtaacacggagtccttgaaatcttcccggttggctgcttcgaaacgtcccccgaccatgaggcttgcccggtattttaaatacgctttttcggggtatttgcgttgcaaaaggagttgtcccctttttcccggttgttcgggtgaaacgggtacgagcgtggtggaagtatagagcgtgtcgggtgatgtgatgtagaagggtgatgcaaacgggatgatgctgtcgccttttaggtagacggggaaatagaggacgttataaaccacgtttttaaaccatgctttccggtgttgatgatccacggttccccacgtggcagggataaggccttgcgagacgttgaacgtgtacaagtaaaccaggttattggatagctctttttctatcgggagttgtactggggccactcgatagttttcattggtcacttcccggatacagggggtgtcgaaataatccggcagggtttctccttccgctttcaacataaatggactatcagcttgtgcgccaaacgtgtttctgaaaaagctgggagaagcggaggttgaaggtgtactggccgtgtaattcatggtttggttatatttgaaacgtttgcccgtgctgtccagcagggtacagtggaaatgtcttccgcttctttcccggtaagagaggttacaatcaacgacggtcgggatcccgtaagccctgaacacgtgacaaaagttatccgctatggatatgcagtcgtggtgttgcccgataaacatatcataggtccccacgtgttgagtttgctggtagttggggaacatttgacggatgccgtttttgtaaaggttgtagcgagtgatgattttggcataggttttctcgtcacttttggctaggtgtttgccaaacatatcgcttagcctttgcccgttttcgtaaaaaggatacccggttacggcccgatagggaaggatcatttccttgaattgcccgaacgtgaggtaggaggcataaggggaggtgtgccacgtgtggaaagcgttttcaatgtgagagatcaaaaacgctgaggaaatattttgagggtcggggaatgtcccttttacgatcgtgggggtgtcgggtggaaacacgcttgccacttgccgggcagcgtaggaaaattgccagtatctttcccggttacgctcggagtacaaggtggaatccggaattctaagcatcatgttcgtgtacaagctgtcaaaacgggtgtgccattcgaacagcgaagaatcggggaaaacggtccgttcggttgacaggtgccatttcatgttatcgatcaggaaacaggcggcttggtatttcaaggagtcttccgggtgttcccggtagtggcgtaacacttttttcaactcaccccggtttctcccggcttgtgatagggtttcttccactcccgccgggtagcgggtgcaggcgagtattaaggtacaaatcaagatggagtataaaatgggtttcatggtgaagagttttatatggaataattttgttgtgctggcatataccgatttgtatgttgtattaatagttgaatcttttaatttcaaccaattcactttttggggaatctactcctcctagaaattgtctatttgcttcatcaacaataataaagtttacaaaagagtcaaattgataaactttttctagtattccgttccaagtaaatactagaagataaggagggcgatcataaccgttatttgccgataagccggaccataggaggtaacaaaaattggaggtgctgtatatctggtatgaggtaacaagcatatcttctgataattgaaattcagagtagtcaacttcatcatttacgaggtcgagagaaagacttttttgtagagaaccgtcagtgtgataaaaattaatcaaattaatatatttgaatgccgcaatgatgctgttatgttgggaattaacagaaagtatgtgagagtaagcgtcgcttttattgcctctccttgatacataaaattgaggttcataatcaatcttttttatgatcttggcgtgtttatcataaaggtaaaatagtatgctgtcttcaccaatgggagatcggacaatggttgaatcgatgatatttaaattttgcgagttggctagttcggggggtaatatcgtgttatggatagaggtgtcgtttttcaagtaaaaccgggttaaacgattttgtaccaaatcatggattaatagggatgaggtgtttgtatcactcttgatgatcaacggaaattgatattcattaggccctctgccggtagcgccaaattcgtatagcatgtttttggagttattgctgaagatttgaaattgtttttcagagcatgtattttgtaaacacaggaatgtatcttttatgattcctgctgtgtaacatcctgccgggatttgagaaatggtttctccttttatttggatgatattatcgatgtgtaatttttcaatttgagttatttgctgattcttacaagataggacggagaaaacgataaagggtagatagattaatttcataagtttggaattatggttgtgggggatagataataataatgaagtacctcatgtttttgcttcgattagaatttgtttatataatttccatatgctatgattacttattagtaatcgtttgtttgtataaattccatatttgttcattttgtatcggatttccaaaaaggataattttgttcatgctatctagtaaaaaagttctataaagaagttttgaagagagatggtttattttcccaattttattttcttcgtctataaaaaatgggaatgtgatgttatttcttttcttaatagattctatatattgaggaaatttattgtgtacaatatataggatggttgcgttcttgttaagtgaatctagttttttatgtaatatttcccaatcatatagttttagttgacattcagtacaaccattggtatccacgtatgtgaaaattttaaattgtttttgtattgcggcttcccacaaagaatcttgtacattttgccatgaggatggtaagatgatttctttcccctcccatgaagcaataaattgtttgatttctttttctcttctattttgacatgcagagagagaaatcaaatat

SEQ ID NO: 10749 - DNA, 8876 bp, Unknown
  gut microbiota DNA sequence
catcacggctgctaaatttatgtttattgggctatttgtaacaagggacaattggaatatagcaacttgttaccaaatgaatcaaaaaaatgtggcatagaaaaaagagaatatagaccgactataaaatatgaaaaaaggttgtgtctgcattttgacacaacctcttctttttgtagaaatagatacatgttacgaataactcgcttcattaaagcatcatcccaaaacaagtatcaatacctctgtgtagataacacattcctattacacagataattaagaaccgcattttactcctgcgaattaacctccacactcactcgttcctttataattttagaattcaaatacaagaacgccaagcggggattagcttctttaacaacaagactcaaagaatcgggagtcaacaaaccgattttttcttttgtctcgtaaggtactttcgtgccatcctcggtcgtatcgaatccttttataatcatatagccatctcttatttcccacgtttttaaatccaagtccggaacattaatagcttcacacacgccacctttcttaaaatgaaatccttttaactctcctgtcgactggtacgtgtaaggattacaccactccccgataattttcttttccatctctttctgagggttactggcacaagcacaacaaagtaaagtcaaagcaacatacaataaatttttcatgattcttattttaattaaatattacgtttatttgaaatcgtatttttgatccacgcctctttcgtctatattaattccctctttcatccaacgaggtaacgaggcatcttttaaataatgatcaaagaattgttgaagacgaatagtccaatcaacttgagcagccttgttataaaggaaatgtccttctcctttataatttaacaaccacgcaggtttctgcaaacgacgcatcgccaggaacagattcaagccttcggaatacggtaccgcctcgtctttatcacaatgaaaaatcaacaagggagtctgtatcttatctgcataaaatatcggggagtttttgatatacatttcaggatcatcccaaagcgtttttcccatacggctctgggtctcctcgtacataaacattctaggcatcccgctcccctcgcgaataccagtatatgccgataccatactcgacacggcagcccccgggctggcacacttaaacatattcgttcgagtcaccagataagccacctggtaaccggaccaactatgtccctgtatcccaatacgatctttgtccgcaattccccgatctatcaacatctgagtcccactaacgacagcattgtaacaactctctcccggagccccaatagtaaaatgcacgtcaggcataaacaccacatacccgttactcacgtaagtaaccgtgttgatcatggcactgcttaaagaaggtatgggatacgaatgaagctccccggtatgagtctcgtaaaaattcacgatcacaggataacgttttgttgaatcatagttatccggcaaatacaacaatccccggttccgctttccctcgaaattcgtccactccactaactttacactcccccacaagtaattttcccgctgcggattcgcatccgtcactcgaaccggacgggcaaaatcacatttactccaccaaagatcccggaaatcggaataactttgccgggtaaacaaacagtatttaccaccatctgataattgattgaaataaagatcgtaagcaccttccattaacttttttaccttacgggcaggagtcaatacatataccccctgattcaaggcttcccgattcaatgcgtgtaatacaatattctgtttcgggttgatccaacgggtttcataatccgcttttaataaacgcaatgaaatatcatttttccgtccccaaccaccagtcagtgaatacgtctgttgtttcccgcttaaatccactacccacatatcatatttgtcatacaaaacgacctgatctcccccttccaaccaaccggcaattccataagaccccgcgggcttcggtttgtcgtattcctcgtcatacatagcataaccgataggagttgaaacatccgttaactctcccgtggcaacctctaacttaaaccacgtcttttgtccggcatgatataacatcgcgtatttaccattcggactccacacgggacgctggtcgaaatctttaaacaataatttgcgctcacccgtttccaaacttaccagatataaatcggccgtcactccatcccgccaatccgtgagcccacgataaggggtctcgtctccaataatcacgtgactatacacatcacacctcggcgtgtacatctggtccatttcaggcggtgcaatcaacacgcatttctttgtatccacgtgatacacgtacttgggcatcttccggcgcttacttcttgattcatacctctgacgactttgtgaaacttcatcatcccatttccataattccaactcgaaactcttgtccggttctactttaggtttacgttcttccggttgtttcaacccgacatccacgaaaatatatttcccgctattaaacacggaatatatcccaccccggactttatactcttccgacacatttatttctttcgtatccatcaccaagcggtaattcccatcttttaaagaaaacgtgtacaataaatcaggatcgtttaaataagaagaatctgaggctaccgaaaacacaccctcttctcctccggtatttaacgaaaaattcacaaccggagccttccgattatcataaatcacccgctgtttcccctgtacaggccccatacacaaagatttataaccatcatgcctccggatatagactatcgatttataatcatccacggagaaatagttttccacgctatctatccgaacagaatctcccttttcaaaattccaaaccaccaaacgccgtcccccttctttgcccaacgggtaagagtaagaaatcaaaggagaacgcgatgactcccgaaaaccgtaaggtttatcccaataggtctttttcatatcccgcaaggaaaggagaaaaagagaatcttttgcctgtttcaaggtatcaagcggagaaggatgtaccaagtacctcaccccttttccctgattaaaaaaactcatttccctcacgttgggaaactcatatactttcccggactccatattccgcaaataagtcacgggaacatctttatcatgtccttcctgatcgatataaacaaaacgataagttacccatttcccgtcttccgacatacgttgtccctcgaccctgcgccatagtttgtaagcctccatatccaaaggctttttttgagacatacagtctgttatgcatataaataacagactgtatattactaatattattctcataacgagttagcgttttttcaaaaaataatcgatgtctccctgataatccgcggaatcatctcccaacaagtattttgcaaaatgaaaccacatttttcgctcgaagaaatccccgttctccccgaaaaagccgtgagaacttcccggcaaaacaatcatatcaaaattcttcttcgcccggatcaacgcatccaccatcctgtaagtatgcgagggatgaactgttttgtccatatctcccgtcacgatcaacaatccacctttgtagtttttggctaattcttgatttgtcttacttctggtttcaaaagtgatctcctcccgatctccatttacactatccttgatcacacgtttgttttctttcaccccataatggatttctacaaatcccttattgtatatattattgtcgtgattacccgcacaggccaccgctgcactataaaaatcaggataagtacaaatggctgccgccgtcataaaaccacctccggaatgcccgtacatacccacctttttcccgttgataaaaggatagcgatcagccaactgctctatagcatatttatcgtcagccaaaggataatcccgttgatttccatacccgtatgtatgataagctttacctcgcatcggtgttccgccccgatgtcccatggccaccacgatgaaaccgacctgagccaaacgggtattcatatcatcatccaacgtaaaacgtgtttgcacatactcgtaaaatggtcccggataaacggtagaaataatcgggtaacattttgtcgaatcaaaatccgccggtttccacatgattccgtatatgtccgtaacaccgtctgccgctttcactttaaagcgttccggggcacgccatcccaactcatacactcgacgcaaatccggtttctccaattccatgataatcttccctttctgatttcgcaccacgtttaccggttccaaatcaacacgagaataactatccacgaaataacgattggaaggagatattgtcacatcatgagaagcatcttccggagtcagcagagtgatcgcatctttcttatccaagtctgcccggtataaaacgtaataataaggatctatattcttctcttttcccaaaccgacaaaataaatctgccgtttcgccgtatctattttctggataggaccggcaacccaagggccggaagtcacttgattcttcaaatttccatccttgtcatacaaataataatgtccccagccggaacgctcggaccggaataagatctcgtttccgtcattcaagaaatgaattgcccgcatttgatagtccaaataaggcttatccacctcatgaattaaaactttcacatcaccagtttctgtatttaccatacaaatctccgtctcatcccacgtacgtttataccgctgaaaataaagacgggaaccatcatcgcttgtgtataggaaatcaatatattgatctttccaacggctaatatctatttttcgaacttctttcgtatccaggtctccaataatcaattcatactgaattacatttttatctccggctaattcagctttataagttttcaacttcggacgaggatttgccaatgcatcaattaaccacaactcctctactttacgagcatcctcccgaatagcataaaaccgatgtccctttttaagccaacgagcctcacaaccgaaacgtccctccatttctccttcgtcctcccggttgaaagaataatatttttcgccatcatttgttaactgaatttctgttgtatctttccctttgtcagaatttcccacggcatacaaattatgatgtttcgcatataacatataagcactatccgcagaataatacatccaataaggggcataacttgttcctgtccgacgtccctcgacctgtaattcctttgtatatacattataagtaaaattacgaccatccatgccaaaacggatagtttccccatccggatcaaattcgaaatgcaaattcaataatttcggatcgtaagcacgacgagtaatttcactaattttagccaataactcagcattgtcaaaaagcaagttcttcgtacgtttttccgggtctaccaaataatatttattcccttcttctgtcccaaaagagtaccaaaaacgatctgtattattgacataataaggatgtatatctaatgaatactttattatcggcattgttgtcaattcccgaaatctctcggccaaagcataatttgctttttgctgtgcatttaccgatcctacaaatatcaaaaacaatataactaaaaactttttcatacacgattatttacatacaaacatccaactgtttacatcaaaaattcgggggggctccaagtccccccgaacacaacaatatcacattttaaaagtatccatacttaacgtccccccagctgctatacttaaaaataacatctataatcttaccaagttcatgtgtttcaaacaacggaatcgtcttggtcatatcattatcatcaatctcaaatatgtacaaatctccattttccaacccaactgccacatgagcattagcttcatgtcgatagggattgaaatctttgaaagcaatagaagtaatcttatgatcgaaagtcttgacaaccccttctttaaagttatcacggtaatactcatggaagtaaagcgtattaccggaagcgatcaacatgtagtcgcggtaaggcaatacggccatatccacaaaatcagtaaacatactagccgacatttcatgaattctgctttccaatatcttaacagaacgactccctcttcttccagaaggataagtctggtaattattcatcaaatacttcccattttgattaataatcgtcacgtatgaatctgaatgatggaaaccagaaccgatcactttaccttctatattttgaaataatgacatatccacatcactctcctcggtaaagaaaggggctaactcggcattataataaaaatcacccgtgggacgtgattccttttcccaaatcccatacaacgtgttctcctcatccaaagccaataaataaggagtctgggggtaaattgaaggtgttatagatttaaattttttaccatcaaaaagaggtagatccgaataagtaccaacatgataagcttctaaatcataattttttttgtacaaaatcgtaccatctgcattcaataaataccctccggaagcagactgtgttgcatctacaacattaaaattagacggagtcccaaccaaaaactcatcggaaacaaaaacctctctttccattgaaaatccatgcaattccaacggctgatcttgttgtagtaccataatttccccgggaattgcaacataatcatcttgcacatagtgctctacaagtttccgtggtcccgaacccaaggactgtccatcattatgcaacggataaatatcctttctcaccccgatataattcaaatactctacatcatcttctgttttttcctttttacccatcacgattgacaatattgacttattcccctcctctgacaacaccatccatcccgtttcatattgagattgtacggaaatacgaatcaatttattaaaatgcattcccgattttttatcaatcggacaaaacgttacattatgagtgcctatattattagacataaaagtatatgtaggttccgttgacaccagttctgttcccacgtaccactcaaattccaactccggattaatactatcaatggtaaatacaacttggggagccagtacaatttcttccccggcataaacggtatacttcgcttctatattctcccaccttttaacttcatttatctccttgaaactctcatccaatttgttatccaaacaacttgtcaaggaaagcagggttgctattatcaataaatactttttcataaattccatatattattttatccaataacaggtacagaaacctcatctccattttcatctataaaaggaccgtatttctccaaataccttttcagagtcaaggcacaccgacgaatcacatccgaatcgtcaagcgtaatctccggaatacccccgttagcctcaatcaacaactcgaactttttgatggtaaattcacccaagtttgcccagatcacccattcatcttcatcccaccattccggtcgagaagcaatatctgaaatagatactactgccgtacggaaaggagtatctccttgactatatttttcactatctgcaattctaaacacgacacgtcgtatctctgaagataaaatctcactattcttgaacgtgatataaatcgtatccgctactcgatccttatgaaatacaaaatctcccgatatatcataatttgcagcatccaatgtcgtttcttcttttactacttctaatttaaaagaacaatcttcatcaaacattttaccagaaagactcatggcaacaggtactgaaatatctccttcaggatagaaaaagaaggatgttgaagtactgtcatttgttgcattctttgtaaaatagatatatgaaacatcattcgaattttccaaaattcccctttcatcacaagaataaagtgataccaaggctataagaactaatatatactttttcataatcccagctattaaatattctcactatccggcacatctaaaacaaaattctccgatttccaattattaacggtcggcacggactgattcaatcgtttaaacataaagaatatctgtccttcgcccaaaaattcccgacgggcatctgaaattaatctatccataaaatcagactttaatgtgattcctgataaatcgacatttctcagattacgtccctttttcacttgcatcaaataatcaattgcctcagacgggtctttatcaaaacaagcctctgcagcaatataatagatctcactcatacgaataatcgggatcaaattcgaactcaatattccttctgatgttgcattgttttgataagcatacttcatcaaacgattcaccgcactcaattggtatcttttacgatagtcatccgtttcaccattaaacaaattatccacctctttgactaccataaacaactgcccaccatctgcattaaccacatcattcagcgccttgtcccaatcggttaactttgttgaataaaaaccgcataaaatatcatcgtaaaatttcaaatttccctttgtcatcttacttgccgaagtaaaatcataatatctcgtactattttgaaaatcaataatttccgttgcaaccttatatgcttcattaggctgattattatacaaatatgcccgagccaaaataccggaaatagcataataattcatcctgaatcccctataatagaaaaagcggtcaccatcaggaccatcgaag

SEQ ID NO: 10750 - DNA, 10927 bp, Unknown
  gut microbiota DNA sequence
aagtcctgtataacattctccatgcactcctctacagacaacttcacagacagtacttccggataacttttaatatacgggatataagttcctttaggagaagtcaccggtgccggagcaaaaattcgtaacatatcaaactgaataaaagcacgtaatgccaacgcttcgccttccaataacgctctttcagattctttaagttcaaataaatccgggtctgcgtgacgagcatgagcgatcaagttattacagttagctactgcattatatccctcttcccaaattgcctgaggcaatttatgaaaatcagtgtattcataatcgtaaaaagcagccccttccttatactgccttcccggatactcagacggtatatttgatacattataacattgagctaacacatccatcaagccccaagtcatctcccggccatacatatttactccggacaatgatttatacaccccgttcaatacattccgataaccattaccggtagaaaaaacctcgtcctcactgatttgttcttccggttgtacatccagccagctattacatgctgaaaacaataccggtaatatacatataagtagtaatctattcattttcataacttatcttttttattaaaagcttgctctcaacgtaaaattcacggtcttggcatacggataacttgtacccctctcctgtttgattgaagagaaacgcaataaatcattcgtactcacctctaatctcaacacattcaatcctatttttttgatcaattgagtatcgaaatcataactcaaagtcaatgcattcaatgaaagcacgttattatcttgcacgaaacgagaagaaggtttcgttgttgttgaacgatctttaatatctttcaatggagttacatctcccggtttctgccaacgatccgtcaacacacgcttatccacattactatattgaatatccgcattctctaccttgcttactaaggtggagttatactcctgcccaccaaactcgtacatgaaagaagcaaacaatgagaagtttttataggaagcatttaacccgaatgatccttgtcccttgggttccgtattaccaacaatcacctgatcggccccactccactcgtgagtaataactccatttcgggtgataaacaattcttgaccattcgccggatctatacctaaagaacgcatagcaaaaatagacgtcgtagatccaccttcttcatatttggtcttcacctctgccacattgttattactcggatcattatagaattcctcaacctgtttgttataagccttcaaggcatccgaaattttcacaattttattcttgttatgggcgaaattcccccataaagcaaataacaaatcatttctctggatgatgttggcacgaatattaaactcgtatcctctattccgaatttcacccatattatctttataagaaacgaatccggaagaagtcggcacggttacatccgtaatcaaatcaatggttttcttattataccattccgcactaaaagtcacacgttcattccatacctgcatatccaacccgagattgaatgtattcgttttttcccaagataaatctttatttccaagagcttttagcttaataccatatcccgtaacataccattcatcaaattgagcctcgtaagtcgtaattgccgaataagatgggaaattcaccttaccggtctgtccataagaggctcgtattttcaattgattaaagataccattattctgcataaatccgtaattatgaatattgatacccaaacctcccgaccagaaaggggcccatttctgattagaaccaaattcagaagaaccgtcaaaacgggcagaagcatccaacaagtaaatatcattatacgtgtagttcaagctggcaatcataccgaacaaacgagtctgactctgtgattttgtcggtttatccactacttctgccgcatagttagaagaattaaattctcctgaagggaatccacgataatgagtggacgtgctttccgcaaaatcagaagtagcattaaatcccacagacaagtttatattattcttagcaatagactgctgataatataaaaatgcttgagcatcccacatggttctttcacctttgtccacgtacaaatcacctgtcagcaactcattagaactggcattggttgatgacttattggactcaggatcaacaaaacgttctccttttgtaaattgtttggtaatactgaattggcctttcattgacagatagtcattgataaaccaattcacgctgacattatcaataatctcatcatacttgtcataatcataactctgcagacgagcctcatacaaaggattcaaggcgctgagacctttaactagagtaaattgtaactttttcctcatggtaccgtcttcattaaaacaacggtcataaggtaataacgtggtataatcactaaaagaaccatacggagattcctgagcttttacataaccataagaaatataattctttacttgaaagtttttcaaacgatagtccacggaaaaacccactccggttctatttctataggacttcttcatcacgccattgtctccgttaaaagaagcatccaacgcataacgcaaatccgaattcccaccttcaatatacagactgtgtttatgagtgaccgcatttctcaacggctttgaaatccaatccgtatctgctccttctgcaatattcttataccttctccaataggaatccttgatactcgtggctccttcttccggatcatgtattcccgcaagacgttcaatttccaacttttcctctgcattagctaaattataatccgataaatccgggaaagtcactccacctgtcaaagaataagtaaccgtcacctcacccggtttcggggctactgtcgtgatgaccaccacaccgttagctgcacgggatccatacatggctgtcgcagcagcatctttcaaaattgtgatactctcaatccggttcgggtccatatcgtacactttctgtacatctacctcaaacccatccatgataaacgtcggtaagttcgggttattctccaaattacctttcgttgtgtaattcggatccaattctttcactccaataccggaacgtccacgaatatacatttcaggcatcgcattcggatctgatccccattgattattcgtctgaatacgaaaagaaggatcaaacgtctgcaaagcagcaatcacatttgtttgtgaaacttttaataaatcctcttttttcacagtcacagaactaccagtaaagctctgtttcttgatctgaccatacccggttactacaacctcctccatctccgtcacgtctgctttcatgcgaacggtcacctctttactcagatccttcatcttattgacatctaaattctgggtttccatacccacgaaagagaagatcaagatcaaagaatcctgtttcggcaattccattttaaatttcccgtcaatatccgtcaccacaccaatcgtggttcctttcaacaagatcgttaccccgggcaacgtctgcccggcatcgtcaacgaccttacctctcacaacgagtttctcaaccccatctttctttttatcatccggagttatcacgatcaagttatccacgatcttgaaaccgtacttggtccccgtaaggcaagatttcagaacctcctgtatagatgcattcgtgaaagagcgagtgatattcgtgacacttttgatttcctcgtcattatacaagaactcgaaagatgtcttttgttttagtacacttagaacttcactcaacgattgcttttcaaattgcacagtaatagtctgttgtccaaacgcattttcgcttgaaaacgcaaaatgtgtaaatagtaacaataccatcattagtttgcagcctaatgacagtttgctacatctgatctcccagtttttaattttacttctcatcgataatttatttaggtcatttttgcacacatcttcccggacattccgacaaatccacgtgaatttgccttcagtccaagcaattgatgtttattaaaactcgaaaaatttatacataacacacttcttcaacgaaattatttttcattgtttgaaacacatcattttgtttgtggagaaaaagctttatatttgtgaaatccccttggggtttattttagtacacatttttttataaagccggagttgcagcttcggctttatggttttcacaacttctccatcactgtcactgttctacctttcacatcaaattttatatttgttgttaaactcaataattccaacacatcagtaatcttggcataacgaggtaagtatccggtaaaatgataattcttgacggactcgttcatgtaaaacacatcaaccgcataccaacgggaaagtttcgtcataatttcctgaacactctcacttttgaaccggaaattctcgtacatccaagtcgtatacacttccacatcaacctcctccacgctcacctttccatcttttataatcgcctgatgaccaggctttagaatagttaatttccctcccatattaatttcgaccttacccgtagctaacgtcgttttagaagtcttatcatcctcataactattcacgttgaacgatgttcctaaaactttcaccgcataatcccgacattgcacaataaaaggtttcgactgatttttagcgacttcaaaataagcctcccccgatagatacaccaaacgttgctcactattagcaaaactttcgggaaaacgcagttccgtttgtgcgttcaaatacactcgggtcccatcccctaacgtaattttatattctcctcctctcggaatctcaatcttattatatcttatttcctttacattttccgctaattgccgatcggtaaaaacgacctctttcccatcatttgccgccaaagaaaccgccaaatcgacctgcttcaacgaatccaaatgataaacatctccagatgctacagttaatttagcaatagaacgtcctggagtaatattctctaccttagctaccggaacaatcgcagtttcctcttttaaaaagaaagtcattgctactcccaaaacaaccaccacaacagccgcaatttgatatatcctcatcaaatgctttcttctttttctctgggctgctttttgtttcacaacctgccaggcgccacctgcattataagataatattttttgaatatcttcatattgcatcttttcatccagaatccggacgaaaagagcttcatgagaatcggactctttcaaccatgcattcagcttttgttgtccttcctcatctatttcattccgcaaatacgctaatattattgcggcaatgtcatacagatatgtgttgctattatttttcatacactattattacacgacccacccccaaaaggattaaacggaatctcattttttcaaaaaaaaatacgatttactccttattcctaaattatcacatacctcatcatccctcagaataaaggatttagcagcattaacaatgagagaatatctttcaaattttctcttaaaatttttttcccgcgggctttttgcgcttttaccgtgttaacactcaaacctagttcttgtgcggcactttcattatccaacccttgaaaataacaaagctgaaatactttccgacactcctccggtaatttctcaacagcagcagccaattcccgatggatttcagtcaaaataatactttcctcaaaattttcagcctgctcttcataagccaatgaagcaatgtatcgatccttagaacgagtactacggatataatttaaacaagagtttcgaatagataaatacaagaagttcttcaaatggacttcggattggaaaaacatttttttctccaacagagtaataaaaacatcttgtacaagatcctctatcacctcctcgtctttcaagaaccgggaagcgaaataacaaagagagccgtaatactctttgaatattacctcaatattgttaacttgaccttgtacaccagtaatctctcgcttttccattctatcaattttattgacgaaataaaactgataaagaaattaaattcaacgacatcacgccacccaacaatacttaataaaaaacaaacaatgttaatcaagttattattcgtatttcgctaaagccctaattattttaggaatatccgtgttatccaaacgtccattaaaccgttccgcaccaacaccgatagcatataccggaacaacacctgccgaatgtcccccactagcccaactaatcttggcaagacgattcagtatattgatggacaattgagcgatcggctcattctccgaatacaaatttttaaccatttcaacggtcttgcccgagaatgtttcccgataacaatttttcaaggcctgttcgtcttccgttgataaattcaccatgttccaaaaacctaaattcttcgccagaacttcctgtacattctcccactccacctgattactcttcatatctcgtaattcccgaatttcacgagtcaatttctccagagacaccctctgattctccaatacccgaagattcaattgatacgagccagtcccgagaacgatccctcccgtctcgtgatcggcagtaaccacgatcaatgtctcgtccggatgtttcaaataaaactcgtatgctttttgtaccgcatcagcaaaatctaccacttctcgaaaagtcgtggctgcatcattcacatgacaagcgtaatcaatcaaaccaccttccaccatcaggaaaaagccctcctttccccggtttaaaaattcaatcgccccttctgtcatctgacttaacgtgaggtcatcctcttcccggtctatcgcgtatggtaacgtcgtctggggaccgccttgaataacaaccaatttagacgactcgaccattttttcccgaaacatctcgtttccccgaacgaccaaatatcccgactcatgcaacaaatcaaaaagattcgcagaatctttcggggatacggattgaataatacctccaccgccatataaatcaaacccggtcctgatagcatctttccccaactcgaaatacatcgtccgccgaggttgatgcccgtaaaacgctgccggagttgcatgattcatcccgacactggtaataatccctactttacgtccggcctcttttgcccgcacggcaacactgtataaaggttccttctgatccttatccatcccgatcgtgttattctttgtcttctccccggtagccaaggctgttccagcggcagcagaacaagtaacaccattataagaagaataagtcgttacataattgcgaatcgggaaactggcaaaattcaaccctttcaccccgacaacactatccagttcggccaaatacatttctgtcccgttcacctgattcacccccatgccgtcaccgataaaatagaacacgtactttgcctgccgggcctcattacaactttcgaaaaagaaaaccaacactccaacaagccaaataaataacaactttttcatcctcttacattttattcctcaaaattaggcataaagcaacaaaaagccaaacataacaatcattatttcctccctatcggaatcccatcagtaatacattatatcacaacaccttgtcatgcaaacgtatgcacgattttatgttttataagatgttttttatccaaaacaaatgtgttaattttgcccggttttaaaacaaaagcaaggtatttaacaatatatcaacaaaaaacaaaaacaatgatttactcacatgaagtacaacacatgtgtgttgtgaaaaaaggaccgaatcatggtccggcacctatcccagaagaggggaaatgggttcgttctaaagagatcaaagacatttcaggattgactcacggtatcggctggtgcgccccgcaacagggagcctgcaaattgaccctgaacatcaaggacggaattatcgaggaagcattgatcgaaacgatcggttgttccgggatgacccactccgcggccatggcttctgaaatcctaccgggcaaaaccttattggaagccctgaacacggatctcgtttgtgatgccatcaacacggctatgcgcgaattattcctgcaaattgtttacggtcgtagccaaagcgctttctcggaaggcggacttcccatcggggccagccttgaagatttgggtaagggcatgagaagccaggtcggaaccatgttcggaaccaaggctaaaggaacccgttaccttgaaatggccgagggatacgtaactcgcatgggacttgacgaagacggagaggttatcggttacgagttcatccacttgggtaaattcactgatatgttgaaaaaaggtattgatcccaaagaagctgtcgaaaaagcaaccggatcatacggtcgtttcgcggatgccgtaaaatacatcgatccgcgtcaagaataaactaattgtaaattgtaaattttagattttaaattgaaagtatcaactcgaattctaaaatctaaaatcataaaatctaaaatgaattatggctttatttgaaagttacgaccgtcggattaatcaaattaacgcggttctaaataattacggaataaaagacatcgaggatgcaaaagccatctgcgatgcccaagggatcgacccgtacaaaatgtgtaaagacattcaacccatcgcattcgagaatgcagcttgggcttatgtagtcggtgcagctatcgcaatcaaaaaaggatgcaaaaaagcagcagaagccgcagaagctatcggagaaggtttgcagtcattctgtataccgggatctgtcgctgccgatcgtaaagtgggtttaggccacggtaacctggctgccatgttgcttcgtgaagaaaccaaatgtttcgcattccttgccggacacgaatctttcgccgcggcagaaggagctatcggtattgcaaaatcagccaacaaagtacgtcaacaaccgttgaaagtgatcttgaacggcttgggtaaagatgcagccatgatcatctctcgtatcaacggcttcacttacgtgcaaaccgaattcgactactacaccggagaattgaaaatcgtaaaagaaaaagcatactctaaaggcgaacgcgcccaagtaagatgttacggggctgacgatgttcgggagggtgtagccatcatgcgccacgagggagtcgacgtttccatcaccggaaactcaaccaacccgacccgcttccaacacccggttgccggaacatacaagaaagagtgtatggaaaccggaaaaaaatacttctcagttgcctctggtggtggtaccggacgtacccttcacccggacaacatggcagctggtcctgctagttacgggttcactgacacgcttggccgtatgcacggagacgcacagtttgcaggttcatcctctgttcccgcacacgtggaaatgatgggattcctcggaatgggtaacaatccgatggttggagccaccgttgctgttgcggtttcaatcgaagaagcaatgaaatagtattaaaacattacttcataaaaaatccaggatttcagtcctggatttttttatgccacaaccacccttttatgcttccagcgccgatgagaccacagccaatacgccggctcctctcgaataaaacgttccaacatccggatatgcattcgagtcaattcccccggttccaggctttgcggatcggaacacaaatcgtaaaactcggcatgataatggccccgtttcaccttacgcatattcacgaaaaccaccggttggttcaactttcgggcgattctttctgttccctccagcacagccgtatcttgattcaggaaacgagtccaaaaatgaaaagaacgtcggttaggcgtctggtctccgataaatccggtcatcgtaatctttccttcctgttgattccttaacatcacccgcagcgtatccgcttttgccaaaggcgtggccccgaagcggctcctaattttacaagtcatccggtcaaagattttattatgtatcggtttataaatcgggatcaactctatatccttctcccacaacttataagaatacatcatctcccaattcccatagtgcccggaaaaagcgatcacgctacgtccttgctcgaaatagcgatgtggcacatccacgttcaccatgacacagcgtctcttgatctcgtcctccgagatatgccacaatttataaaactcggcaaaagtatcacacaaatggcgataatacttccgggcaatccgctttcgttcctcctcgctcttctccgggaaagaattccgcaaattcatatcgaccactttccgacgataatgaacaccataaaacaaaataacgaacaacacgtccgtcatcaaatacatcacgggtagaggcagaaaactaactccccacaacattccatatcccaaatacgaacatagattaactaataatttcatctaaaaagtataaatttcacacgcatcttaaacttgattcctacagcaagtcaatcaaagataacacaattatcaaccatctgacaaaaacgatccaatatttatactttttctacacaaattgcattctaaagctccagctcactcttttaagttctgtatcaaaaaacaatttcaaggttgattcctgttactcgttcaagtcaaggaacagcaagtgtggagcatactcttgatgataaataatcccaattaatatctaaattcttttgtactttcctgaaaatggttgactcggattaaacaaaaattttaacaaacaccctaacaatgtatcaaa

SEQ ID NO: 10751 - DNA, 59171 bp, Unknown
  gut microbiota DNA sequence
ttttattcgtcttttccagagatttaatatttatttttctccaaaaagaaaaaaagcaaaagagaatctggaaattgttggcgtaattgcttcaaacctccacttagcaaagtttttaccgtattcacggatacacccaattcctcggcagtctctttatatcttttcccttcgataacaatagattttacaaccatctgggttttaggtggtaatttctcaatctcctgccgaatggcttcaaccaattccacggagatcgttgccgcctcctcttctatcgcatcatactttagtaattccgcctgggcaaactctttctggtcccggattttattcaagcaagcattcttcacactccgaaacaaataagtacttaacgcctctggggtcaactgccgataaacacgatttttgataaactggtaaaacatctcttgcacgatgtcttccggaaaactacaatcatccaaaattgaaccggaaaataacaccaacggcttataataacgttggaacaataatttcccgccctcattcatatctttctgaaaggcaatcaatatttccgaatcggacactctcattataccatcccgttttttatttcttctataaagacaaaaataaaagcacctttatagaatcccataacatccagtgtcacaaagttaagaaaaaagtatttatttcaccaaatcatgcagaattccttgtaaaacaatcattaacattcgttttcacataaagaaggtatgcccaacaagtcgtaacatcgcttcccgcaacaacgaatagttattatatattaataaacatacttataatcaataccataacttacatgttgtcgttatatattcgttatcctttcgttaaaaaaggcttctataagaacgaagagataacgaaaagataacgaggacataacaacaggatataagctttggtagggagaaagacaaaactaggagaaatcctagggagaacctagggaaataatcccccttattcgaagttcattcgaagcttattcgtagctcaaacatcacggaatgactaagctctgagtaaacatcaaatgatctctgagggagtgagattatttgggttagattactactttatttgagttgaattagagtaatgacacgaacattcaaatctcgtcatttttccttctcacttttcctttcttctccttttcttctctttttttccgtcctttttcctccgcatcctttatcatcttttcattcctagctttcaatttcggatgcaattccaaatactgattaattgtatcaatctctacattaggcgatggcagaaaatccgcaatagaacagttgaaaatttttgataattcattcaaatgattcaaattatacttctctctaagcttataattttcagctctattaacatacgaactacctaatcttaattccattgagagtttcctttgactcatttttgctgcttttctaaattctttgaccttattgataacgaaaagttcaatttccgttttctttatatcctcttttacatcctgcattgctaccatttcaaaattattttagtgttaaaggaaagttttttgatgaattattttgtaaagacatatccatacaatatatttgtattattgaattacgtagagaggtcatccggttaatcacgttcgtaagtgtaaaaacaaacgaaaatttcatggagaggcagaaatgccagaagggaagttatgccttttaaaaggtatctgtattgtcaatattgtgaataatagagaaataaaatgtatatattctttaaccatttaacgaaacaattatgaaacagaaaatattacccttgtttagaaataagcctcatcagattatagcggatattctaaagatactccccaatagagcatctaaataaccttacaatgcaaaatgcatataaccgaatttaaaattcccgattatataaaataagaaaaaacaggagtgcattctggcttcagacactaagaatacactccatcacgttaattaattcacattcctaattaatcaacaatcaaaattatgaaaaaaaatccacaaacaaaagcgaggcaaaaaagagtactcgtaccagtgaaaacgaaatcaccccgaaaacgaaagggatggggacttatcgtattaccatttttatgttgtttacccttgttgtcgaacgctaatcccacaagacatcacacggggatgaacgaacttttcatgtcagaaaatccagtaaatgacacgcaaaaagaaaccatcgtcatccgagggatcgtgaaagacaaagaaggtactcctttaccgggggttacgatcttgattaaaggttcaaccgtcggtgtatccacggatgtgaaaggtgaatacgtgataaacgtagaaaaacgggattctctaatcctatcattctcgttcgtgggaatgaagacgaaagaggtaaaatggaacggccaacaaacactgaatgtagtattggaagaagaggtaagcgaagtagaagaggttgtcgttatcggttacggaacaacaaccaaaaaagatttgaccggatcagtggcaagttttgactcccgaattatcgaggaatcgacagcaacaagcgtggcccacatgatgcaaggccaaattcctggcttgagtattttagcaggagacggagctcccggtagtcctgcccggttagaaattcggggagtcccatcattaagcggggccacctctcctttaatcgtggtggataacgtcccgatgacaagtgattttgacatcaacgaattaaacccggatgatattcagagcatcgacatactgaaaggagcctcttccgcagccatttatggttcaagagccgcagccggggtcatcatgattatgacgaaaggcggtagacgagaccaaaaaccggtaatcaattacagctatgattatagcacaacgagcctcgtttccgatgtaaacacgttaaccacggacgagttcaaaatgctagtcatggaggccgttcgcaatggagcaaaagcagaagggtatgacgatattaccaaatactccaaatacgcaacatttgccgcatcggatttctttggagaggcaaataccccgtggatgaaatatatcatgcgggacggttccaaacagcaacataaagtctccatccgagggggcggtagttccttcggatataacgcctctttgggatacacgaacgagctgggacaagtgaaaggaacgaattatgaaagatatacatatgacatcggtttcaacgccgatattaataaatggatccgagctaccgtgaaagtttccggaacaatatccgacagattaagcaataatgcaggtctatctaccgcagcgaaagcccgtcctgatattaaagcttataatgacgatggttccctgtatttacattcatatctctattccggacgtacctattatgtcgtaaatccgattatcgaaatggaagaaaataccacggagagcgaggaccacaatgtacgcctcacgggaaatctggaatttcgaattttacccgaactgaacctgatcacccaatacacttaccaaacccgaaagggggagcgttacgcttatcaatccagccgcacgcaggcaggtagcgggtactggggagatcaaaaaggctacgggagaaaaacacatagcaagaccgatagtaaagaactcgagatacgcttatcatacatgaaagatttcggtgagaatcacaaattaaccgccatgctggcaagtaattataatgacgaagaacaggagtattacacgctatccatgactgatttcccggatgactacgtgcagaatgcaatatggcaaggagctaacccctataaatacggggcggtaaacggtagtgccagcgggtctgtactactatctttcgtgggaagaatcgagtataaattcatggaccgttacctagtgaccgggacaatacgttcagatggttcatccaagttctccccgaaatacagatggggtacttttccgtcattcgccgcagcatggatcgtttctgaagaaaatttcttgaaaaattcccaatggctatctttcctaaaaatccgtgccggatgggggaaaacaggtaatggctgggtcggtgaatacgggtggaggaccttgtattcctcaaccgattatcagaatatgccggcaacaataccgagccagatcgggaataatgaattgaaatgggagtcgaccaaacaatatgatctagggttagacttcggctttttgaagaaccagagaataagaggttctttaggtttctacaagaaaaccacgaaaggcctgttatatcctttcaccatggcattgagtaccggaatgggatctaccagcgtgaacttcgccaacatcgaaaacaaggggatagaatttgacatttcagccacaattattcagaacaaggattggaactggtcttttggtttcaatattgggaagaataagaacaaaattaccgggcttgacgcagaatacatctctgctcccggacaaacctacctaagcaacacggttattcgggaaggagaatcactaggattgatctatgggtttgaaaccgacggggtgttccgttcccaggcagaaattgactactacgaatcactaaacccggactatcaatatcaagagcagtattcttaccgaaaaaccattcccggagacttaaaatttgtcgatcaagacggtgatgggcgagtaaataaagtatatggaaatcatgaggataaaatcgtgttaggatgttctcgccccgactttgaaggtggattcaatacacgtttaagctggaaaggcttcaccttaagcgtacagggaacattcagttacggggcacaaaaggcatggacggcagaggccaatcaattctgttttgcctccacgggtacggcgaacgtgctggacgtcgctctgaaacgctggaccccggagaatccggatagcaattacccatgcgtgcgattggatttctacaacaatgatttcacagacttctccgtctataatgcctcgtaccttaagatacaaaatgtcaacctagaatacaagtttcccaaatacatcgtggacaagacaaagatattcggaaacatcagcgtcttcgcctccgcaaataacgtgtgtaccttcacctcctatcccggcccttctcccgaatcatggagcagtgatgctatccaaggggcttccgtagacacggaggcttatcccaaaaccagaacattcaatttcggagtgaaagtaaccattaaatgatttaattatgaacaagatatttttatgtagtttattgtttctctttgcaataacgggatgtgacaacatgttcgacgatgaacttcctccacatgatttagttggagaaaatgcaatcacgaacgagacatccgcagaaacggcgttaaatggcatcttctcgaatttacagggttacgggacgatgagcgcatattacatctgcgacaacgagtaccgcacgggattactaaccggaacttaccgaggtacattcgaaacagatggtttgttaggtttcaaattgaccgaagaatattcatacgttgctgatccatgggaattagcttataaaatggtaaacgctgcaaataatttcatctattacgtggacaaattatccgagaacctgtttggcgagaaccggaaaacagaaatgttggcagaagccaagttcgcccgtgcattcgggcatgcatttctactaaggagatacgggtatttctgggatataaacagccctctcggtccgattattcgtctagaaccttcatccatctcgaataatagcatgggacgtagttctgtaaaagagagctatgaaaaaatattcgaggacctagattacgcgatacagtacggtccccggttttattctaaataccgttcctgtgctacaacagcaaaagcttttaaagcggatattttaatgaatcgaggagaagaaggagactacgcggaagcgattcgattggcaaatgaagtgatcgccagtgatgagttcggattggaagataaatatgaagatatttttaccaatgggtactcttcaaaagaattgatgtttacaaggcatatcaagaccccacccagtatggatgataacgtggggagcctgttcaaaatgttcggtggtgcaacctataaaccgacagagatgtatttcgagattctgtcccaagacgataaacgttatgaagcaactttcgattccatgatgctcggcaacggaacggctgcacgaaaaacacaggtgtggaagaagcattacgtcacatccggcgattgtccgatgtattatatgcgtgtggcccagatgtacctgatcaaagcagaggcgatggctcgcacgaatgcttccataaaagattgtctggacgtgctgaatgtcctacgccttcgttccggtaacacgacttttaatgcggccgattacagttccctgtcagacgtactggaagaaatattccgagagaatgtacgggagatcggaatggaaaacggggctatattctatctcgccgtgagatataccgagggcggtcatcggaagttgaaagacatgaacccaaactttgaacatgacgatcaattatgtttccctatcccgaaagccgaattggaacataatttcatagtagaacaaaaacctttataatactagacaacatgatgaaaatgaatatattgaaaaacggatttcaggcattaattattatgtctctgatggttgcctgctcactcggcgacgtgttggaaccctcagatggagtgagtatggcgttaatggaaacggtcgatacggtggtagccctaccgggagacacgataagtttcaaatttattgcgtcaaccaacggggcagccttacgtcgcattgaaatcgtagagaaaagccatgatttcaatgaattgaaggattctatccggttcgctttagtggatgaaacactggaactgacggtagacgaagaggggtatttatcccgtcccgtttcctccgtgatgatgatttatcctgttatcgtacccaatgacaaaacaatcgtgggcgaagtacttagcatggccttcaaagcgtataatgacaaaggaaaatccggaagtataaaatcctcgttcaagatcgtaaactatgttcggaacacgagctggttatggttgtataaacttgctggtaaaacccaaggaagtatgttttttaatcccgcaaaatacaaggtctattccaatagcagtttcgggactcacaaggacgaaatagacgtggccgcttacacggcaagcgatgggaaacactattttctgaatccagcccacaaggaaacacaggccttgtacgtggcagatgggatggattatgatgcatcaaccatgagaacaacaaagttcattccattggataatgtcaattttgaccttgtcggggatacggaactggaacaaatggacttctcgaaagccgtggataaagtcgaagtaacaaccggaagtgtcatcggtttcgagaaccaagacgggcgacggggaatcctgaacgtgaaaatatcatcttccatttacccgacgatccagtgtaaatttcaagcggtagctaaaaaacaagaatgattttaactcccaaatatcatgaagaacatatttataatcattattttaacgttctgtcctctcgccagtttattcgcacaagacaagtacgaaatattcagaaaggagatgtttcttatcgagaaacaagagaatgaatatcgaaaagtaatttggggtgaaaacgatttttcccaagactacaaagacagcgtttataaaaaacatcaagtactggtgaaagaaaaagtcgagtttgccaagaacaccatccgagagaatagagatgacgaacgattcctgaaagtattggatatttatgtacgcaatttcttatccctggatgaatttgaagcggagttgaaaatgttttcatttcaggtacaaaaaacagaagcttgtcaacgttatttcgagtttatcaagtatgcaaggatcaatactcccggcaaacaatgtattgatttcgagatgaaaggacatgatgggaaaacaataaagttctcggatgtatataaaaagcataaacttgttctcatcgatttttgggcctcctggtgtggcgcttgtcgggcaacaatgccctccattaaaaagatgtatgaagtctatcatgaaaaaggcgtcgaagtagtcagcgtgtcgctagacgacaataaagaggcgtgggaaaaagcttataaagaagaaaacattccttggatagacggtagtaatctgttaggatggaaagatcctgtcactctatggtacgccattcggggaataccacacaaggtgttagtggatcagcatgggatcatcatcgatagtggattttatcaattaggcagcttggaacagaaaatagacgaatatcttcattcgcataaaaattgatacttaaaggggctgtcccaaaagtaaatagacagccttttttccttattttagaaggttgttcaaaaagtgcttagatgcaagactctgatttacaaagacgaggaagcgtactaaagtacgtgaccgaatctttgggaagcaggaacgcagcagatgagtactttttggacaccttctttttactcgttcagtttatattccacctcgataatacagacgacagtccattacgacattcttactttcggagcctgcagctctaattcattcgcttcatctacctttcctaacactctcaatatacgagctttcactttcatgtattcagacttgtaataaccagaaggagctgattccatcaatttatccaaccaagcatttgcctcgttcatgaatgtttcatttccacaagtttcaacatgacgcaaaaagtttcgaataaagtccaacttatcctgcggggtatagaaaataccgtattggagggagtgatacatttcgtccaacataccacgaatgtctcctgttttcaaataagccgcagcatagagggatgccacatactgggggactttgggcaggggttgagtaaaaatgtaagcaagcagttcgtcatagcgttgctgattgaatacacccttatcaggcgtccaccaaacgaaactagatacggcacttttcaaagtgtaatcaataaaaatatcaatggtgtcgcgggaaacaacatgagagaaatagtagcgttttgcagccacttttttcaatatcggagaaagagggtctgaaagatttcgaataataatatcccatgtttctcgagtataaaactcggcatcggaaagcctattgatatactccgtgaccacctctttttgcaactgtgggcgatatgctttgaacaatacatcaatgtactgtttcacgaaagcacggtcacgctcaccagcatcataacgcctttggaagtcaagtaaagtttgttcgcctttcaacgctttttctccatttcggattaattcgtgcgcctgctggttgcccaccacacaatgtttcaacatcccgtctttatccacatacaacaaagttggaaaagcggcaacgccatatttccgagccaattccggaccttcacctttttccatatcaatttggaaacagataaagtttgcgttatagaaatccgctacactgtcttgtgtgaaaatgtttttcgccaacattttacaagggccacaccaagaggtgtaacagtcaacaaatatcattttcttctctttttttgccatctttagcatttgctcccaatttccttcccggaactcgatggagcggttctgcgcccctgtcttcccgaagagacagagactgcagaccaataatatatattgaattattttcattattgtattgtactaatttcgttcacgatatataacatctttcacaacaccgaatccatcgtaggaacggtaaacagaggcattctgcgaagaggtcgcaggtaattccaacatccggacatgacctttcaaagcattatcaccaatagtttccttactaccgacaattaaacggtattgcatttctccactacctgccggtttcgaataatctcccattacaaatatattgaacttcaacatggttatttgctctcctgaaaactgattaacaatttcgccactctccatcttgatgggtaataaacgacatgctttcgaattaatgttatagcaatatattttgttatcaaccgcataatacaaatcgtaatcacgcggatgtacggcaaaagctgttgcacgttcgatctctggagcatttagttggtaataatgcccatccacttgagcaacgtaattataattaccaacctctattccatataaccaaagctttccggcaccatcctttaatattgtgtatgtttcccctctactaccatgcatcgtgttagataaatgaacaaaacttttgcccgtagtaaaggaaaatactttttcctctgccgacggcttttgcaccttattcatatcactcgtgacctgtacaaaacgttgatttgtcacgtcatacaaaattgccgtaccaccataagtgttataataaatacctgacattcctattgccggagcaacatcaaaataatccgtctctccatcgagtttatttaaacgcatcccgtatattgctccaattattgttccttttccatacacgccatccttgcctatacaaaggcgacaatctccataagttccaaccatacaggtaggaacaaaaccatcacgccactctgcaaactcatacctcaaatcgttttcataatcatagctgaaatcatcgtcatccaattttgcttgtgcttcttcggcaaggaaatagacgggacgaggcgcagacattcctcctaacaaatgaagcgacttcggtcccttaaattcccgcaacggactatcagcccaaaggtttctgattatttcttcttcaggtgtagaagtcgaaatcatgtccaaacgtgaaaatccctctgaatcctctgacaaaatcaaccaaccttcataggtggcagaggtcacttgtaaatcaaatccttgacgccaagtgactcccgatgttttatcttccaccagcaaataaacggtgtattttgcttccggtagttgcacgaaatatttcaagtctaaccgattactgtccaaatcaaaagttgtcgcaccatccaccgaaccggatttcactaccgcttgccatttaagcgaataattatttaaatcttttccctctaaagaaccttctatcacaggggttacccgcacagtatctaccagacgataggcatattgcatttcttctgggaaaccggaaaaggtcacttgattaatttccgaataatcataattccccaaatccctgtagcagctggcgaatgatagtacaccaagcacgaacaagagagcatatttcaatttttccatcatattcctatttttttattgatacaaaaagtctcccattctcatctccttatctccatccattattgggtgttcatccaaataggctttcatgtaattggcgatgtagcttatacgtccgaatcccatataagaagtggagaggaaagaagtacgcgggatttccataaccgtacaaatagtctcgaacttgagaggagaaaaagtcccaaagtaatactcattccaagtgttgggagcttctttcatcacgttattgaacagaatacggtgtgtagtcttcgaatagacaactgccgaaccgctcgtaagcacatcatcctgatagtacaaataaaagtcatcattttccactaattctaaaatcacttccttatccgattcgtcattcgggcgtttcaccacaacgggcaccacacaagaagttgttccactcggcacttcatagcgttcagctaaagtttcataatcttctcccaccatggcattcttttctactaacttcacttccacataacggctcacaccttcttccacatcacccatcacggcaatctctaccgataccgtatccacatcctcatccagataggcaaaggaaactactgtagaatctacctccatatttatgtatgcgacattttgtccagaccaagtgtcgatcttttgttcacaacctaccaagcttaacaagcaagtcaaggccaaacataataatatagtcttattcataatacattacgttttaagtcatctaaaatccgtttcactttgcggcaaaggcaaaacatatttagtatcgttcatattcacattaccaccggagaacgctgaaaggatacttgaagcattcatccgtttgtaatagaaaaacaactgcccttctccccaaaattccttttgatattcgttcagcaatgtactctccaactgggaaacggaagtcaacaattcgacgccacgattgtccagtacaagattgatacttgccaatgcatcggtttcattttcggctgtctcagcaatgatataatacatctccgacatccgaatcatcggtagtaaatcagcgtaataggcatcggtttccaaatcagaatatttatagaaacatctattggtatgtcctgatgctactttccaattagactcataacgccaatcattcaacgccagtgtaccgaaaatattttccaaataggtagaaggggtaagccacatttggtcatctttcaaatccggagtgaaataatcggtaaagattttattacggttcggatattgtaaagcaaataccaattcagaagagaatatcctatcaggtttctgaccatcggtcacttgcgattttgtggtaaaggggaaatattgttcctgcactgccacaacttcacgagctgccgccaaggcttcgctaaacatttccgcatacaaatacactcgtgcctgaagagctttcaccgcataatagtttagacgaaatgttcgataatgccaaaaattctcttcttccgtagacccttcctccaatagcgggccctgttcaataacaggatcattagctagacgcctttcagcttcctttaaatcatcaataacatattccaatactttcgaagctgacaacagatccgtaccggacaatacaaattctttgttataaggaatggcacgtccttctttgttggttttgtagacaggaccaaacaagcgtaacaaatcgaaatgcaacatggcacgtaacgcataagcctcacctgtaatccaattatattgatcacccgtgaacaaattctttttctcatcggcatttttcaataatgtattcacgttggcaatcaaagcatatcctttttcccaaataccggcaaaattagatttcgagtaatcggtcgtgtaatcaaattgtcccaaactattcaagttctgcatagtaccataattggcaaatttataacgctgcgctaatacttccacagtacctgtcaacagatctcctccatacagactggagctacacaattcgacatacacaccattcaacccttgacggaatccttcttctgaagtaaacatttgttcctccgccacttgatccaccggttgtacatccaaccaatctgtacatccagtaagcgaccacaaagcgatacccaaaacaccgattttaatatatttatcaaacttcataatcatccgattttaaaaagttacagatactgatgccgataccatacgtgcaaaaggatattcaataccccgttcctctttcacacttgatattcggaacacatcattcatattcacctgcaaacgcaaggctgaaaatccggctttctcaatccattcttttggaaaatcataaccggctgaaaaagactcacctttcaggaaattagaacgctgcacaaaacgcgaagacatttgtgttgtttcagttagagagattcccttgaagcgggcgtgttgtccgggcttttcccaacggtcatacaatgcacgcttatcttggttgtatttcaagttatcttcagaaatattttccactttggtatacaatgcctcgttgaagacatcacctcccaaactatagcgtagatgtgcagagaaggaaaatcccttataatacagcgtagtaccaataactccttccaaatcaggttctgtatctcctacctgaacctcatcttttgtctcatatgtataagtatatgtaccgtcttttttcaagaatacttctttaccattcgccgggtcgattcccaaagaacgtactgcccataaggctgtaggactacctccatcgtaataacgcaccaagcttgtattttcattttgcgcattaaattgactcaagctattgcctatattccggtattcagacttttggtgacggaaattcaaactcagattccaattgataccttcctccgggcggtaaattggtgaatatttaactgtagcactgtaccccgtgttccattgctcaccgatatttgtggctatcgtttttgtaccaactgaggagggcaaactgattactgccaacaaagggtcagttcttttctgataatagtcgaagtttatattgaaacgattcctcaataaagcaatatcagcacccacattcatatctaacgttttttgccatttcaagtcaggattaccaaatgcatctaccaacaaacttgttccaaagttattagagttccaattattaaaagaatacgtagtatacgattgataagcatcaaaattctgattaccaggattaccaattgatgccctcactttcaataaagtcatccattcggcatttttcaagaagttttcgttatgaatattccatgccacccctaccgaccacgtttcggtataacgtttattactcccaaaaaccgaagcaccatctaaacgaatatttgcatcaaacaaatagcggttgtcgaaagcataccccatattcaaataccaactgttggagcgggtgaccgtttccgtgtaatccggtttaccgccattcggaaaactggtggcaaaagacggacgggtaaaatcaccaacaggaaaacccactgcctcgaaagcctctgtcttcaactcagacgaacggaagttagcacctaatacagcatttaattgatgtacgtcattaaacaatttaccataagtcacagttaactccccgtcatagatccaagtgtcgtaatccgtcgatttataacttccccgttgggttcgtgccacttcatcgaaagaagtatgctcgggggacagaaaatactcagctttttctgattttttctccaaactgatacgtccccgcaccatcacttcttccaccgggcggtattctgcattaaatttattgataaaactcgtgcctttttgacgatcataactgttcaaacttgcattatacaagggattctcaaccgtatagtgctgttgattaacagtataatattcttctaaataacgggtaacattaccattttcgtcatacttttcaaaataaggatttgcttttgcatactctgaaaaacttaccgtcggattttcttttttcgtataatcaaatgacatcttgttgaaaaaacggaatttcccttttcgataattcaaatcaaaattcataccgataacgtcgtttcccgaatttttcatcactccatctgttccattataggtaacacccaaaccataacgtacagcattgtcacctccttctgcataaatattgtgtttatgtaccaacgctactcgtaacggctcacttaaccaataagtattaacacctcttgccacattcgcacgatgaagattatacaaactatccaaaaataattgttcttgggcatcatatgtataatccgatttgtagaaaccagctttctgttcaaatttcaatttctcacgtgcattcatcaaattataatccgacaaatcggggatagacaaagaaaaattaccattgtatgacactcggaatgttcctggttccggctgtttggtctcaattacaacaacaccgtttgcagctttcgaaccatacaaagccgtggatgcagcatctttcaatattgttacagattgcacacggtccatattcaaatttaccactgtttgcaaatcagtctcgaaaccatcaaggataaacaacggctgattcggatcggtatcatattgttctttcaatcctacaacactacttttaccacgaatttcgatatccggtaaacgattagggtcagaaccgtaatcgttattctccataatcacgaaagaaggatctagtgtctttaaactctgaatcaggttttgcgttccaaccatcttcaactcttctttcttgaatgtagcagtggaacctgtaaaactctcttttttacgctggaaaatacctgtcacgaccacctcatccatctcactcacctcatcttccagcgtgatgttaagttctgattgaccagcccatttcacttccttcgttttcattcccacaaacgaaaatatcagagtaacagtatcctgttttagaatattcatggaataatttccatccatatcggtcgcagtccccacactcgtccctttaatcataactgtcaccccaggtaaaacgccaccttttgaatctttcaccactcctttaagaaccacgctttccttcttctccggttcattattaaccttcttgacagagatcaggattgtctgatcttcaatctcatattgtaaagatgtatttcgtaaacacaactttaacacctcatctaccgaggctccatttactttcaaactcacattttttaccccctgtacatcctgtttattatacaaaatataatacccagattgtgcatgtaactcttttaacacctgttccaagcttacatcttgaacctccatcttaatttgtttctgactataagtcggcattgcaaacgcaaacaccggcaacaacaccataagcataacaagtttcatcactagcattttttttccacgccatcgccatggatggagaattaattcatcttttttcatacatttgtttagtttttacttaaatactcgcatcaaatgccaatccgaggcgagttttaaaattacaacagtccggtaagtccttaaaacttagcggacttcttttattacaatctttttaccttctatcaaataatcaatattttgagtttttttcaacatatccaatatcgtagaaatattctcgtatttccgaattaccccgtaaaatactttttctttcaattccggtgtctcaataataatatccacatcataccaacgggccaatttattcataatcgtaaccatatcttcctcgtcaaacatgaaaagtttatctttccatccgatataattctcaacatttacttcccgcatagttatctttccactatttttatccatttccgcttgatgtcccggcgtcagcaaaacagttttatcagattgatccaatactacccgtacactacccgaaactaaagttgtctgcactttagattcatccccataagccatcacgttaaatgaagttcctaaaacacgcacacactgtcctcccccatgtacttcaaaaggcttatcggaatgagaaacttcaaaataagcctctccctcaagatatacctctcgtttttccccgataaaactaaccggatatcgtaaacgggtatcagaatttaaccatacccgagaaccgtcggataagatcagttgatattcgcctccccgggggataataatggtgttatattccagtgtagatgggttacccgagtgattttgtttataagcaagacgattggaatcattcgttactacagttccttccaattgtaattgccctagatttttccctagacccaattccactttccgcccgtcagccatctccagcacggcacattctttaccaggaataatatctgtagctaacggagatatttcttttttctccaccatgaataaaaatacacttccggcaataagtggtattaataaaattgcagcaatttgttttatacgccgaataagacgagtacgctttccctgtttgcttaccgaaaacatcactcgttctttcaatgcttctaatgaataattttcatactcttgcaacctccccgtcaaataatcccgctctaccagccgttcatagaatagttgatgctcgtcattctcatggatccactcctccaacatcttttcctcctcttgccgaatagtaccattcagccgagctgcaatccatgaggctattttcaaattattatcatcatgcatatcctgtcattttacattctgcacaaagaacgaccacccttctcaaaaagatgacaagaatcagattttttttgaaaaaaaaattcaattaaataaatccatcattcccaaaagcaccaaaagagtacccatgctaaagcgtttttttaatacaatcatagctctctgtttctgagtccgaaccgtattgatcgatatagataacgaatctgctatttcctgattacttaatccttctaatcctaatcggaatactcgtctacattctggaggtaattcgtcaattgcccgataaatttccccaagcacctcttcctcaatcattttctcatccaaagaatcttcacttaattcttgaattaacgccgcttcatgtttatgaacaacctgctcatgctttaataaatccaaacatttattacgagccgtctggtaaagaaaaacccgaatcggaagtaaggacataaaatcttgacgtctctcccacagggttacgaaactttcctgcacaatatcttcagagaaagtactatttttaagaattgaattacaataaaaataaagagatttcccatatgtatccaagaaaaaagcaaaggcatattcatcaccatcctgtaatcgccttacaaggtagtccacattgtgcctaaactttctatatcgcatctccttatccatcaaacactcaatttctaatcatgaataaaacaaagatgagaaaaaaaatcatataaaaaaagattgttcaaaatgaacacagacaaaaacaagacaataaaacattatgaatcaagactattcccatatcatcaataacaaacgatttctcctaaatatacaatttaggcactagtgaaatacgtttaacaaattaacacgtcggctttctctttatcgggagtttcgggaaaagcttcctaaaacgtactaaataagtcgtgacgttacttccagcgacaataatcgtcacggcaaaaacaatcatcatgatcccacaccccactctcacggtgaagggctctccaaaaatcgtcaccccaaagaataccgctgtcaagggttccaaagcccctaaaatagccgtcggggtagaaccgatatactggatagcttgagtggtgcaaagaaatgatatagcagtcgggaacacggccaaggcaactagattaccccacagataccacgtatcaaccacgtgtaaactagcaccaaaatcaacacgaaccaaaaacaaagacaacccgaaaactaaaacataaaatgtcagtttcagtgtcgcaatttcccgcaacaagggacgatttacagcaacaatataaatggcatatgacaaagcagaagcgataaccagcattactcctgtcagactcagcaccgaaccatcctcacctttataaagcaaagcaattccccccaaggccagcattatacacaaaatcgtttgtaacgtcagcttctctttaaaaagaaaagccatgatcaacgccaccatgatcggataaacgaataacaaggtcgacgcaattccagccgccatgtaattataactttggaacaaggtaagagacgaaagagcaactaataatcccatgataattaacggaaatatttcttttcgcttcaatttaaaatctcttccccgtagcttaatcatcatccccaacaccggaatagcaaataaatatctgaaaaaaagaactgaatccggattcatacccgcctcgtacaagggaagggcaaacaagggattcatcccataggttgctgccgcaatgacccctaacacgtatcctttagcttttacattcataattgcaaatgattacattaaattggcgacaaagatagagttttgtttgtcatcatgaatgatcattctgttcaaattattttcttatcacacgttatattgaagaaacagattactacttttaacaaaaaaacactatctttagactctaaaacctcaaactacatatcaaaatgaaaaaactattctccacgattatctgttgtctaatctgttccacggcattcatgcaagtgaaaccggaatggcaagacgagaccataccttttgtcggaaaagaatatccccggacggccttcatgacctatagtgatgtgaataaagcccggagcaacgatttcaatacttccaccgattataaatccctcaatgggaaatggaaattcaactgggtttcctcctacaaaaaacgcccggtaaacttttataaaacaaattttgacgattcgacatgggaagagattgatgtccctgcaaactgggaagtaaacggttacggaaatgcactctacacgaatcatccttacgaattctgtccccgtaacccgcaaccgcctcttttgccggaagaaaaccctgtgggatcttatcggaaatatatcgagattcccgaacaatggaatgggaaagagatattcctgcatatcggtgcggtaaaatcaggatgctacctgtacgtaaacggcaccaaggttgggtacagtgaggactccaaagatgccgtagaatataacattacccgctacctaaaactgggacgtaacctcatcgctttagaagtatatagatggtcaacgggaagctacctggaatgtcaggacttttggagaatcagcggaatcgaacgagacgtttacttattcgcacaattacccttgcatcttcgggatttctcaatccgtcaagatctggacagcacgtacaagaacggacttttcggactagatttattcatggaaaacaccaatccccggcaaccgggacaggtcaccgtgttctatcaactggaaaacacctcgggaacacgagtggcagaagggacacaaaccattaaaatagattctgcaacaacggttcatttcgaggcgaaaattccacaagttgccccgtggacggcagaaactccaaacttgtaccaattatttatccggatcgaacaaccggggaaaaccaccgaagtcattcctttccgggttggtttccgaaaactggaaatccggggtaaccaattcctagtaaacggtcgtgccgtactgattaagggcgtgaattaccacgaacacgacgagcacacgggccacgttctcagtgaggcgcacatgcgtaaagatttcgaaaacatgaaacgtcacaatattaacgccatacgctgttgccattatccccaacaaagacgcttttacgaactttgtgatgaatacggattttacgtatgcaatgaagcgaacatagaatcccacggtatgggatacgatcttcgcaagggaagaacgttaggaaataatccgaactggctgaatgcccacatggaccggaccatgaatatgtacgaaaccgggaaaaattatccctgtattacattctggtccttaggaaatgaagccgggaacgggtataatttttacataacttataactggctaaaatccaaggacacgacacgtcccgtacagtacgagagagccctgcttgaatggaacacggacatctactgtccgcaatacccgggtgcaaacacgctggaaaaatggggtaacacccaaacagaccgcccttacattatgtcagaatacgcccatgccatgggaaacagcaccggaaatttcatggatctctgggatgcaatctatcgctaccccaatttacaaggcgggttcatctgggattggattgaccaaggcatccttgtgaaagacgaaacgggaaccccgttctgggcttatggtggagatttcggagaaaactccccgtcagacgggaattttttgtgtaacggagtggttggtcccgaccgggaaccgcatcccggtttaaccgagataaaaaaagcctaccagtacgtgtggtttcagcccgttgacctaagaaaaggaatcatccgagtagaaaatcgatacgatttcacgaacttgaatcaatacacgatcgagtacacgatacaggcaaacacggaaaccgtgcagtccggaatccttcccacgcagcatctcgcccccgggacaaacaaacaactcacgattccactcagaaacgtaaagaataaacccggaacagagtatttcctaaatctctacgtgaagtccaagcaagcgaatctctccgtcccagccggctacatcgtggcctcggaacaattcagattaccggattacaccccggcacccgtgttccgtcctacccccgaaaaaacgctgaccatggaagaaaacggaccggacattcatatatccggctcgaatatcgacttcgtattcaacaagcaaaaaggatacgtgacgtcctaccggaccaatggcgttcaatatattgctgaagatttcgggttccaacccaacttctggcgaggtcccacggataacgactatggtaacgggatgccgaatcggcaacaaggctggaaacaggcaagcaaaaatttcaagattgccggaatcagaacctctacttccgtaacaaacacgaacctgaccatcacgtacagacttcaggaaaccaacagcaaatatcacgtgtcctacacgttatacccatcaggcatgatccacgtggcctgtcacctagaaactcaaccggatgcgccagaacttccccgaatcggggtacgtttcagggttcccacggacgtgaatcaactggagtatttcgggcggggacccgaggaaaactattgtgaccgaaataacggaacacttatcgggtactacaaaagcactgccgagcaacaatacgttccctatgtacgcccacaagaaaacggccacaaaacagaaacccgctggctggctctcacggataaaaacggggagggcctcctgttcattgccgactcgaacttcatggagtttaacgtttcccggaaccggatagaagacttcgactccgaagaatccaaccgcccgtatcaatggcaaaacttcacgaaagacgaatcccatgacccgctcatggcgaaaaaccgaaaacccaaacaaacgcatatcaacgacatcttccctcgtaatttcgtggaagtatgcatagatcaccgcatgatgggagttgccggggacgatagctggggatctcaaccttaccccaaatacaagctcccaacaaacaaagattaccactggagtttcaccatcctaccgatcaaaaacaacatggagatcagcgaaaaactaggttatcaatatctaccctagaagaaagagtgtcaaaagttcgtaaagtccctagacattacgaacttttgacacattctcctcacacgattctcatgatctgcaaccagaaaaatagacctcccagacggctttttaatcgataaatagcctcccttttacaagctcgcacgtctttttccggaagagaaagaatttctgcaatttccttgttattcttaccttgaaagtataaccaaaatatctccctgcaatcttcaggtaattccgtaatagctaaatataactcttgataaatatcttcccgtaccaaattataaccctttcgtccaaatgatcacggacaaatataaaacattctttccaacaaacaaaaccctatatagtggataaaatttatagaccaataaagaatgtgaagttaatcctagaacgggaaaaagttgaaaaaaattaagagggatcatcaaaatttgatcatcccccaaatcaataatctctactgaaaattatttaatatttatccaattcatttaacgcaaaagcataagccccaaaagcaatagccttgcttgttcccaatttggtcgtgatcactcccattctcttcaccggatcgtactcaatcgtttccgtcgtccccggaactaaaatttgtctagaggttggagctaagaatgcagttagtcccgccgggtcatccaaaaaaaaggctttcatttccattcggtctgatggtgcaccctcgtacattgctaccgttccgtttagctcacgaataaccgatggcatcaagtatttatgggcagcaacaatacctccgccaagaacaacgatcccatccacgacagcgtttattgaagcaatcgcctcaccaagcacttctccagcgtgttcgaatgttgtgcgagcggaagcctgatctccttctaaagtaccctctgcaatatcgaaaatatcttttggcgttaatttgcgaggatcaccagaaagacgagcatattcacgtttgatagcccggatagagataccctcttccacactataaacgggttctcgtttatcacgcaacacccaaacttccgcagccgatccattgtctccaagaaaaagctccccgtcacgaaccactccaccaccgaaaccggtccctagcgtgatcccaattagatttttataaaccttactcttacctgcattcccgagcatacggtttacctctggtaaagctcccgccaatgcctctccgtaggcaaacaaatcaccatcattattaataaaaaccggtattccgaatacattcttcaaaaaggcaccaagtgccacaccaccacgaaaagctggcaagttattcaagtctccaattatcccattcacgtaatcagccggaccaggaaaggcaaaactgatagccaccggattatccggcaatttcaacttgatcgccgagaaacctgtcaccaaagtctccagacatttttcaaggttatccccattcgaaggtaacacaataggttcaactatctcttcattagactggattgcagaaaacacaaagttcgttcccccagcatccaacgtcatcacgattcttttatcaaactgatacatgacaaatttattagttcaaaaatcacgagtttagaattatctctctgtctttattcccacagaacaatacaagaggtagagcaaacaaccaaggatcaccaccagcgaaccgacctgtgtaccgatcaagtccgtgcaataacccatcagtggaggaattaccgctcctccaaaaattcctgttaccattaagccagagatctcattcgctttcctcggctgagcctgaattgccatcgagaagagcaacgaaaatatactcgaacacgtgaatccgatcaaagcaatcgacacaaggatcggatattgacccgacacaaaaaacaaaacgactagtgcagcaattgccactaggacgttcacccgaaaatacttgctacctgacacccgtgctaggagaaacgtccccacaaaagcaccaatcgttcggaaggcaaaataaacactcgatccgataccagcctcagcaatatcaaagccacaacgttccagcaataacttcggagccactgtattcactcctacatcaacacccacaacgaaaacgatcccgaggaaaagcaacaaaatcgtccggtctttcaacaaacagaatgttgctccccatgaagaggtcaactgtcccgaggtttcttccggaatcggcacaaacaataaccaacacatcgaaagcaaggtcaataaagcaaataccgggaaaagatactgccaattacctagcattgtcgctgcaaatgcagctataaaagggccacagaaagatgacaccgctttcaacacctgacctgccgtcaacgagctcgccagaacattacctttcaccacattcgttaacaaaggatttaatgatacctgcaaaatcgtattaccaatacccaacagggcaaaagctagtaagcacgtgtaaagatcgtaatgaacaaaaggaataatcataccaaccagcgtcaccaacatactcgccaaaaccgttttcttacgcccaaaccaattcataaacattgcggcaggaactgcaagcaacaaaaaccataaaaaaaccatcgaaggaagaaaaccggcaatagtctcgctcaatccaaaatctgacttcacgtaactcgtcgatatacccactacgtcacagaaacccatgataaaaaaaccgaacaacacgggcaacaaggccttaacactcgtagaattttctttcataattcgttataattcaaaaaatgattttattgtcatttacattttttctcagagatggaaggaggaactgcatcatctgagatgccacgtttgtaattcggacgagcactcatcacaaaatgtaaatccatcccgtcttttatatcattataggtaatatacgatttgttatatttctctccatttaaataaatctctttcacatatacattcttcttcgaccaattcttagttgtcacccgaatatgtttaccattactcatacacatatctaccgccggtaaccccggagatcccaaattatatacattacttgatggggcagtgggataaaatcccattgtattaaaaatataccaagcagacatctgaccacaatcatcatttccacttaaagatcccggtgtattcccataaaatgtatccataatataacgtaacttctcctgacacttccatggttgcttcaaataattgtaaaaatacaatatttgatgacaaggctcatttccgtgccaataagcaccaatacgcccttgaatatcatgagcacccggaatatcatcggccatcttcgtcacaaacatagaatccaaacgtactcgcaataactcttcccctgcctcattaatatacccctgaacatcatgaggcacataccaagtgtactgtaaagtaaacccttctgtaatatccccccagccatttacagaccctgggccctgataagctatcggagaaaatggcgaacgccaattcccctgactatcacgcccacgcatatactttgtttccgggtctatcagatttttatatgacaaagcacgtttcataaaaaaatgataatcatccatttttcccaatttttccgcaacccgagcaatacaataatcatcataagcgtattcaagactcttagatacagattccttttctttgtcaaaaggaacccatcccaactgagtatactccggcaaacaatcataattagggtttgtagccgttgttttcattgcctcgtaagctcgttcataatcaaacccttgcacatctttcatgatagcatcagctattaccgacacagcgtgataaccaatcatacaccaagtctcattcccgtaaaatgaccaaataggcaacatatgttccacactcttatcatagtgtaccaacatcgaattaataatgtccgcattaatatcccgctgtaccaaattaaacaaaggatgtaacgcacgataagtatcccacaaagaaaatacggtataattagtaaaacccttcgcttccccaatatttttatccaactcccggaaccgcccatcagcatcctggaatataaaaggatgtaagaaagtgtgatacacagacgtataaaacgtttctttctgttcttgagaaccttcaattacaaattttgataattgatcttcccacaatttttctccctccaccttcaaggttgcaaaattcttcccttctaactctcgtatattgtttactgccccttgagtactaacactagaaatagccacttttatcgtaacagtctccccttcacaagtcggaaattgcatccaaaaacgcaagtcagccccccaagcttccaaatgactccggaaacgttttgtattataaaccacgggaattgtatcctgcataatcccaaaattctcgaaaggacgggaaaatactgccgtaaaatacacgtgacgctctggtccccatcctttcacaagcttatagcccgttaaggtggaatcattctccacccgaatattgctccacgggcaactctgccacaaagtatgattcaaatccaacaatataaaagaactatcagaagccggataagtgaactgtaacattccacttcgaaccccagaggtcatctctgcttttaccccataatccagtaattcgaccccataataattcggacttgcccactcccgttcatggctataacgagaacgataacccgcatccggattctcatgtgttcccggggtgaaataaatttttcctgttccgggcataaacaaaaagtctcctaaatccgggatacccgttccactcaaatgtgtcaaactaaaacctaacagagtcgtatgatcatacttgtacccggccgctgcatcataataatcaaaatctgtatccggacttatctggatcccaccaaaaggaatttgcgaaccgggataaatattcccgtacccggaagtcccaaccaaaggtcgcacgtaagaaattaaaggttgttcttgagcatttaccgatcgaaatgccaataaaactaaaacaataacaatatacttcattgttcaacatttaacggttattattctcatctgacgtcatggaataaggtttctgatcattggtaaacacccgttttttattcggactactacacatctcgaaatagacttcccctccattacaaatatcccgatgcgtcaaatatgctttatcatactctttaccattcaatttcacagatttcacgtaacgatttttggcacttacttttggagccttaataaccaaatctttaccattttcaagatgtattaccatttccttaaaataaggtgctccaaaaacatattggtctgatcccggacaaaccggatagaagcccatagccgagaaaatataccaagccgacatttggccgcaatcatcgttcccgcaaagcccatcaatattattccggtacatccgatccatgatctcccgtaagcgatactgcgttttccaaggttgtgaagtccacatatacaaatacggaatatgttggcttggctcattaccgtgtccataatttcccatcaatccctcttgagtaatatcttccgttttctcgtaatatttagcaggcaaatccatggtaaacaaagaatccaaacgctctataaaacgtttatctcctcccataaaaattttcaccccgttcacatcctgaggaacatagaaagaataattccaagaattaccttctatgaatccctgcccatgagtatccaacacatcaaaattcgctttccattttcctactgaatctttcggacgaataaatcccaaatcctcatctaccaaatatttataagcagccgctcttttcagatacttgtctgcaacctcttgtttacccatcaaccgggccatattatatatcgtccaatcatcataaccatattcaagcgttacggaagcagaattaccacttttattcatcggcacgtatcccaactccatatattccttcaagccatccaaataagggatcgtcgaattgctcatcacggcttccaaagccaatttttcatccatctctattcctttcacataagcatctgccaccacggaaacaccatgatacccgatcatacaccagttttcgttagccatatgcgaccaaatcggtaaagccccgtgtacactctgttgataatgtttcaaaaaagaagcaatgatatctttactacgtgacggataaaacaaattaaacaaaggatgtaatgcccgataagtatcccataccgagaaaaccgtgtaatttataaaatcatcggcatggtgaatctcatgatccaacccacgataagccccatcatgatccatgtaaagtgaaggattaatcatcgtgtgataaagcgaagaataaatattacatgtctgatcataatccccctctacctccacaacacttaacgcattctcccacttttgttctgccaagtcacgcaattgctcaaaagacctccctgctgtttccacgcgaagattattcaacgccccactagctctcaccggagaaagtgccacttttacctctaatggcactccatccgacaagtcaaaatcaaaataggccacaacattacgtcctccgatttccggaaaatcccggtaaatattaaatttccgccacataccgttataagccatcggcttcatctcctgatacccataacccttgatcggtttagaaaaagttatcgcaaaatatgtataatttacccttgcccaaccattggtaattcgataacctgtcaataatgtatcattctccacccgcaaattagcccacaacactttaccgtcatagttataaatgccatgtttcagatctaacaatatgtgtccttcacctttcgggaaagtatacttatgcacccctacacgttcggttgccgtcaactctgcttttacatcataatcttccaacacgacagaatagtatcccggagacgctttttccgtgtcatgagtgaaacgagaacgataaccactatccggatcctctgctgtaccgggattaaacttcacgtcacccgttatcggcattatcagaatatctcccaaatcagaatgcccggtaccattaaaatgagtatgactaaatcccacgatagaactatcacgatgttgataaccggcacaatactcgtaagcccgaggctgatacgtcccattcacattatgcggcaccgtatccgtatccggacttaactgcaccaatccatgagggacacaagctcccgggaaagtatgtcccataccattcgtcccgatcattggatccacgtagttgatctttttctgtccgattgccgacaacccgtacatcaacaataccacgataagtaacttcctattcatctgtcaaaattttcaattttgcttattattattcttgtaaaagtccaaacaaagcttgattatctttttcatttcaccatcttccatttgcacatacaatttttcacccacaacaatccaacgttccttatcctccggggttccttctttcatgatacgatcataaaaatgaatatagggaacttccaacgctttaatcttgaaaaattcattctcgcaaacagacactaaagaagtcaaattcttcgtctcgccccgtgcaatcttcacataagactgcaggtctccgttattaggtaattttagagcatcgatttcacgtcctagagctttcaattgtcgctcggtcatgatttcttctttcttgaatattctcatcaaacgttccacatatcgtttttccacctctttagaaacttcctctttgcctattgacttgcaaaaatatgtataatttttcaataaatacttctcaatattagaccctgcaggagacaaattctgatttgtaaaaagaaaccaataatctttgctcattttttctttatcactcaattggtccatcaattctccggcaacaacagtctccaacggatcataaaaacgaatcaaagtcttcagatatttcagcaaaaactctttaccacgctctccagcttgatagctcgcctccattgcaccggaggctttggaggcatcaaaagcctcctctacaccccgaataattccatcagcatcacgtccgcctaccaatttatgaacaagcgttccatccgtacgcaagaccagaaaagtaggataagctcgcactccaaagcgtttacccaattcaggcccttcccccttttccatgtcatatttcacacaaacaaatttcgaattaaaataatctccaaccttctcttgaggaaaaatatgttctgtcatgttccgacaaggaccacaccaagaagtataacaatccacaaacaccagcttattctctgcctgggctttatccaatgcctccttaaagctcaaatgctcaaaattcactccatcctgggtaaatcccactatcccccagcacaataatatcacgaaaagaaatatctttctcatcactatcaactttacaatcattttacaattatagcaacgctctccaactcatattcttcactttcgtcaatcctttccaaactgccttcggatctgattttaactctactttatccggattatttcccacataatattttcgtaaagaaccaccctctattgcactatatgtcgcaatatacaaagcatctttcataggttccatggtcaaatcaaacttcaacatggtaatctcatccgttgtttccaaagggatcatatccacacgctcattacctatatcataattataagcatacaacgtgttattcttcacgtaaaataacacagaacgagtagacgagaaagcgtaaaaatcagcacttaatacatcagttgctacacttgaagaaattcgataacaattctttgcttccaaattattcacatagaatttataaataaaagcattcgttccatcccccataagagcaaacgaatttccatcagaaacccatgcctttgcttcattccaagtattctctccatagatcaacttacgccctgtttccttttgatcccaaacaaatgcgtccgaaatcttcggtacaatcgtatcggaataaggattcaaatacccctcaaccttatagaaacgatcagtttcttctgaataccatataaacttttttaacgattgaatactataaaaaagatacttgcttgcaggaatatacttactcaagtcatcctgtaaacaattcaacgggaaagaataagtcccatatgttagcatgttcagacccgtatagaacaaatagccattattacaaacaacgattctattaccttcaactttaccattaatatccctttgctctggagcgattgcaataggcatcatcggttcgccataatcctctaataaaaaattctggaacacgtccgattcagtcccttgtaacgtctgccgatccaaataatatgatccggattcagaaagcacccatacttgtctatattcttccccttgatttcctgtatggaaaaaagaaataggccctttgagggctggtaatccactagttgccaatacatttttaattaccacggtatctaaacctgacatagaaatcatttgcgcatcagcataaccattcacatcctctcctatcaacatgattccccgggaataaggagttcctactattaccgtaaattttttcttccaatgcacatctgtttttttatcccaaatttttaaatacaaatcatacgtattaggtgccaaagagataaaataatttaacacacgctccgtagaaattgtatctttttgattactcgtatttataggagatattatccacgcatactgaaaacgacttgcgtctgttttatctcctgtcgacatttcaacaagagcatctattttcaaggtatcgatatttaataaaacgttatatgtcgtattaacatctccaaatgttatctcatttatatcatgataatcataattacccttgtcatcataacatgaaactacacttaaaagtataattcccaaccatatatatataaattgtttcatcgtttctatattttatcacaatcaaacttcttatttattcccttccggataggaaccttgcccatatacacaccccttcacccacatcaactgtccattatcctctaatataggactaccatcgtgataggctttattcaacacttctgaaaatttccttgaaataaccgtctgttgcaaataagttatctttttgtcattttggaaatcgtcataagtatatccaaagtattgacatattagattcaatttcttaggcgtaaaagttccaaattcaaaagcagaccattgtttcggtttaggcataatatcagtcatacaaattttatgcatcgtcgcatcgaaagaatcataaaccacactaccatttgtgaatttgtccatcttatcaaactcatcaaaagtcaatgagaaataatcatttgcaaccagcttcaaccctaaagtcaccgtatctgttttcatttcaggttgacgataaagtaaaacaggaatataagcgtaactactatttgcttccacaacatattcatccgctaatgctcgataatgaactccttctcttgctgtcgtactatccgggtttaccacaactttaaaaggacgcgggtaatctttttcctctccggtaatcatcactttaatcttaacggtcaacgtatcttctaaaatattcccgaattctgccaaagaataaggcatataaggccaatccttttccgaaccccatgaatgaccatcttgcacggcaaaataaatggcttcctctcccttgtatgacatcaaatcccgctcacaggcgacacaagagaaaaacagtatccatatatatatcaatcttttcataatccatcgtttttaattcaatctcatattaatctcactatccggaagtggcacaacataattattcatgttcatatttatcgtctgactttccgaatctttttcccatttcccattcggaattttttgcatagctttacgcttgtaaaagaaaaacatttggccttcgcccaaaaactcccgacgacactctttcgtaatttcatccattaaagtagtttccgtcgcggtagaactgggacaatttcggttgtttcgtaccttatccaaatatccctttgccatttcaaaattaccagaacattcggcagccaataaatagatttcactcaaacgaattaaaggcaccattttgttgaacttgctcgcattaccccctgatacatcttcgtatttccggtgataattaatttctgttcccgcattactatattttgcccagattgcatagcgataatcattctcggaagcataaaaagaatattcccttcccatctccaaacgcctggaactaaaagtatatatttgatctacggtcggaataaacaatttgtcttgtatctccgttccccggtaagaatcataaagagaaaatatcacttctgtggaaaacacccgatcaggcacagaaggatcaacggctacagaatgttccacgaaaggaaaaatctcagctccctctacttgtacttccctcaaaatttcttctgcaacaatcaaagcattccttccatcatgtccccatgcatacgcccgggctaacaaagctttcactgcataatagttcatcctatattgacgataatacaaagaattatctcccccatcattatttgattcgttacgcacaccttccgttaaaattggatctacactcttcaacaaatccaaagccactttcaaatcctcgatcacaaaattcagaatctcttcagcagaaagtaagggagaaatttccgaatcggaattcgtcacgtacgggatacttttttccgttttagaagcatcatcataaacaggaccgaacaaacgcaacatatccagatgtaacatggctctcaaagcaattgcctcacctttgtacaaaccgtaataaacatcagacaacacctctcttttagcatcacatttctcgataattatattacaattcacaatcaaagcataagccttctcccaagcactttggaaaattgcctttatttcatcctcctcgtaacgataggctcccaccatcgaattcatatcactaccgctaccataagtataatactgcgccataaaatcaattatcccagcacttaaagtccgcccataaagagcccgatcagtcaacccgacatacaccccgttaatcgctttctcgaatccctgcctatcttcaaaaagcataccttcagacagacgatcggatggttttatatcaatccatgaactgcaagaacaaaaagccaacaaacacaaaagccagcaatgttttattttcgttttcatatctttatctattaattatttacatctagaaagtcactcctaatgaaaatgatacagaacgggcgaaaggatagctcaatcctcgttcattcttcaccgtagaaacacggaaaatatcattcatgtaagctctaaacgacatggaagaagccccaatacgacttaaccactttcccgtactctcgtatcccaacgaaatagattctccggacaacacgttattattttccacaaaacgagaagaaatcggcgttacttcactatcagcaatcgacttgaattttgccttatctccgggttgtttccaacgatcgtataaagctcgcttatctaaattttcccatttcttcacactggaaagattctctactttatcataaagtgtctgcataaaaatctgtccacctaaacgataacgcaaattaatggaagccgaaaatcccttgtaatagaaagatgtaccgatcactccctctacatccggatcactatttccaacaaccatctcatcatcataatcatgcacgaaagtttgtttaccttccttcgtcaagaaaatttcccgaccggttgccggatcaattccgcaagacctcacggcccacaaatcggaaggactccccccgtcataatagcgggttaaattacgattacggttatccagattgtatttggtcaaaacatcactaacattccggtattccgaagtttggtgacgcatattcgcattcacggaccaaaacatatcatctctacgtataatagaataattcaacgtcacgtttacaccttgtgtgatttgcttacccacattgcgaggaatcgtcgtcgcacccgtagaagaaggagttccgatatgtactaacaatggatcggtcttcttattaaagtaatcaaagttcactcttaaacgattgtcaacaataacgagatcaaaaccgatattacgatccagcgtcttttgccattctaatccccgatttcccaagttggaaacgattgcactagaaccgaaaatattcatattattcgtgttatagctatagactcgggtagaaatataatcattaaaattctgatttccaggattaccaatagaagcacgcaatttgagtaagctaatacccgatacactttcaaagaaagcctcattgtgaatattccaccccaatccaacagaccaagtattcgtgaattgtttatctgacccgaacacggaagaaccatctgcccggtaatttaaatccaataaataacgatcatcataagaataaccgaaattcaaataataactcaacgcacgattcttggaatccatataagttgcctttccgtcctcttgataacccaaagcaaaggccggattagaaaactcatcatcgataaaaccttgcaccttatacccgcttttatccgaaccgttttggcttaaacgcataccaccaacagtgttgatcatgtgtttctcgttaatcaacttcccgtaagtcacactaaaatccccatcgtaattcagaactttagtatttgtctcctcgtaacttccccgatcagcattatcactcttggaagcaaattccgtgttaaacggtgatctgaactttttcatctgttcattcgattttgtcaatccgaatcgtcctcgaatcctcaactcgtctattaccctccaatctacttcaaaattattcgtgaaacccgttgattccgtttcatcaaaattagtctgtctcatatcaaataacggactataataagtagtagaataattagagaacaatacctttttcaactccccattttcatcatatttacgaaaataaggattcgctttagcaaattcagaaaacgccaccggttcccggtcagcttttgaataatcaatattcagattattcgtgaaagacaatcttcctttccgataaattaaacgaatattcccattcatcacctctcgatcggagcctttcataactccttgtgtattaccgtaacttaccccaacaccgtaacgaaaaacgtcatcacctccctcgatagaaagagtatgtctatgagttactgcaaaacgtaatggctcattcatccaataagtatcaacccctctggcaacctctttcatcaaatcattatagatctgctcctgttcctcatctaagatattaccattatcatctattaaacgataacacccggccaaacgttcaaatgtcaacttctcgtaagaattcatcaaattataatctgacaaatcagcaaaagaaagttgcatattcccgttatacgttaatcttaaggaacccgcttgcggtaatttcgtctcaaccaccaccaccccattagccgctttagaaccataaatagccgtagccgcagcgtcttttaatatcgtgatactctgcacccgatccatactcaaatcactaattgtctgtaatgttgtttcgaaaccatccaaaataaacaatggttgattcgggtcagtctcatactcatccgtcaatcccacgatactactctttccacgaatttcaatatcaggcaaatgattcggatctgaaccaaattcattattttccataatagcaaaggccggatccaaagttttcaaactttgtaacacactctgattaccaaccattttcagatctttagagttaaatgtcgttgaagatcctgtgaaactttctttcttacgagtgtaaatacccgtgataaccacttcatccactacctttacattttccttaagtaccacgtttatcgtatcctgacccgcatattttacttccattgtttccatcccgacaaaagaaaataagatggctaaatctttcacttctggaagtttcaatacatatctcccgtcagcatccgtggctgtaccgattgttaaacctttcacaacaaccgtaacacctggcataggctgctttttctcatcggtaacctgaccggtaattttaatttcttttttctgttgggacataacaagcttacgaacaataacaatcttatctacaatctcgtagccaaacccattctgacataatacttgatctaaaatttgtttcaaggttacatctttcaattctacgtttttcactttagaatttcccaaactctctctacgatacacaaactcgtaatccgtattcgctttcaagtattccaaaacattttcaagcatctcgtcacggaataccacatccattttttgttcttgcgagtaactcatggcacttacagaagtaaatgcaacaagcaaaataaaaactttcaatgtcataactaacagaatttttcgcaatcttctcacaagaagactacaagtcatactcttttttttcatacatttgtaaagtattacattaaacattcatctgcgaccaacagatgtttgataaagggggaatcgaccaaattccccttttttatttattgataaacagttactatttgatttttcacgttaaactttacctcacccgttttctccaatatattcaataccgactcgaaagaagcataacgaggaatctttcctttaaatgtagcctctttcaaagacatattttgataaaaaaccgtgaaatcataccaacgagccagtttcgacatgatctcctccaaggtgtgattctccaacacgaacatcccgttcctccaacttattacctccgccacgttaactttccgagtgtacattttttcgtcatttaccacggattgcatccccggatcaagaatcacggtctgcccatcagtatccactttcactttcccactgaccaaagtggtatacgtgtttttctcttccggataggcatccacgttaaattcagttcccaacacctccacagtttgtttctccacgacaacccggaaaggtctcgtctcatctctcgtcacttcaaaatatccctcaccctctaactccacttcccgtttatcacttccaaaagtaaccggatatttcaatttagaattagcattcaaccaaaccctagttccatcagacaaaatcaagtcaaattcggaacccttagggacttcgatggtattataggctaattgcatatgttgcgggaaacctaaatcttctgccgaataggacaacgttgattccccggctttctttactaaaactccagcctcttcaaaattccccttcaaactatccaacaacattgtcgtcccattatctaaccttaacacgggacgctgtggtttcatcaaagcaattgcaacctgttcctttacagttttttctgtttctctatcgaacaaatataagctactcaacacgaccataacaaatactgccgccacacttccccaacgtagaacccgtaatctcaacttcttcttacgttggaactgtactcgcttttccatatccaacaatgcctttcgacggcctattctttggtaacttttaaaactggcctctagaaattctccatcttgccaacgatcatacaacaacttattttccgaagaagcttctctccattcttccaattcccgaagttccttctcggaaagttgtccgacccgctgtcgggcaagtaatccggctattcgaaaccatttttcactcccacacatcatcatacggttatttttttaaatttcccctataacgcaacacccctcaaaaggggcaataaaaaattgaagttttttcaaaataatttctacaagcctgaaaataagaacaaaaataaagaaggctctagttttttgcgcaagaaatctaaggcactcgccttgtattttttcaccgaactatcggataaacccagtttttccgcaatctccacattctttaacccttccataaagctcatttcaaaaacaatttttgctttctccggcaactcctcgatggcactatacaacaatgtctgagcctcttgatcaatgaccgaattggcaaaacaagatgcatcctctaactcccggacgtatcgctcccgggctgaattttttcggtgaatactgatgatatcatttttgatcgccatataaagaaaagccttgaacgtgtacacggaatcaaacttattccttctttcccaagcactaaaaatggcattttgcacacaatcctctgctagaaactcgctttcctctcccaaatacttgatggcatacaagattaatcccggataaacattccggtacagtaaatccagcttccctttctgaaaatcaattaatatctgggcattccaattcactcgtcaagttttaccgtgtaaacttacataaaaatattcgatttctcacatcacttctataaagagaaacaagaatagtaattggagtaatatttattgactgattattttgtaacttacaaaacaatcagtcgcatcattttcatttaaaccaatcccgtttcaaccatgcctcgaataaaggatcctgaaacgtaatttcattaccttgcaaatcaatcacttcccgttccatgagagcctgctttattctaaccacgtttccagaagtaccgatccgataagcctgtaatgtttgttttgaacttaattgtttctcccctgctattagtgccttcaaaaaaccaagttgggcattactaaacgtttccatactattcagaaaaagtaaacttaactgatcaatcaatccattatacgcctccttaacaatagatggcaccactaatttctctgtcctaagccacacctgttgagctagttgctgtacataatacggatgattgtccaccaattccaccaataattgaacttcatcccgttcaatgaccttattagccatctgaaatttttgccggataaacgggatccattcttccgtttctattttttgaagaaacattaagtccccaaatttataaaagggcatagaaacattcgcaaacacatccatcagcatgtgccgcttactaccaaacaaacaataagcgacatgtgaatgccgctgccaatgtgcccttaacttcttttgaaacaccaaagaattcccgaaattagccacgttctgaaattcatcaatacaaataattaaacgaatatttttagatacagccaaagcctctgccaagtctaaaatatcatccggattacgtttcaattcctccaaaccaatcccaaaggataattcactctccacatcagccgtaaaagaaatccggggaatcaagcgagcaaggaagtttttggcatttaccgctatttcttcccacttagaagatactgatgttaaaacttctttcgctagtaacgtataaaactcttcctcttccctcacattaaaaagatcaatcatgcataatttcacattttcttcagacattaagagttgtttagctgcatgtatcactaacgatgattttccccaacgacgaggagaaataataatcgtgtttgtcaaacttctgaaattctgtagcaaacgttctgtttccactcgtcgatcagtgaaattttgatctgtagctattttcccaaaaacaaaaggcgtttccatatctctttattcgtttattccagaacaaatataactgattaatttgtaagttacaaaatagtcagttcaaaaaaaaaatgcaatatgaataaacgatttagctgaataactcacgacaaatatctcccacccgggaaacaaatcttacttttatatgtgcagggacttttgtcagcgctttcttgtttcccgccggaacaaatatttgctggaaaccgagtttttcagcctctagtacccgttgctcgatacgactcacggcacgaatctctcccgataaaccgacttccccggcaaacacggtattcgtggggatcggggcatctatatttgaagaaagaaccgccatcacaacccctaaatccaaagccgggtcacttacccgtattcctccggcaatattcaagaacacatccttcgctgccaaccggaaacccacacgtttttccaacacggcaagcaacatattcaaccgtcgcgtgtcaaagcccgttgcagaccgctgaggcgtcccgtaagctgccgtgctaaccaaggcctgcacttccaataaaatcgttctaacaccctccatagtggcagaaacagcgaccccacttaaatcctgatcatggttggataacaacaactcggaaggattggccacctgtcgcaaaccggattgtaacatctcgtagataccaatctcggaagttgaaccgaaacggttcttcatagaccgcaggattcgatacatgtgttgctgatctccttcaaattgcaatacagtatccaccatgtgttccagaatcttcgggccggccaactgaccgtctttcgtgatatgcccgatcaaaatagtcgtaatcgtattttctttcgaataacgcaacaacacgttggtacactcccggatttgtgataaactccccggaatagcatccacactctctgttgccagcgtttgtatagagtcaataatcaataatttcggttcaagcgcacgggaatgttctagtaccgtttccaacgaatttcccgaaagaaacaaacaatcgtcattctccgcccccagcctttgtgcccgcatcttaatctgcgacacactctcctccccggaaacatacaacaccttcccacagcgattatgtaaggcaaattgcaatactaatgtcgatttaccgatacccggttctcctcccagtagaatcatagaccccggcacgatgccacctcccaacacccggttcagctccccgtccccggtatccatacgctcatcggcattcgccttcacttccgacaacttcaaaggccgtgaggaactggcccccactatagaagccacccggtttcctttggtagaaacctccacctcttctacaaaactattccattccccacaagtagagcattttcccacccacttggactccttcgccccacaattctgacaaacgtacacggtttttgttttagccatacaattgaaaattgataatcaaagcacctattgccgttccacttcgaagtaattgtttggacaaaataaactcttttcgttccgcacataaaaacttgtacaaattaacaacccgtactgcaaaccgaaagaatttatctgcaacaacattcacttctttcattttcaattctccattttcaattaatcaaagatttcatctgaagaatcataatccgtcattccctctctatccgcatccccacaatcaagcacatggttcactccattcggtttttggaaatcactttgcggcacagcaagagatttatccgcatatactttctgcataaacaaagcccaaatcgggagtgccatgctggctccctgcccattcgccaaattctggaaatggatagaacggtcttccgctcctacccaaacccctccggcaagatcaggcgtgatcccgataaaccaaccgtcagagtgattctgcgtcgttccggtctttcccccgatttgattcttaaaaccataccggaaacgcaaacgacgacccgttccctcatccacaactccctgcaacaaattcgccatcaagaatgccgtgttttcagtaatcacctctctggattccgggtagaaattagctagcacgttaccatacttatcctctattttagtcaccatcatcggagcattatatacccctttattcgcatatatcgagaacgccccgaccatctctttcacggaaacctcggaagatcccaagaaaatagcgggaaccgggtctatataactcgtgatccccattcgatgagccatctgcacgactgcctccggggtaaattgcttcaatacccagccggaaatattattcacagaatttgccaatccccatttcaaagtcaccatctcaccttcccgtttatccgtggaattgcgaggcgtccaggtcgtcccgtccggcaaaacaaacgtctgttgcacgttcaacacttgatcacaaggtcccagtccctcctgcatcgccaacgtgtaaagaatcggtttgattgttgaacctatctgccgttttccggtactcaccatatcatattgaaaataacggtaatccggtcctcccacgtatgctttaatatgtcccgaagaaggttccatcgccatgaatccggcccggaagaatgacttataatgctttaacgaatccaacgggctcatcacggtatcccgtacacctttccaagtgaaaacagacatcggaatcgctttatcaaaagatttttttatctcttggaaacttttacccgccttattcattgaccgataacgctcggtacgacgaatagaagtgtttaaaatatcattgatctcagaaaccgtcaaatcattcgaaaaaggcggatgagcttttctatttctctcggccataaacgccggttgcaacgtaccacccagatgctccgtcacggcctcttccgcatatttctgcatacgggaatccaacgtcgtataaatttttaacccgtccgtgtagatattataatacgaaccgtctgatttcagattcttgttgcaccacccgtacagtggattcgtttcccacgccaaagaatctaccgcatactggtccttactccacttgctataattctttttatccggtttggatgctgtcatgtataaccgcaaatattcccggaaataggtcgcaattccctctttatgatcctccttatggaagtccaatcccaaaggcagccccctcaatgaatcaaattcaatctgtgaaatcttgtcatatttcaacatctgccccaacaccacgttccggcgtcctaacgtcttctccggcctccgtaccgggttgaaaagcgaaggattcttggccattcccaccaacatggcggcttgttccaccttcaaagaatcgggcgttgtcgagaaataaatattagcggcagaattaataccgaccgccaagttcaagaagtcaaacttattaagatacatcgtgataatctcttccttcgtgtagctcttctccaacttcaccgcaatcacccattcccggaacttacgcatggccaactccatgaagttctggttcgcctcccgcgggaacaacattttcgccaactgttgcgtgatcgtactaccacctccggcagaagaatttccggtcaacataccttgtgccacccggaacaacccccgcacgtcaataccgctatgatcatagaaacgtacgtcctccgtggcaatcaacgcatcaataacactttggggtatatccttatagtccatataccgacggttctcactcccctcgaaatactttcctaaaatctttccgtcctcggaataaatctccgtggcaaatttattcttggggttctctaactcctcgaatgtgggcataaaacctaatttacctgccgaaacgagataaaaaaagaaaaatactcccgcaacaaaaacaataaacagcccccagaaaatggcaaaatctttccaatatcttttaaacatcacttctcgtttttattttagcttacaaagttagaaaattaaatttatatctctacctatcaagaataatctctccttgcacttccataaaaacgatcacaactccttgaaatatcgagattttcaagtgttttattccacgatccacctctcgatatttcgtgtattgttgtcgaaattaatcccgatcttgaataattgacggggatcagcttggaatggacgagcgtagtgtttctcctcgatctgccgaattgcttcttctgctgtcccttctagtttaaattccatcacgtaaatataacgatccgtttgtaacacgagatcaactctgccctctgacgtgtgatattccgctttcacgtaaaaacccacaagtcggaaaacgatgaaaagtacattctgataatgtatctccaaatcccgaatcaattcgtaaggagtgtcggcgaaaaaactctgaagtctacgcaaaaaagcatccggcttaccgatttcaatctctcgtgtaaactgttgaatttcgaaagatgattccaccttatttactctcgtgtaaaacggcatcaaaaacttgataaacccctcctccacctctcgatttgggaatccaagaatataattctcaaaacggggatcataatctttaattgtaagatacccgctttgataaatcacggggatcggactctcgtctgcgtagatactattcaggacctccgaactcgtctcctcatgagccatttgttcaaggttataatggttcttcttcaacaattccaccaagtaagtcggggttcccgtctcgaaccaataactaccgaatttcatcttgtcaaacgtgtttaacacgctaaacggattataaattccctcggaattttctacgaaatgatacccgtcataagactctttcaaccgggcgtatacttcctcgtacgtcattttctgggtagaagccaattcccgcaagtcaacctcgaaataacgatgaatctcttctcctgtcattccacacaatgcaacatagcggttatccatggatatatcattcaaattattaagatcactgaacacgctgactttcccgaacttggttacacccgtgagtaaagcaaatttgatgtccccatccatggtttttaaaaccccgtaaaacggtttcaacgtattacgaaactcccgttgcaactcctcgttattaattgcctgtaacatcggcttatcatactcatcaacaagaatcaccacccgctgccccgtccgctcgtgagcccggcgaataacccccgcaaatcgcaatgaaaaggaaacttccgaaacttcccgcccgtaaaggttctcccatcgggtcaagttatcattgagaatatttcccaagctctcaacagaatcatatttctctatattcaaatcaagatgcaaaataggatgttgtacccactccttctccaactcttccatggcaagcccttgaaacacttccttcttcccttgaaaataagcctcaagcgtcgaaataagcaaacttttcccaaaacgccgaggacggctaaaaaaatagtaacgccctgattttaccagtctataaatcaacctcgttttgtccacgtagagatacccgtcttttcgaaggctttcgaaattttgaataccgataggatataatctgtcactcatcttctcatattttatctaacaaagatagcatatgtttcacgaaatgcaaagcttgaaaaacaaatgaaagtgatacacctttaatccccaaagtacactctgtatccaataaaaaatacacgaataactgactaatctatatttccttcataaatcaacagagggggaggcaagaaaattccttgcttccccctcactttgcacgcatccaacaatgttattttttcaataatttagtaatctgcttgcgtaaatttataccccacaagtctttacccactatacaattttctctatcaaccaaaaacaatgttgggatactttccacacaataagattgaactgcaggagaagatattccttgcaaatcgcagccgttttgccacccattcatgccatcctccccgatagccttcatccactcttgcttattcacatccaaagaaacggaaataatgtccaatcctttagggcgatattgctcgtgaagttgcaataactccacgttccggacacgagaggttgcatctcccgatgcccaaaaatacaccagtttcaaacgagcgtttgtcttgtgcagagaaattacccctacatccgaagagggcaagctgaaatccggtgcaatagccccgatttccaactgttccaatttggcaatccgttcagccacggccttcccaaaaccactcgcttgcatgcgactactcagcaagccgaaacgttcctgtaatcgggcgagaggcaacccgttcatcgtggaagccacaacgtaagccgccgcatggttatcggtactctgcttcaacaacgccacctcccgtgcttgaatatccactagaaacgcctggaatgcactatcaatcttttgcatctgtttcttgtttccctgctgctccgcttgcacgtactgggcttccaacacctgacgctcccgagcaagatcaaaattgatggcatcaaatttcatccacgtctcctgagcttttccaccacccgtcacggcatctttccccatgaccgcatactcggcattctctaacatgaacgatgctacgggttgcccgtccggggtatgaatcacggcccacacgggttctttcacgctcccgatgaaaacgaatttacccccggtaatctccgtcttggccgcaacgacacctttctgaccatcccagacggccaacacaagttgcccgtccggtaagccggtcacattaccagtaattttataactatcttgcgctttacctgcgataacggacgcaacaagcatgccgatcaataacaatactctcttcatatcaatacacatctatcccggccaatctcactccaaagttcgagccgaaaggctggtcataaatcgtaaatcttaaatacctgacattcgatttctccttgaaatccaagtatgtcgattccccgttgctattaccgatcgtgttcacttccacgtgagtagcagcctgccatgacagtctatccacagaacattctatttttattacatcgggcatcaaagcgtaatactcgccattattactattactaaatgaactttgcagcacccgcaccccggtaactgttttctgttccaacatgtcgacttcgatcacataagttcttgcctgcgatttcttttccggaacccaattcgttctcgaacttccatcaaacaaaaacatcaaccgactattataccctggagcatcttcctcggaacattcatatacccattgttttcccacaaaaaatgacacagcaggaggcgtattcgtattccctttctctttcacgtaatcgggtaacacgtcatctgtgaaataatgcttgctgtaacgatccacacttaacccattcaacaaactcaaggtattcagtgtgaaaacggaacgttccttgtcaattaaggtggaataaatcgaatctccccgcgaaacatccatatatcgattttttcctaaagtaagcgttttcaagttcgggatattcaacaaatcctcaaaagaattcacgtcatagtcatattcaaaatcttctaatgaattgatccactcctccgtgatctcggttcgtccgtatttctctttcacccattgtttgaaatctgtcgtgtaaagtttttcattcgtgaagatatacggggcgaaaacaatcaactcttcacatccttccacgcgtcctctccgatagatggaaatctctttcgacggatcaaccggatattcaaataggcaatacttattttttgtcacgaacacggaatccaactcgaaatgagccaatttaccctccggagtataataattcaaggaaacggaatccacgttcgattgccaatcagagaaaaaaagaatcagacgatcaccgatgcaaacgtgtttcgctaccacctgcgtgaaagaacgaattgcctcatgttcctccgtgtaaggacgcccgtacaaaggttgcgccaaagaagtggcaccatttttatccaccccgaaaatagaaatttcataatttccatccttcaaattttttaaattacactccgtgacatctctcgcgagtatcgtgtccttagtcactccattcaaattccattgcaattttatatgatcaatggcaggatccacgctgttcgtccatttcactaacaggcgtttccacccgggatgtatggaaagattttccgcacttcctaaataacgaatggccccgtctcccgcgtaatcgctgtacgtatcttccaaatcctcacaaccgattgccagacaaacggcaaataatataaacaaatagttcttgaatttcataactactcctcctttcctatataaagttcaaactcgtggaacgtcacatgctcttgcgtgttgtaatccttaccatctcttgctacaaacgtgtcgttgacaatcactctcagataccggtaccttttttctaagaccggaaaatcaacagacaaatagcacggttctgcatttttcaacgccaatttggacatcaatgtgaaagtcgcattacccttacaacgtgccgcccatcttaatccaggatccaaatcacgagattcactataattccccacttgatcccaaataatccggtcatttgatgcttcaatcgtaatgtcacaaggcaccctattttcataagcgttaaacagaattcctaagaaaggacggtttatagacaaaaccgtataaatccgcactcccgccaattgtttcgcttctttcaaatcaagttcgaacaaaggttttccaaaacacatcggcccggcaataaaagtacccatgttattcccgttaagggccatactcgtgaaacctttcatgtctccgtcaaacaaataatccgtgcttatcgcagtgtttggatcatttattcccaacttgttttcgaagacgaacgcttccggatccaatttcatcaaattgtacgatttcacgttctcccaaatctgctgtttcgcaacataaccgcggaaatcttccgtccgcacgaccacggtgtgagccgaagcctcttgttttaattgcaaattcaggctgtctttcccggcatgaaacgtaaaactcttcactaacaacgtatccaattcctccgtcaacggatttttacccacgtaaaatacatgagccataccctctcctccttccggaacattataggacatcgagaaaccgttccaacccggttttatctttaattcgttgaaaaaggctatcggccccgaatcttttgtgtcaaaagtaatgttatatacttccgattccactcctcctctattacaaagtgtcacgcatccctctacacctttacgtccctcgttgaaaccatgtaaaatgagagaatcactcgcataacttccttctcgcatgatttcctgcccgaaagcatctttataacgcacccgaatcgccatcaaatccaaatcggaaggcaggttataatacatcaccgcaccacccgggatcggacgaatctctcgtatattttcctgagaaaagccaaccggaaatacatcatcgttatcctcgcatgcacaaaacagggcaaatatgcataataaatatatatattttctcataactgcgtattaaataagtcattaccaatttggattctgtacacaattcgcttttaacacttcttctgcccgaatcgggaacaaatagtccctcggggctacaaaagcacgcttcttccacacgggaatcggtcctttatagtgattataaaaactctctgccgtgtttcccaaaatattccaaccatatagcggttcgttcaattccatctctgcagtcaaccaacggcgcaaattccagaaacgtcttccctcgaatgcgaactcgatgttccactctcggcgaataatctcccgcattccttccttcgtttttaccttacctggttcattagagtagttctcccacgcactctcgacatccgggattccggcacgtaagcgaacctcatttaacggggcatacacgtgttcgtaatccggtgcagtcaagtattcgttccaagcttcggctttcatcaaataaagttcagccaaccgaaacatgataacaaccgaaccatttaacccgtctacggcataacgggtaggcaacacatccgagtaagaaccttttttcatccagtaaccggttaaattttgcggcattgcattattgatcatagtggcctgcgttccaaatttttctccttgataagcagtaaccaatttcaaattcgttgccgtcggtcccatttgccaatgacaacgatccgctgcgatatgagcataaaaacgaggttcccgtctcaagtgcaaatttaacacatccgcgttcaaaggcactacatcccgataagccggtacattctcttttcccatctgatagcgcataccgtaaggccattctttatccgactcgataggcaaaccgttaaccgtataataaaattccaccattttcatgctcggtgcgatacatccctgatttgaaccagaataatcgggatccgtgctccggaaatagggcaacgttttcagtgaccagaaagcagccgtacgcgaaagctggggttcaaacatctgcaaagcttcgtcatgttcaaagtttctggctaatgaagagtgctcaatatcggccatcgtgctgagcaaagcggttgttttctggtaatctccacgtattaatcgcttcccgcctttatcagcgatatcaatcgcctcctgtgccgcttcggctgcccgtttccatttttcagggtcatattcggcattaaaaagcttttcgccttttttgttcacgaaattcgtataattcttgtttccgttaaatataggggaagcggcaagcaacaaggtgtgagccttcaatgccgccgcaccttctttacaataatacccactatgcgatttctccttttgattaaacaaaggtaaaaccggaatggcctcgtccagcaaacgcacgatgacattaacacaagtatctatcggggaacgcggtaattgcatctctgtcacattggcattggcatctatattttctggcactaaaacaaccggcccgtaacgacgcatcagctcgaaataatagtgcgccttcaaagccttaatttctgctgtccaaatatctttttcgtcctgttgcatgttgtaaacggaaccgatattctcgataaaaatgttacaataacgaatagcggcataatactccgtatttttccacacgttaccgtaaggctcttgtgacatttgcaatccatcaccaatgaaaaaaccttgataggcggggaatcgatttctcatatattctccggcaactacctcgtctgccccagtaaaagccggattcgtcaccaccgaagtcactggtgccgtcagaatcacatggcatgttttcatccagtcctcggcctgctcgcgtttctcgaatattgtctctatcgtttcaatatcgttttcaggcacaacatccaaatagttacaactattcaagaccagtaacgaaaggattgttgccacattcaaaaatttaattttcatcttcatactatcagaaactaaatgttaaaccaagcgtgtacgtcttttgtatcggataattgaatccgttctctcccaattccacgtcccaaaccttgaagtttgagattatgaacggattgttggcacgagcaaaaagtttcacgtattgtaatttccacttattcatcaacgatttgggtaaattataagccagttctatttgtgtacaacgcaagaaagaacattcccgcatgaaataagtactcttacgcacttccgcattatctttattataccaattttcttgaggattatgcgtgataatgttctttgttgaaagacgtggccaaaacggttttctcgtcatgttgtcctcagaccagtgagaatcacaaatctctttcaacatagcattatctccgtaaaatggagaaattgctgccggattgatgaagaacgaacgtttacccgaaccttggaaagcggcactgaattcccagttcttgtaattgaagaatccctggaacccgtaaatcaaccgcggtgtctccggaaaaccgatatacgtggcatcctccacattgatcaccccgtctccgttcaaatcacgataacgaatatccccgggcatcacgtcacccccttgaaccggcgagttattaatctctgcctgatcgcgaaacaatccctcggcgatgtaaccgatttgttgagaaatctcctgtcctttcatacgttgccattcgggtttaccgatagcctcctcgatctccttataaatagatttactatatgtcaacgttccgttcaaaatcatccaacaatcttgcgaaaaagcatgttgcacttttcctgaaaaatcgatacctctcatgcgcgatttaccgatatttgccaaaggtgcgacctctaccccggcagaagaaggaagcgtgtttttattcccgatcacattatgacggatttcctgaaaggcatccaacgtaaattccaatataccactgaacattttagcctccatcccgaaattaatctgctcggcaatttcccattcgatgtccttgttggggtaagcagaaacaatataacgataataatcagtagcacctcctggttgaggattagcatatttaggattattcaatcgatctattatcggcaggaatacaaaacgcggagtcgccacgataccatcattacccaccttaccgtaagatgccctgaatttcaaataagaaagccaattcgaaacggattgcatgaaaggttcgctcgaagctacccaagccaatcccccagccggaaagaatcccatccgattgttttcggcaaaacgttccgatccgttatacccgaaactaccttcaatgaaataacgatccttatacccgtaacttccgcgcatggagaatgtcatattacgttgcggcattccgttcaaaacacttgaaatcggtgtaaatgtccgctcctgcatctggaataccccggtcaaggaggtctggtgatctttccaagcagccgtgtgtatcaagcgcccctcgtaggtcacctgcgttgaagtctccgacgtattgtctgccaccgacaaggtacgtttcgagttctcctcctctatggctcgcaatacatgttttcccgtttcaaaatcatagttacttaacgtgtacctgtatggactagttgcgaatgcggtggtataataaccggtttgagcccaagatatactggctcgcacttccaatcctttgaccaaagaggctaaattatgaatatattctgcacgattgctcgtggaataacgcgttctctccgtgtatccctggtgcaaaagcatgtagggattagttgcattggcttccgttgtcccgaaacgcaaatgcggccaattgtaataatcatctcccgggtagagcggagcgaaatccaccggagaagccgcaaaagccaacccgtatgcttccgtcatagaggttaacggaccgtgatatttatccaacgtagcagatgaattaatcaatagcttaatcccggccttcaggtctatattcaaattcgcacggaatgatgtttgattattcgaaatattacaatcaaaatcattcaatttatccgttttcagcatacccatatcccggacatagttcacggaagtataatattgaatcactttcgatcccccgcgaatactcaatccggcatgatggttcacgttataattcttaaacatgatattataccagtcattcgccgggtaaacccaggaaggatatttaccggaagccgtacgatttatgacctcctcactatatttgggtgttgacaactgaccacgtccgactccagcctggttatacattctcatatatgtaatcggatctaccacgtcgatctcttttgtcggcatagaaaaaacagcctcgtagcgagctgatgcatagacactcccctcttcacctttctttgtggtcaccattatcacaccattcgcaccacgtgcaccgtacatggccgtggctgatgcatctttcaaaacggaaaaagtttcaatatcttccggagctatacgcgataaatccagcttggaagattctactccgtcaatcaatattaacgggtcgatattcgctcccgtctggaaagaagtgataccgcgaatataaaatttcgtgttcatctcctcttccgtcaacgctcccggaagacctcccgtctgccaagcaatcataccgggaattcgaccggcaaaactcgtcgtcaaatcactgcttgaagatttcaaatccatcgggcgaacggtagaaatcgctgataccacactttcttttttctgcgtaccgaaagccacaacagtcacttcttcaatattttcagcagtaggattcaaagcaatatttacttttgtttttccttttaccgccacgatttccggtttgtagcccacgaaagaaacccgtaacacgtcatccggtttaacggccaaagtataacgaccgtcaagatccgtagcaaccccttgtgttgttccatgaatgattacagttgccccgggaatcgaatttcctttttcatcggtgactctaccacttacctgaattaatttcgttgtagaagtttcttgctgcttcacgatagcaatattatcacctgtaattttatacgtgaattccgtatctttaagtattgttttcaatacctcctctatagttgcatctttaacattaatcgtcacgggcttaaattgctctatttgcgttttttcataagcaaaattaaccccagtttgtttttgaatatctagcaatacatcaattaaagggacattttttaaatcaagagagacctttttattaggtatattttgagcgttaagattcataaatcctactaaaaataggcataccaaaaggtatattttgcaaaaagagccgcctcctttgcgaaatagtaaactttttttcataactttgttttaaatatttatcgatgattaatcggttcccatttctcaccgaggaactattaatttattacacaggatgttcaaggcaaaagggcatcctgttaatttttcaggatatcttattctataatcttcacctccttcccttcgattaagaatttaacatccgaaacaaattctatcacgtccaaagcctctcggagtgacgcatgctgttttatagaaaatacgtattcttccttttccaaagcgatctcatttttaactaaaaaatgaacatcatagtacaattcaagactggaaattacttgttttatcgttttcccgttaaagaggatatatccgttacgtttagcggtatactccgccaaatccgtttgagtaaccgacacctgccctaatttatccacgaatgacttctcaccgggatgtaacacggtttcttttccatccaatgaatttttcggggtaattccgacaacaccttctactaacacggcctcatcaggcaaatcgtttcgtgaaataatattgaatgtcgttccgtatacctgcaatttcatattacccgtgttcaccacgaaacgtcgggaagatttggtcacctcaaagtatccttcgccacgaagagtgacttcacgcacggaagtcgaatcgaatttcaccgggtaagtcagttcactctgcgggttaagtaacacgaaagtcccgtctgatagcacaagttcaaaggtctttccccttggaacaacaaccgtatgcatcgggatttcttcctttatcgtatcagttttataaatactatcggatatcgtgtaattcaacttactaccgtgagtttgctgatccattttcgaatttaactgctcggcagtcaatttatccccggtctccgtgataataataaccgattctcctgtatcctcacctctcattgcaacttgcatactggtcatttctctcgaattcgtgtcataataccaccagattcctagtgaaaagaataaaataacagatgctgccacagtcattcgctgccacagtacccgctgacgtttacgctttcttgtctcttgcaattttgaatagagattattcaatttttcttctgaaaaagattcattacgggtcggatggcctgcataataattagatgaacgttgataaaattcttcgttatgaagatcttttttccgccaaagttccacttcttcggctatttttttatcagctcgtccatgtatatatgagaatattttactccaatcaatctgcataaattttcaatctttttatacaataaacgctcaacgaaaaaaatgggtcccccttttttcaatattttttttaaaaatttcattgatctaacctattaataatgatattcactgtactttcctgaaaatggttgactcggattaaacaaaaattttaacaaacaccctaacaatgtatcaa

SEQ ID NO: 10752 - DNA, 6275 bp, Unknown
  gut microbiota DNA sequence
gcctgccattgatgtcaattttgtcaaggacaggcaacttgtgttgttttaagttatttcgaactcacgttatttagagtcgagaagattttcgcctgaaaagaagcgggctgaaacgacagagaacaaaaggtccaccttatttttcacgggacacctggagaaggacgtggaggtcgggatcacgggtaagatgctggaagccattcatgactacatcgtttgccgtggtgatataaccgagtctgattacttgtttgtttctcacgcccgggggtacaaggaagccaagctaaacccggtgatggtgtcccggatcgtgaaaagacgattgcgggagataggtttggatagcaagttccttacttgtcactctctccgtcataccgcggcaattctttccttgaaggcgggggccacgatttatgacgtgcaacaaatgttaggtcatgttagcatcgaaactactaagatttatttaagggccatagaggaagaaacgaggataaataacagggcagttcatacacttgacgaactattctaagaaggccttaaacgattaaaaaacgggataaaaacaggagcgaaacaggtcaatgtgcaataaagaaataatttagtgaacattaattttgctatctcgacattgcaaaatggcacttttggggtgtttgaaggggaaaaatagataaaattgttaagtgattgaaataaaatatattaataaaattggaggggaaggggggtataaatctctatggcaaaaatctgtaagaccatacccccagcttaattaacgtgcgtgcaaaattggaaaatttttaaataggaggtaaacatgggaaaaggacgaaaaccaatatctaacgctttgaaaaaattgaaagggacagatcagccctgccggatgcgcgaggaaataacattcgacaagataacagaaatcccgggtccgccatcttacctgtgcgtggaggcgaaaaaagttttcaaggtcacagcccaacaactagcggacaagggtgtccttgatgtcgtgaatattaacacggttctcctgtacgctagcgagatggggaaatacatcgaggcggaaaaggagttaaaaaagaaagggtgcgtgatcgaattgcacaatgaagatgggattctaatgaaagcgactcgtaacccgctggatcgaatggccagcgagtacctggctaatgccacccggttggccagcgagttggggattaccccggcttcggcttcccgggtgaaagtcgagggtcgaaaagaggaaggagatgaattcgataaattcatgagaaattttggagatggcgagaagtaaggagtatataaagaaaatgaataaatacgtggatgacgttttgtccggggaaaggaaggccggaaggcttgaaatcaagacggtcgagcgtcacgtggaaaatccgcactaatttgccccatcttttccaatataaatagatcccttaaatccacgggaaattgacctggttaatcccagggaaaatgatcccagaaaatgatcaaatatttgttttacacgcgcgagaatactaccttatctgttaaataaataaaaaaacagatatatgcccaataaagcaacaagcatgaacaaaattcgtcaagtattacgatgttatgcctttggtagcggaataaggagtatcagtagtatgttaaacatgtcccgcgacacggtcaagaagtatttacaggtttatcaaaagagcggcttgtcacttgaagtaattctttccatggatgattcttctctttgtagcctgttccaggagaaagacaagccgtcggaagaaccgcccgcccgttacaaggaattgcaaacgctcctccctggctatgctaaacgcttaaaaaagaaaggagtaactcgccagcaactattccaggaataccgctccagtcatcctgacggttacgcccggagtcgtttttgtaattatttccaagcttacctggcattatctcacccggttgcccacctggaacacaaggcgggagacaagatgttcattgatcacgccggggacaagctcgcgctagtggatcgcgacactggtcaaacgatacccgtggaagtgttcgtgtccatcctcccgtgtagccagctaacttacgtggaggcggtgatgagccagcgcgaggaagatttgattcacgcttgcgagtccgccttgcttttttacgggggaaccccggcggtcatcgttccggacaatttgaaatcagccgtgaacaagccgagtcgttacgaggcagaattgaacgaggatttcgcggcttttgccgagcattacgggtgtgttgtcattcccgccagggtgcgtaagccaagggacagggcactcgtggagggagcggtcaagctcgtttaccggggtatttacactcgtcttgaaggccgcgtgtttcatgacctggaatctctcaatgccgcgatccgcgtggcactcgagttacacaacaatagcctgttaaccgggcgaagttatagccgtcgtgaacaatactaggaaatagagcgagattgcatgggatcgctaaacccgatccgttttgaactcaagcgacgtcacgtggcaaccgtgcaaaggaacggttacgtgcgactggaaagtcattattatagcgtgccgtaccgccatatcgggaaaaaggtcaacatcctgtataatagcgagaaagtggagatctatctaaaatacgagaaagttgcggttcatcaaaggggatacaagccgtatggctacacccatgacgtggatcacctggcccccagccaacgggtcccggtggactggaacccgggaaagtacctctcggaagctgcctccatgcacccggacgtggaagattacattcgtcacgtgatcgaggtgaaagttcacccggaacaagcttgcaagtcctgtcgcgggattctgaatttcgcttcacgagtgggcgagaagagactggttaacgcttgccggtgggcttccagccatggcttgtacaattacccggccatagaagaaatactgaaaaacaggcaagatgaattacccctggaagaaaacgaggatgataacgagcgatcggacatgccctcgcacgagaacataaggggaaaagaatattataactaaatatcacgagaaaaatggaaatgaatcaagaaacgctggacaagatgcgccagatgcgcctcctaggcatgtacaacgcttttaaaataagcatggagagtttcaaaacggaatcgatgacaaccgaccagttcgtggcgtggctggtttccaacgagtgggacgaccgttgtaaccggatgatagaaagattgatcaagcaagcttcttttcgttacaaggcatccctggaagaagtggattattccctggaacgagggctcgagcgcaacctgctagaaaggctcgcggaattatctttcgtcaaggaatccagggacttgttcatcacgggcagctcgggaacgggaaaaagctacatagccacggcgctaggatatagagcttgccagaaagggatgaaagtactttacgctaacacggccaggttaatgggccagttgaaaatggctaaagcgaaaggtacaattttacaagaactaaaaaaaatagaacgggcggacttactggtgctggatgatttcgggatacaaccttttgatgccgggggaagaatgaatttaatggatatcgtggaagaccggtacgggaaaaaatcaacgcttatcacttcacgagtccccgtgaaagactggtacgatattatcggggaaaaaactattgcagatgccgtcctggataggattgttcaccaggctattcgaattgaattacacggggactctattagaaaattgcaagctaaaagataaaattactatatttgtgaataaaatttaataataataatggcataccggtagaattttatgcgcgcgtacaacgagataatttagccgtttctgggaaaaatttacaggggggcaatttaagttggattctaggggtcaattacattggaatttccagttaaagatcgattgacgattattcaatcaggggaaaagtggtgccccaagaacagaaaagatattccgtgatagccatgaatctggaaacggtggaagatgttgaaaaagtaatccaccagtgcgagctgatcaggcaagagatcactggtggatgtaaaaagtgggattccaagcgattcatgaattatttaccacaagcgaatcgctagacaaagatggttaaagcttcatcgtttcatccttcccgatgagattgcataaattgaaatgcttcatgaatccacatttttcgcaagacatggtaaacatgggtaagtactggtaatcatgattcatattaatgccttgctcatctttaaagaaagacaattgttgggcttcggaaccattgggaagcatttcaccaccacactctggacatttgttcgagatgtgtttttagtttaaggcagcgatgatcttttctcgcttttctggactaaatttcatgcgtataaatttaaattgttaacaattttacaaatttacagattaatatacgaaacggctatagaaagggagaaaaagaaacattgacgatcgttatttggaacaaaacggcgggtaaccgtcacggccccgcctttagtttaatcaatcgcgatggacacgattgtcgtacaaatgtaatgttaataatgaaatattggaatgttttggaataataatttaaaggaggtgtgaaatggaagagttgtttaatgagtttgtaaacgagcatttgttcaaactttctgttggtgtcggagtcgcatatgcaggggtgttgatcgcgatgggtatcgactttgttttcggagttaaaaaggctaggcaattgaaaatcgatcggacttctaccggttttaaaatgacagcaacgaaagcgcaaaagtatttttcgccgatgctatgtcttactgtagtagatgttattacatcagtttacattccagttccggcgtttactttactctgggcttgttattgcagcttctgtgagtttcgctcggtgacagaaaagagctggaagaaaaaggagttacgagatgccgctaacacgatgaaagtaattattgaaaataaagatgatttcgctaaagtcttggctgaaatattgaaagaaaaggaggttattaatgatgctggaactaaatagaatagcaaaaaaaccgctttacacgatcgggcggttattcgtggacaggaaatatttctgcgacacgttagaggattgttgtcgtgatctcgataaggaggaaaaggtaatgaatgaaactgcgatcccggaagggacttacgaggtgattgttaacgtgtcggcaaagtttaggcgtaagttaccgttattgttggatgttccccacttttccggtatcaggatccaccggggaaacacggataaagatacgtccggatgtattttggttggtgaaaacaagcaacagggaagagtgattaactccactggttatgagttaaagttgacggagatgattgaaaaggctatgctttcaggggaaaagatagtaattcaagtacgatgaaaaaatatattatattggtagttacctgtctgtttatcggctttatttccggtaggcagacggtttctattaaagaaaaagaggtgactaaatatgtacaagggggaacaatccgagacacgattgctcagctcgttccggataccgtttacttggccggggaactgaaatacaagtatgtttataaaacagacacgatttataacgatgtacccgtgatcgatcgggaggaaagtattgcggaaacggttagggattggaaccggacgagagaatacaataaattacttttcgatgacgataacggtaaattgtctatcgctctttccttaaaatgtaacgaactgcagaggttatcatactcttttacacctatacacaaggaaatcacaatagtaaagaaaagggtatttgtgccttttgtttcagcctctttctacactcataactccttttcgattgggggagggttcttttaccatgatataggtttgagggcagaatggactacgagagaactaaattttggagtgatgtataagttttaaatatatacaattatatctatttagataaatattgtacgatattttttttgttcctttttttaatgtttaattttggtgaaattt

SEQ ID NO: 10753 - DNA, 101748 bp, Unknown
  gut microbiota DNA sequence
gaacgtttattaacgtcacaaatatagatcttttttactaaagatcgactatattgcttattttttaatattctatcgatcagatagaaagcaaagcaaatatgaatattatccattttgttgatggtcagtatttccgtataataaaacgttcattttttgacacgaagaaaaacacctatggatagtcataacacattgcccatcaaaaaattactcgttgccgaagacaatgaaagtaattttcttttagtcatggctatcttgaaaaaagaataccagatcatccatgccgtagatggagtggaaaccctccaaaaataccgacaatactctcccgacgccattctcatggatctcaaaatgccaaacatggacggattggaagctacccgtgaaatccggaaattaaacacatatatccccatcatcatcgtgagcgcttttgccttcgacagtgacaagcaagaagcaaacgaagccggttgtacggactatcttacgaaaccgatcgactctcgtttattaaaagaaactttgaaaaaatacctttcctgaaactaaaacaaaattcgcacgaaatagacctgtttttcgatatacgaatcacaaaaatcaacgaattacaatacagaataatttctacattagaaacaatctatataatgccaagttgataacaaataacttgtacctattaataaattaattatatttggaacgcttttcatagtgattgaaatcaaatcactggaaaaagcaaaaaattataagaatgtgtgcttctcattcaagaaaaaatagagtaattaatacaggtattgaatgcaaacgttatcggaccatatcttagatattgcccaaaactcgatacgagcccaagcctctcgtgttgaaattaaactgcaagagaatataacgaaagattctcttgttattacgatcagagataacgggtgtggtatggacgaaaccacggttgcaaaagttaccgatccttttttcacgagtagaaccgtgcgtaaagtcgggctgggcatccctttattcaaacagaatgcagaggcaacaggaggaaccttgaaaataaaatcaaaaccgggagaaggtaccacaatcgaggcaagcttcggtcttttacactgggacagaccacccatgggtgatattgccgggagcatcgtgattctcgtgtcggcaaatcccgaaatcaactttatttaccgtcacaccacggagaaaggggaatatacgttcgacacgaatgaagtaaaagagatactggagggagtacctctcaacgacccggaaatcgttatagcattaagacaaatgatccgggaaaacataaaagagattacacaaacaagttaacacaaaataaccttaatcattttatatggaaaaaatcaaatcactcgcggacctcaaacgcatcaaagaaaacgtgcagacgaagattgatcttcgggagaaaagtgaacaggttgaaaacctgatccagattaaagtggctatggcaacttgcgggatcgccgcaggtagtaaggacaccatgaactactttatcgagaacctggagaaaaacgggattgctgccgtggttacacaaaccggatgcatggggtactgttacgcggaaccgaccgtggaaatcacaaaaccggggaaagacccgatcgtgttcggacatgtaacgaccgaaagagccgaagaaatcattcagaaatacctgaagaatgacgagctcgtggccgacatcattccggtaaattttgaaacaatctaaaacaaaaaaaagacagctagaacaactaatcaaaaccttgaatctatgagttataaaatgcatatcctcgtttgtggtggaacgggatgtagagcatctgccagtcaccagattattaccagactggaagaatgtttaaaagagaaaaacctagaagacgaagttcaggtcatcgcaaccggttgtttcggtttctgtgaaaaaggaccgatcgtgaaagtcatgcctgacaacaccttctacgtacaggttaagccggatgacgccgaggaaattgtaaatgaacatgttatcaaaggacgtaaagtcgaaagattattatataaagatccggaaaagaaagaagcagtaagcgactcgaaacacatgggtttctacaagaaacaactgcggatcgccttgcgtaactgcggattcattgacccggaaaatattgaagaatacatcgcacgtgaaggatattccgcgttagcaaaatgtatcaccgagatgaaaccggaagaagtgatcaacgagatcaaattatccggacttcgcggtcgtggaggtggtggattccccaccggattgaaatgggaattcgcgagcaaataccaggctgaccagaaatacgtggtttgtaatgctgacgaaggtgacccgggcgcattcatggaccgttccatcatggaaggtgatccacattcggttattgaagccatggccatttgcggatacagtattggggctaccaaagggttggtttacatccgtgccgaatacccgcttgccattcaacgcctgaaaacagccatccaccaagccgaagaattcggtttactgggtgaaaatatcttcggaaccgatttctcgttcaatatcgaactacgctacggggccggagctttcgtttgtggcgaggaaacagcattgatccactccatggaaggacaccgcggagaacccacgatgaaaccacctttcccggcagaatcaggttacctgaatcgcccgaccaacgtgaacaacgtggaaaccctggctaatatcccggcgatcatcatgaagggagccaattggttcaacaaaatcggaacggaacgttccaagggaaccaaggtattcgcccttgccggaaaaatcaataacgtgggattgatcgaggttcccatgggaactacccttcgtgaagtgatttacgagattggtggcggtatcaaaaacggtaaaaaatttaaagcggtacaaaccggaggtccttccggcggttgcttgaccgagaaacacttggatgtaccgattgatttcgataaccttctggcatccggttccatgatgggttccggtggtatgatcgtgatggacgaagacgactgtatggtatctgttgccaaattctatcttgaattcacagtggaagaatcctgcggtaaatgtacaccttgtcgtatcggcaacaaacgcttgcacgaaaccttggataaaatcacgcaaggtaagggaaccatggaagatcttgagacattgaaaaacctcagccgcgtgatcaaagacacggccttgtgcggtctgggacaaacttccccgaatccggtattgtctaccatagataacttctatgacgaatatctcgcccacatcaaagacaagaaatgcccggcaggacaatgtaaggcattactcatgttccacattgacccggaactttgtatcggatgtggactctgtgcccgaaactgtccggtagatgccatcgtgggtgaacgcaaagaaccgcatttcatcaacacggccaaatgtatcaaatgtggcgcatgtatggagaaatgtaagttcaaagcagtaagcacgagataatttagaatttaaaatttagaattgctcaagcagttgaagaagtttatactatgaatgaaaatataacactcaaaatagacaatcgggaaatcagcgttcccaaaggaaccacgattcttgaagcagcccgggaactgggtatcgatatacccacgctttgctacatgaacctaaaagatttatgcatcaaaaacgccccggcatcttgccgtatctgcgtggttgaagtagatggcaggaaaaatcttgccccttcttgtgccacccgttgtgaaaacggtatgaacgtacacacgaataccatgcgcgtgctgaacgcccggagaaccgttttggaattaatgctttcggatcacccgtcagactgtctggtatgtgccaaatccggtagctgcgagttgcaagccgtggccatcaaactgggaatccgcgaaattcctttccaaggtacgcaaaccgaatacaaggttgatttatccccttctatccgtcgggatgccacgaaatgtatctattgccgtcggtgcgaaatgatgtgtaatgacatacaaaccgtaggggcactcggtgccgtgaaccgcggatttgattcggtggtaatgccggcgttcgatcaggcactgcaagactcggaatgtactttctgcggacaatgcgtggctgtatgcccggtaggagctttaaccgaactggatcacacgaaccggctgatcaaagatctggcaaacccggacaagaccgtaatcgtgcaaactgccccggccgttcgtgccgccttaggggaagaattcgggttacctgccggaacatccgtgacgggaaaaatggttgccgctttacgcaaattaggctttgccaaggtatttgacacggacttcgctgccgacttgaccatcatggaggaaggtaccgaattattaggtcgtttgacagcattcttaaatggagataaggatgtgaaacttccgatcatcacctcttgttgtccgggctgggtgaatttcttcgagaaacaattcccggatttacttgataatccttctagtgcacgttccccgcaacagatgtttggagctattgcaaaaacttactgggctgaaaaaatgggaatcaaacgggaagacctgattgtagtatccgtgatgccatgtctggctaaaaaattcgaaagtgaacgtgacgaattcagaacaaatggggatccggacgtgaactattctatctctacacgtgaattggctgctttgatcaaacaaacgaacatcaatttcatgcaactggaaaacgaggatttcgacgcaccgttaggagaatctaccggagccgctgttattttcggtgcatccggaggtgttatggaagcagccttacgtacggcttacgaggtacacacgggtaaaacgttggataacgtgaacttcgaaggtgttcgcggaatcgaaaacctgaaagaagccaccatcgacgtagacgggttcgaattaaaagttgccgttgcccatagcttgggtaccgcccgcaagttgatgaacgaacttcgtgccggcaaatccccctatcacgccatcgaagttatggcctgtcccggtggatgtatcggcggtggaggtcaaccgcttcaccacggagattccgcccgtatcaaggctcgtgcgaaagccctttactcggaggatactgaaaagaatttcaggaaatctcacgagaacccctatatcatttccttgtacgaggagttcttgggtaaacccatgagtgaaaaggcacatcacttgttgcacacgtgctattttaatagaggaaaagagatcattgaacaataattcgagatatcattatgacacaaatatcattagccaagtgcaaagttgaccaactggtaagcctgtgtgaagaattcgggaatcaaccgggagagttgattaatatcttgcacaaagcacagggattgatcggctacctacctagagaagtacaggaagtaatcgcccgccaattaaatatacccgtatccaaagtgtacggcgtagtaactttctattcattcttcaccatgaccccaaaaggtgaacacccgatctccgtgtgcatgggaaccgcatgctacgttcggggtgcagagaaggtattggatgaattcaaacgtattttgaaaataaatgttggagagacaaccccggatgggaaattctctttaaccagcttgcggtgtgtaggtgcctgtggacttgccccagttgtactgatcggtgaaaaagtttacggacgggttactcccggagaggtggagaaaattctaaaagaattcgagtaacataaaaggcggtcgattgaccgccttttatgttagttacaagttcatactacaccaacctgtaacttgcaactgattttgtagaagacaaaatcactttatcggaattgtaaaattaaagttagaaccgacaccttcctcagaagtaaaccacaagcgcccatgatttttgctcacgaagtctttacacaataataggcccaagccggagccttcctcgctatccgtaccaaaggtcgtgaaatgcgtggactcatttaacagcttttcttgatcttcattcttgattccacatcccctatctgacaccgtaacaagcacttctttaccattcccctcctcagtcttgttctcatccataacatcctgtaccttcacatgtaccataacaacggtatttttatgactaaatttaattgcatttgaaatcaagttacgcacaacggattttatcatttcgatgtcaacgataacattgataaattcgacttctgaatccagttccaaagaaattaacttactctcagctatcggcttaaacacctctataacgccatctaccaaaccgaccatatctatcggttgcggaacattagacaacttacccaactggctcttggtccacttcaacagattatctaataaagaaaatacttcctccgctgttttattggtcatttccaacatctcgaacacgtcccctggaacggtttgcgggtcgatgctcatcataatcgtgttacacaacatcttgatggaagccatcggtgaccgtaaatcatgagcgatcacggaataaagcttatccctaccggcaattgtctttctcaactcttccgtctgacgtaaaataacccgtctggcatccaccagagaaagttgatgttccacccggatcaacagctcttcccgacgaaaaggtttcgatataaaatcattcgccccgagttggaaccccttcacaacacttgccgagtcattcaacgcagtcaaaaatataattggaatttcagcctgttccggctccaccttcaagtgtcctgccacctcaaacccgtccatatcgggcatcataacatccaacaaaatcaaatccggatgttcacttttcactttttccaaagcttccgtcccgttcatcgcatacacgataccaaacccctcacgcccgagcaaagcttttaacaacagcacatttgactgaacatcatccaccactagtattttatattcagcaggatttattttcatacacttcattttttaattaacacacgtaaacgctgtcacaaatgtacaaactataatttattttcgagatatctttcgaccatagttttcaacttttcagcctctaacggtttagacatatatccgttacatccggcggcaagagccatttcccgatctgtttcaaaagcaaaggccgtggtagctataattggaacagtcggattcaattcccggataattccggccgcagacaggccatccaatcccggcatccggacatccattaaaattaaatccggtttactcgattcatattttgtcaccacatcaatcccgtcattcgctcttagcacggaataacgctcttccagtatagccttgaccaactcgtagttacaatccatatcttcagctaccaatatcaacggtttattctgttccccagcaaccgggaacgtaccattacaaggtattaaaaaatagaaacaagacccgacaccaagctcggattctacccagatttctccacccattttgtccagaatggatttacagatagacaatcctaacccgaaaccctgtttcaacaaatccagcttttcaaaacgcccgaatacattattcaatttttctgccggaatcccgctcccggaatctcgcacatatccttccatcatatctcccttcaacttgtacccgaaagtgattgcccctttttcggtatattttatagcattggaaatcaaatttgaatagagttgcctcaatcggtgagaatcggaaacaatcgtcagagatgccgcaggtcgctcgaaaattatcttcacgtcattcttgattcgcatctgatgcatttgccgtaattcctcgcacaactcatccatctgtatgttctcatctatgaattccattttaccggattcgatgcgggataaatcaagaatatcattaataagatgcagtaataaattactattcgccttgacaatatccaaatattcttcccgttcacattcactttccgtgtgagcaattacctcggaaaaaccgacaatagcgttcaacggagtccgaatttcgtggctcacatttgccaaaaaggccgacttcaaacgatccgattcttccgcccggtgcttggcctcgattaatgcctgttcatcatcccttcttttttgaatatcagcaataaaacccaagactttcgtaacttttcctcgttcatcaaattcttgagccactccttttaaatccacccatttatactccccggtatttaacaaatccaacctgagttccaagtcaatcttacatgactcacccgccaaaagacgattataaatagcctcaaaaattccccgatcatccggataaatactggcaacaaaagttgtcatacgaaaaaagtcatcatgaaattcctttcgatcaacgccgtacgccttgaataattcatccccgatttcgattttcccgctgacaatatctgcaaaccagggaaaaacgttaccggcctctaacattaacgataacctgaccacgttatccgctaagaacttttctgttcgtttcactaccaccttttcacataaatcaccttcattttcctcaaagccctccccgttctttgcttgttgaaaaatctcttcttgcaatttcccgacttttccttgcagctcatgacacaaattttcttgcaccaacaactttctgacgagttcttctctcgtaaggctttcatatacacccattctatatttcgattaaaatcgacgaaatgtacaaaaaaaatgaacatttcttacatttatacaaacaaaaataatgctattttgcaacaatgttgtatctttgcactattaaaagaaggtgatatatgagtaaaaacattctgatagtggatgataagcctgaaatagcgaaagtcatcacgatccaactatccaaggattataatgtacattcggagggaaatccgattgaagctcttgcatggatgcacgcaggaaacattcccgatcttatcatatcggacgtaaatatgccggaaatggacggacgaacattcctcaagcagctaaaagcaagctccacgttcaattttatacccgttattattttatccagtctggagagcagtaacgaccgaattgaattgctggaggcaggagcctctgacttcgtgctaaaacctttcaacccgcaggagctgaagatcagagtacgtaatttattgcggtaaagatatgtacacgtattatatcgggaaaaacacggactggataaacaaaatatcacattgtctgaattgtcaagttattactttcaataacccgattaaaacgattttgagtatcaatgaacgatcgaagaaagatatatcacccacttatatctttatcgaatcatacaataaaaaaagggatttacaatggttgaacgctatcgctcaaggcaatccgaagaacacgtatctactactactttcagagaagattgcaaaagaagatattgtggactatcttcatgccggcactagcgaaatcgtcaatatcaacacaacgccggaagatttacaaacgacattagctttcctgcctaaaataaagcaacacacgacagctcatgttcaaaataatccccggagattcaagctcccttggtggaaaagaacatttgacattttcttttccgggacagcaatcgtttgcctctccccatttctaattgtaacggcacttgccattcggatcgaaagtaaaggtcctattatatataaatccaaacgagtcggaagtaattacgacatatttgatttcctcaaattccgttccatgtatatggatgcggataaacgcctaaaggaattcgaggccttgaatcaataccgggaagaaacacaggaacaacaggctcataccgaaacttccccaacctccaatcaaaccaacgaaactcttctcgtggccgatgatttcatcacgacagaaaaacaattattaaagaacagacgaaaacaacagaaaaatgctttcgtcaaattcgagaacgatccccgaattaccaaagtcggacgtatcatccgtaaatatagtattgatgaacttccacaactggttaatattctgaaaggagatatgtccatcgtcggcaaccgccccctccccttatacgaagcggaattactaaccacggacgaatacatcgagcgtttcatggccccctccggactcaccggtctatggcaagtagaaaaaagaggtgaccaaggcgccctttccgcagaagaaagaaaacaactggatataaaatatgcccgcaacttttcgttcgggaacgatataaagatcatttgcaaaacattcacggcgtttgtgcaaaaagagaatgtgtgattaacaatattttaaaatatgggtgctaaatatattattatagcctgtttattatgtgctgattttgtttgctttgctcaagagaaacagaaaagggattctattcctccttacgaaagtttcgttccgcaaacactaacaaccaatgaatatattaactatcaattacccccactagactctctgtttgaaggagctaaaacaaatccccgactgaaagcaataggtgcatctattgaggctgcccgtaatgacctaaagacagccaaacgagattggttacaatacttttccgtacgggccgggtacacgtatggaattctcggaacatataccgatcaagaaagccagtatacacccttaacaaccgtatattccggagcaactcaaaatagttggtctgtaggagccaatatcatcattcctttcaacaggttcttcagccatagggtaaacgtgaaaaaacaaaaagaacttgtcaagaacgcagagtacacgcaacagatcaaattcgatgaaatcaaaaacgaaattatcgagttgtattgcaacattcaataccaattgaaattactaaagctagcaacagaatccatcaccctgtataacgcagaataccaggtagcggagcttgactatattaataataaaaacaacaaggacaggtcactaagtgacttaaaacattcacagaaagtggcaaaaattgaatatgaaaaaatcataaatgaattaaacatcatgttcttaaagctcgaacttatcagtaatattcattttagaaaccaatagcaatgaaatatattacctactttatcaagttcttctatcgtattcggttctggttgatcatagcaccgattatcgttgcatctctcgtctactggaaaaccaataatacccctcgcgattatacgacgacttgctccatatataccggcattatcacgggtgtcaatattttatccgaaagcggaatttccacgacttcttatacccaaggtagcatgatggataacctgttaaatatcatcacagcggaccagaccttaaaacaggtttcattacgtctgtatgctcgcattatggtatacggtgatccccataaagacaatatctatacaaaagccagtaattatagaaatctctacaatcatggaatacctattcataatttaatagataaaaaatctgataatgattcgatcaacgagcaacgtacctacgaaaagttacttgcttatgaaacaaacgatccgacaaactacgtctacggaatatatcaatggaatctcccctatgtcaatcgggaaactttgaaaaaaatatatgtcaaacgccttggtaatagtgatgtgcttgaagtttcatatacaacaaacgatcccggtatcgcatatcaaacagtattgattttgattgatgaatttaataaacaatatcaagagctacgtttcggcgaaactaataatgttatcaaacattttcgccacgaattggatagtattggaaaagaactcaagatttcagaagattcccttaccaaatatcgagtggaaaaacaagtgatcaattacgacgaagagacaaagcatgtggcagctttgaatcgggattacgaattacaatactgggaaacactaaataattataattcaactgatagtttaaaacgggaactcgaaaaaaggatgcaattatacacggaaattattcaaaacaataattcgtttatccttttaaatagcaaaatcagcgagatcaatgaaaagctggccatggcaaaatactacacgagtgatgctgtttcgaaagtaaccattgattctctccaatgtgaattagacaaaaacgagacggctttaactgaagccgttcataaaatagggtatctgaaatatagtaaagagggaatttccaacgagaacatgatcgaagagtggttgaaacaagttctcgcctataaaaaggctcaggcagaattaatcgttttaaataaacgaaagattcatatggctcaaaaatacattcattttgcccctatcggttcgaccctaacacgtaaagaacgtatggtaaacatcaatgaaagaagatatttagcgattcttgacgccttgaatacagctttattaaaacagaagagtattcaaatgaattctgccagtttgaaactaatgaacgccccctactaccccttagttccctccgcacttggtaaacacaaattactaacgatcggagcttatttagcaacattaatattcacaatatttttcttcttgattattgagatactggatcatacattacacaatctcttcaaggcagagcaattgactggatgtaaggttttgggagctttcacccgccaattatctcttgctgccagaagatacaataaagtgtacaccacgctttccgcacaaaacttgtgtaattccgctacgacttatttcaagcctgatcaaagtaatattataaatttaatcagtaacgaacccggagaaggaaagagctatatcatggagcaaatggctcaacaatttagggaacgagggtatgacgtaacacaattgtcctggcaaaatgaaccacagacagatgctcaagcttttattcaatccttgaatatgaatgacacggatgatttggaaaagaacagcttaaaggaaaaaatcgttatcgtagagtatccttcgctaaaagaagccgcattaacagccaatatcttacaaaatgtcagcctaaatttacaagttgtagattctagacgtacatggaaaaatacagatcaacaacgatttgaacggacaaaagaaatgtgtcataaagcacccctatttttgatattaaattacacgaaacgggatgcggcggaagacgtgaatggtttaatgccaccttactcttttttacgcaaattattgtatcaactttcacaattaggactaactgcaaacgacaagacaacacaaatctctaaagataaacaccgtaatgattaaaaatggctcgtcctatattacagcgatcgcatttttcatcggtctgtgtgctatatacctattaacactaaaaggaggaattatcccggcccttctttttgcctgtttaccggcaatagccatggtgacagccaaattctgccggaaacagtattacttttacgtcttttttgtcataaactacgtcatcaccggaatagaccgatatattccattgaaatttggaatgattatgctcggtttaactttagggatcggatgtcttcttcttttaaaaaacatcttccaagtatatgaatggagacgtggctttaatgcgctaaccgctttatggggtatatggttcttttattgtttatttgaacttttcaacccgttagcggtggctgacgcatggtttatcgccataaatggatatgctcttttcccgttgataagtgctataattatacccgtcctctttactcaattcaaacattttcattggctattagtcctgtgggctatcttatccatattggcagccttaaaaggatattggcaaaaaagtcatggatttgactctgccgagttatactggttgtttgtagaaggtggggcaagaacccatattattcattacggagtccgttacttttccttcctatcggatgcagcaaactttggaatcacgatgggactttccctagtcgtattcgggatttcaggcttttttgttaaaacacgttggataaaatatctattttggcttgccgcccttacctctacctacggattattaatctccggaacccgtagtgccattgcggttcctttagtcgggttatgcgcatacgcagtactatgccggagtttcaagaatctattcattgccggaggaatattaatagtcattatcttatttctcacccaaaccaatataggcaatagtaactccattatccgcaggatgcgttccgcattcaataaagaagatgcctcttttaaagtcagagggatcaacaaggaaaaaatgattcctctaatgagggataagcctttcggggtcggattgggactaagcggggggcgcatggaacgttttgcaataaatagtaaattatccgaattacccccagattccctacttacgatgtattggctggagactgggatcgtgggattatcactctatctttctttgctggtcctcatttttacacgagcctcctatattgccatgttcatcataaaagacaaacgattgaagaatattctattttccattatagccggtctggctggtgtatttgttgcagcctatgccaatgacatcacgacttacccgaacggtatcctcatttatattctatttgtattcttattcattgcaccctattacgacaaagagttaacacagaatgaaccaacaacctgatatatccattataactattaattataacggtttgaaagaaacttgtcaactaatagaatctctacaacaatacccacaagattgttcgtacgagcttattgttgtcgataatggttctattcagaatgaagcgttacttcttcaaaaaaaatatccggaagttcacgtcattcgcaatgaacaaaatgtaggtttttcgggaggaaataatttggggattcagactgccaaaggaaaagggatattcttgctaaataatgatacattggtcacggccaacgatctaaagtatctatacgaaagattgtatagctccccggtaataggtgccgtaagtccaaaaatcaagtttgcttttccaccccaacatatacaattcgcagggttcactcctttaagcaaatacacgttacgtaatcggactatcgggtataacgaaacggatgaaggacaattcgacataccacaagaaacgagttatttacatggagccgccatgatggtaaaacgagaagtagtcgaacaagtcgggaggatgccggaaatctatttcctctattacgaagaaatggactggtgtacacaaatgtcaaaacaaggatatcagttatggtacgaccctcgttgcaccatattccacaaagaaagtcgcagtaccggtaaagattctcctttaaaaacatattacctcacccggaatcgcctgttatatgcttggcgcaaccgacaaggaagaacacgttatatatctatactatatcagcttttaatggctaatcctaaaaatataacgatgcatctactacacggcagattattgcaagcaaaagccattttcgacgggagtagggatttttttctactaaaacataaaagagaaaatatatgaatattcaagaagtattatacatattcgagtatatctgttggattcttgcaagtgtcgccgttgcataccccctaatttattctcttgcctccctcggaacaagaaaatcatattacccgacagccaataaacagcataaattcgccattctgttccccgcttataaagaggatagggttatcattccggtcgtggagtctttcctacaacaacattatccacaagagttgtacaaagtaattgttatctcagatcatatgcaggatactacaaacgaacatttggcacaactcccgatcacgctactcaaagcaaactatgaaaatagttcaaaagcaaaagccctgaatttcgccatgaaccacttcggacgggatgaatttgatgcagttgttatcctagatgccgataatattgttgatacaaattttttattagaaattaataaagtctttgatgccggagtccaggctatccaagcacaccggacggcaaagaatcggaacacggacattgcggttcttgatggtcttagtgaagaagttaacaactccattttccgacgtggacatgtaagactaggcatatcctccgccctgataggttcgggaatgatattcaactatcaatggttccatgacaacgtaaaacacctcgtcaccacaggggaagataaagaattagaagttttattactcaaacagagaatatttattgaatttctagacgaagtgtacgtatacgatgaaaagacacaaggagaaaaaggattttacaaccaacgccgccgttggttggcaacacaattcgctcaatggggacgagtcttcaaggatcttccccgagcaatcttgtccgggaatattgattacagtgataaactgatccaatggatgttaccacctcgtcttatcctattcggaggaatcatcgtgatgggaagtatcatgcaaatcattgattggccgcttgccttgaaatggtgggctttatttcttatcatgggagtcacgttgtgtctcgccataccggacaaactagtggatgatcggttcaaaaaatcaatcaacaaactacccttgttatttatcatgatggtagtcaatttattccggatgaagggaatgaacaaaaagttcgtgaacacggaaaagaatggttcctcaactttataaaaatgaaccctatgaaaatagccattgaagcacaacgcatttttcgcacgaataaacacgggatggattttgtcgctctcgaaacaatccgggaattacaaaagctagatcatattcatgaatattacatattggttgcccccggagaagatcattgtctggaagaatcagccaacttccatattatagaaataaaatgcccgacctatccgctatgggaacaagttgccttaccactagccattcgcaaaataaaaccggagattgtacattgcacgagtaacacagctccattattctgtccggcacgactaatcctcacattacatgatattatatttttagaaaaacgggtacacaataataagtccatgtaccaaaacatgggatggtactatcgtcgttttgttgttccccggatactgaaaaagtgtaaacagattattaccgtgtcccaattcgaatgtcatcggattcgggaaacattacatctgccggaagaacaaattatcgccattcacaatggtttcagtaaacgttttcatccgttagagtcggtttatgacaccacgaaaaaatatatccctgccaaagaatatttattttttctgggaaataccgatcctaaaaaaaatacaccacgcacgttaaaggcgtatagcgtgtatgtacaacaatctacccacccattacccctgttaattgcagacttgaaagaagaagtcatccatcaaatattaaaacaagagggtatcgaaaatattaaaaatatgctctattctccgggctatatcacccattctgatttacccgccatatataatggtgcccggactttcctctacacttccctacgggaaagttttggaattcctcttttggaagccatggcgtgtggaactccagttattacttccaacacctctgccattccggaaatcgcaggagagggggtgatattggttaatccgctagacgttaatgccatcgccaaggaattactccgactggaaacagacgttccctatcgggatcaacaaattgcatacggtttggaaagaagtaagcaattctcttggcaacacacggcagaacaattactgaaaatatatgaatctatacactaaaaaagaagattatgaatgattatatatctattattagctcgttgatcatatttctatttccatacttgggacgcaaatggtttaatcctcaactattaagttcaacggtggtcagtctcggattactgggaacttttggaggtatcatgtacggcctgtgggttttcagtgtcgagcaaattgactcatctattccgcaattattggaaggattaaaaacagcctttttaacttctatcgcaggtatgttagcctcgttaatactcaagcttgtacccgttttttacgggattagaaaagaagaagaacaggaagaagaggtcacagacaaacaattactcctagtacttgaaaatatcgagaaaaatacacaaccgacagccacactggcattggttcaagaggttaaattttcaaacgaacaactcaaaaataattttcaatccttgaacgacaatctacaaaacatggttgccagagaattacatttcaacacggaagcactggctagttctctccaatcggttatatccaatttagacaataggatttcagaacaaattaatcaaaccattttaaagatatacgatatactggaacaacaattacagcatatcatacattcccaagaatttaaccagacaatacaggaacaacttcaagacactctttctaaattacaagaaacaatacagaacatcgaaaccttcttgggaaaatccaataatctaaacatgaaacaaaatcatgttttcatggagcaagtgacctcattcggtgaatttatcaaaggctcggaacaacaaatgagttctcaattaaaccgtatggaagaaaaatatgaaagggaattaaccgaactggaaaagtttaccaagacgttaatgacaattatcaagaaattatcacaagaccacgatacgctgtacaaaaaaacaaatgacgtggaatgaatatataattgtgtattatgaaaatattcaaatcattgaaagaagaaaaccaatggatgtcaatttcagacttgatgtctgtacttatgatgatctttcttttcatttctatcgtgtatattagaagtgtgaatctcgaaaaaaataaaataacttctatcgcccgaacctatgaaaccacacaggttgaaatcacgaacgatttaaaaaaggagtttacgaagaatctgcaaatttggaatgccgtattcgattccttagcgctttctatccgttttgagaatcccgaaatcctatttaaggtcggaagtgccgagttaaacgatcatttcaaaagcatactggatagcttctttcctcggttcatacagattctaaccgatcccaagtacaaggacgatattgaagagattcgtatagaaggacacacgtccagcgaatggactggagaatcctctccttatcaagcttatttcaacaacatggaactttcacaggacaggactcgcaaggttttagagtatgttctttcacagataaaagatgaacgactactccactggactaaaagtaaacttaccgccaacggtttatcttccagtcatctaatctataatccgaatcaaacggaaaacaaaaaacgttcccgacgggttgaattcaaaataaaaacaaatgcagaacaacaaatcattagaattttagaacaaagtaaggagtaaaaattgaggggcaattctcgaaagattaaattgataaatatccaaataatgattgatagacttaaaacaataataaaaggaaacgaccacattagaaaactcatcctgtggtcaatcacacctaccactaatcctcgtccccgcttttggatcaaatgttttataaacccttttatacaccaaaaagggaaaggagcaatcattcgaagaagaagctcacgcattgatgtatttccatggaatcagtttattgtaggtaaaaatagtcttatcgaagacttcacaaccataaacaatggagccgggcatgtcattatcgggaataacgcccgtgtcggaattggttctgtcattataggtcctgtacgtctgggagataaagtcggattaggtcaacatgtttttatttcaggtttcaaccatgggtatgaagatggggagcgagattctaatgaacagccactagtaaaaaaagagattattatcgaagatgaatctcatatcggagctaacgctgtcattgttgcaggagttcacatcggtaaaagatgccaaattggtgcaggaagcgttgttaccaaaaatattcccgattattctgttgctgtaggcaacccagccaagattatcaaacaatacaattttcagaaaagagtatgggaaaatacaaataataaaacaatgaaccaatgagaactcgtacacccaaagacagatgggacctgtccatccacaaacatgatcgggtattagaaatcggttctgggcataatcccctctatcgttctaatgttattgttgataaatatgtagataataatgctcaccgatgcggagatataaaaattttccctcatcaatattttgtacatgcagatggagaacacctacccttcaaagacaaagaatttgactacgtgatctgtaatcaggttttggagcatgtagacaaccctaaactatttattcaagagatttgcagagtcagtcgacgcggatacattgaaactcccagtctcataggagaatttctattcccgaaagaatcacatcaatgggtcattcttgacatcaatgataaactagttttatataaaaaagaactcatgcccggaaattatataaataattatggagaactatttcttaattacttaccctatcaatcattaccatataaaatactaaaactaacagaagggaatctgatgattaatcgctacgaatggaaagatgaaatcaatattatcgtgaatcctcaagatgattattatcttccatttttcacacaaaaatgggatcgaaatatggttgaaaagttatttccgcctcgcagtgtttatcatgaactaaaagcgacgtgtgatgctataagccacatcataaagataaaattactcgaatcattacacaaaaacaggaaacttcaaacattggaagagcatttacaaccgaacaacactcctccacaaaggaatttgagaagtacacacgaaaacaacaaaatacaatgaaaccagttaaagtaagcgtaatcatccccgtgtataatacagaattatatataaggcaaacgattctatctatactggggcaaacattacacgatatagaaattattgccgtcgatgatggctcaacggataatagtctatccattctctcggaattagccgaacaagatcatcgaataaaagtattcgcccacagaaatcaaggagtttctgtagcccggaatatcggacttgggcaagcatcgggagaatttatttactttatggatagtgacgatcttctggaaaaatatacattagaaatatgttatcaaaaatgccttgacgaacagttagattttgtccttttcgatgcagaggccttctgtgaagaggattctactctcagaaaatatcgatatcaacgcaatctacagactgagaacaaaatttggactggaattgaactattaaaaatacaagatgacacaggcaattttcgaacatcagtttgtctctgttttacccgtttaagtttcctacaaaaaaatgccattcgattttatccccacattatccatgaagatgaattatacacggctctgttatatttaaacgctacacgagtaaaatatattcaacgaacttttttcaaaagacgagtaagaaaaaactctatcaccacccgtccattttcaatgaagaatatccaaggatatttcaccgtggcaaatgaattaaaaaactacacgtattcacaaacagaagtaagagaaatcattcataatcacttatctaaaatgctcaacgctgccatacgaaatgctttcaaactacctgcaaaacaacgtctttacattgtgaaatgcgccctaatggactactctaaatatgtgaattgtaaaacaatttgcgtgttacttttcaaatctctactaaaaagataattctatgggttcgattaaaaaagagctactctccggtgttttctatactgccattgctaaatattcgggtattcttatatcattacttattgctggagtacttgccagattaatatccccggataaattcggtatcgtggccgtagtaacggttatcacctttttcttcagcatattcagcgacctcggaataggagcggctatcatacaaaacaaggaacttcaacaaaaagatcttaaccaattattttcattcacggtatggagcgggtgtattctaacactattatttttcctttgctcatggcctatttcctttttctacaaagaaccgagcatgaggacgatcacccaattattggctataaaccttttcttcgcatcggcaaacattgtcccgaatgctctcttgtataaagcgaaagctttcaaatttctcgcatggagaagtctaggagtgcaaataaccggcggaataatagctattctggcagctcttaacggagtgggactctatgcattaattataaatcccattctttccagcatcctattatttatcatatcttatcgaaaatatcctcaaacactggaaatgacctggggcatcccttctatccggaaaatattcaaattctcggcttatcaattcatgttcaatataatcaactattttagtcgaaatctcgataagctccttatcggcaaatacatgggaatgtcacccttgggatattacgaaaaatcatatcggctgatgatgcttcctttacaaaatatcacccatgtaatcactcccgtgatacatcccatcttttcagactatcagcatgatttaaaccaactggcaagtgcatacgaaaaaatcatccgtttactggctttcatcgggttgccattatctgttttcctctggttctctgcacgtgaaatcaccttgatcgtattcggaaaacaatggatgccctctgtttcaatatttcaaatattatctatttctgtcgggatacaaatcatcatgtctacctccggctccattttccaagcatccaacgacacaaagagcctatttttatgtgggttattctcatcaatcatcaacgtggcaggtatatgcgtcggattatttattttcaaaacactggatgccatagcctggtgtatcacgatcacattttcaatcagtttccttcaatgctattaccaaatgtattacatcacctttcgtcgttctatcattcatttagggaaacaatttctctcccctatcttactcagtagtatcgtatttctaacactatttttaattacccctttcataactccatattcgttatttatcaatttgatcataaaatcagttgtctttatagggatagatctaacctatattcatatcacaaaagaatacaatttggtgaaactacttaaattcaaagcatgaaagcattatttctcacgttccatggctttcacgccaccaatggaattagcaaaaagatccactatcaagtacgagcactcgaagctaacggggtggaaactcacctttgttacttatcggaaacacaagggataaaataccgtatgttggatcaagagattttagcagattatggaggaggaataaaaggaaagctatacaaacgctttgaattcaattcggtcttccgctacattattaaaaaccaaattgatctggtatatattcgctctgaccacaatgccaatccatttacgattaggctagtgcgtaaaataaaaaaagccggaatccacgtggttatggaaattcccacgtatccgtacgaccaagaatacgttttatccaaaaggaaaatacaactacttatcgacaaatgttttaggcaacaacttgctaaacatctggatcaaatcatcaccttttccaattacaaaacgatattcggaacctcaacacttcaaatctctaacggaattgatttcaatgacattcccgtaaaacaagaagcaaacaacacttcacaagaaattcatttaatcggggtcgccgagatacactattggcacgggtttgaccgcttgttaaaaggccttgccaattactacattcattctccccaatacaaagtgtatttccatattattggagatttttttaacccaggagagcgtgaagaatatatgtctatcatcaaagagaatcacttagatccctatgttatcctacatggacgacaagctggacaaatgcttgaccttctttttgagctatgcgattttgggatcggcagcttaggacgccatcgtagtgggatcacaaatattaaaacgcttaaaaacagagaatatgcagctagaggtattcctttcatctattcagaaatagacgaagattttgaaaatatgccttatatcatgaaaatcccggcaaacgaggaagccgtggatataaagcaaatactcaatttttacaatcaattacatatcacgcctttagaaataagaaattcgattcgacatctttcatggaataaccaaatgaaaaaggtacttgatgagatgcagaaaaaagacaaaataaatccaaataacaacaatattgctaactttgccacataatatataaataaatttatccctaataaagagaaatggccgcactaaggtttttcttttacctgttaatgaaaccagcaaccttgggaatgacactcttgggcgtatgtggaatttttgcaccatgtatcaatcctgataaatggtggattcctgcattatctggtctattcatgccgggaattatattagccaatttatatctcctagtattttggggtatccataaaaaatggtggattatattaccatttatcacaatcatcagtaatcatcaattcttttcaggaatgttccaatcaccttggaaacaagatattccctatgttccaaaagatgaaatcaccatcgctagctataatgttgaaggtttttactggatcgcacgaaatataaaatataatataaaaaaattagtagaagacaatcacattgatattttatgtatccaagaacattgtgaagaatcacatctggatagcatcaccattcaacaaaaattcggacttcccaatcgatgtgtgttttttaacagacaaacggcatgggccaattttggaatcagcatatatagtcattatcccataattcgatatggtaaaatcaatttcaattctgaaaaaaacaacagcatgtgggcggacatcttggttagagaagacaccatccgtgtattcaataatcacttacaaacaacagatgtcagcataaatggtaaaaaatatgaagaatacagaagtgttaaagactggaaaggtcaagcccgtacacttgtgaacatcgtggaacaactaaaagacaactttgtcattcgtgccaatcaagctatacaagttcgaaatatcattgacacaactcgttaccccgtcattgtatgcggagattttaacgacacgcctgtatccttcgcctataaccatattgcaggaaataacttaacagacggttttcgggatcgagggaaaggatacgggcattcattcaacggaattaaagggttgttacgaatagactttatcagttacgacaaatccttcacgggattagtatacgactccccccgtcttccgtggagtgaccataatccgattataatgaaaataaaattaaaaacaacatcaagataagacttctatggcagctctcagatattttttctcactcttaatggtcccgataagcctcattgcggcaggatttagcctcatcgcatacatggctgggcagacaaacccaaacgaatctatattcatcacgttcatcgggttggccatgcctgttatcctgaccataaatttacttattctcatttactggattatcaaaaaaaaatggtggataatcattcctatcgccgcaattttactaaatagcggttatcttgcgtctatctttcaagtaacaatatcatcttccaaattaccggatggaaaaattcccatacgtatagccagctataatgcgggaaaattcaaatcatgggaacattttgaaactcaatattatatttcggaatttctaaaaaatgacaaagctaacattatctgcttccaagaataccgggaaaacactaaaatcaacgcagacactctttcccgtttattgaactgcccccatcacgcaatagcttacttgcccggttccaccaccttgggaacaggaatctttagtaaataccccattctacaattcgggaaaataccccttgcttctcaaacaaacgatgccatgtgggttgatattcaaaccggggaaacaaggattagaataatcagttgtcacctacaaacaacaaatttcagcaagaaacggagattactagatgatcctgttctacagaatgctgacatacaacaagtagaagatgtcgtaacggatatatcacaagaattagctcaaaatttcaagatcagagccacgcaggctcaaatcgtaagacaagttattgatacaacacgaattcccacgatcgtttgtggagattttaatgatactccttcatcctacacttaccaatatatcaagggtgatttaaaagacagtttcaaaacacgaggcaacgggtatgcctataccttccggggaatacaccacctgttacgcatcgactttattctttattccaaagagtttaaatgtatagactattattcgcctgaaaaagaatggagtgatcacaacccgattattagcgaattctatctaaaataacaatcatgacacaatttcttcaatacttattctggatttccatcattatcgtattctatacatacatcgggtacggaatcctattatacatcctcgtcaagatcaaagaaaaattccacccgaaacagccgttaacgctcccggttcctcttcccgatgttacgcttcttatagcagcttacaacgaagaaaagatcgtcaaagcaaaaatggataactgtgagactctcgattacccgaaaaacaagttacacgtgatctgggtcaccgacggttccaccgattcaacaaatatgttattggccacatacccgaaggtaacggtcctcttttcccccgaacgcagaggaaagacggccgccctaaaccgggcgatgccatttattaaaacctcatatacgattttcacggatgccaacacgatgctcaacgtggagtcgataaaaaaaattatgacttgtttcaccgatcctaaaacgggatgcgtggccggagaaaagcgtattgaaaacaaagataaagacaacgcagcttcaggaggggaaggtttttactggcgctacgaatcaaaattaaaagcgtgggattccaagttatactcggcagtaggagctgccggagaattattcgccatccgcacgaaattattcaaccccatgcccgaagacactttattagatgatttcattctctcgctacgaattgccatgcaaggatacaaaattgcctattgcgacaaggcctatgccattgaatccggctccgcagatatgcacgaagaacaaaaacgcaaagtacgcatcgcggcagggggattacaatctatcgcacggttaaaagggctactcaacctattcaaatacggcactctcacttttcaatatatatcacaccgggtactacgctggtcggttactcccgtcctattattcctgctatttcctttaaatttaattctcgtcatgatacagggagcatccctctataaaatcatattcatcttacaagttatcttttacgttcttgcttggctcggagctattatggccaaaaaacagataaaaataaagattctgtttatcccttactacttcacatttatgaatttaaacgtgttgaaagcatttttctacctgaaaagacacaaaggtaaaggaacttgggaaaaagcgaaaagaggataacaattacaactgagacttaaaataatctatcgttttcaacaacccatcccgcaaagggatcatcggttgccagcttaacttagttttggctaacgttatatccggtctacgctttctaggatcatcttccggtagtgttccaaacacgattcgagactttgaccctgtcaactccagtaccaaattcgccagttccaacatcgtgaattcccctggattcccaagattcacaggaccggaaaactcatcctccgtagccatcattctaatcataccatcgattaaatcatccacgtattgaaaacttcgtgtctgggttccatcaccataaatctcaatatcttttccctgtaaagcattcacgataaaattcgacaccacacgcccatcattttgagccatacgaggtccgtaagtattaaatatacgaataattttcaccacgaccccggcctgacggtgataatccatgcacaatgtctccgcacatctctttccttcatcataacaagaacgcaccccgataggattcacgtttccccagtattcttcagtttgcggatgtttcacgggatcaccataaacctcactcgtagacccctgtaacaactttgccttaacccctttcgccaattccaacatatttaccgcaccaaaaacagaggtatttatagtttttatcgggtcatattgatagtgtaccggagatgccggacaagccagattataaatctcatccactcccttcatataaggccagataatatcccgttcctccaattcaaaattaggattacctaccaaatgctgaatattttccttcgaaccggtaaaaaaattgtctaaacaaatcacataattacctgattctatcaatcgatcacataaatgtgaccctaaaaaaccagctccgccagtcactaatacacacttcataattcacctctattatttatacaaacatataaaaaaatattcggaaatcacactaattagtatgatttccgaatatttatatttacaaagacaattagaatgaatatcagtacatctgattcaattgttctttaatcttatcactcgtgatataatcatcgaaatccattcgcttgtctatcattccgttaggtgtcaattctataatccggttacaaacggtttggataatctcatggtcatgagaattcattaaaacgattcctttaaacgccaccaatgtattattaaaagcctgaatggattccaaatccaagtgattcgccggagaatccaataacaagacattcgcatttgtcaacatcatcttggctatcatacaacgcatcttctcacccccggataaaactttcacccgcttgtagatgtcctccccggaaaataacattttcccgaggaatcctcttaaaaacgtttcacttgtatctgccgagtactgtcctaaccactctaccaaagtcatgtccgtctggaaataagctgaattatccaatggaagataggcattcgtgatcgttactccccacgtaaaactaccagtatccggtttttcattccctgtaagaatctctagcaaggcagtcatcgctctcggatcacgtgacaaaaaagcaattttatcccctttctctacggtaaactccacatcacggaataaggtctgtccttcgatagatttactcaaattacgaacatccaaaatccggtcacccacttcccgttccggggtaaagataatcccggggtatttccgggtagaaggtaaaatctcctctacattcaatttctctaacattttcttacggctcgtggtttgctttgactttgccacgttagcactaaagcgagaaataaactcttgtaactccttcttcttctcctcagcttttttattcttagcctgggcctgacgcaaagctagctggcttgactcataccaaaaactataattaccggcaaataactgaatcttaccaaaatcaatatctaccgagtgtgtacacacagaatccagaaaatgtcggtcatgcgataccactaaaacagtgttctcgtaattagccagataattttccaaccacataaccgtctccaagtccaaatcattcgtgggttcgtccaataacaagttatccggtttcccgaataaggcctgagccaacaaaacccgtactttctgctttccacttatatctttcatcaaggaataatgcaaatcttccttgatacctaatccactcaacaagttcgccgcatcactctccgcattccatccgtccatcccggcaaactgctcttccagttcggcagcccgaatcccatcctcatccgagaaatcctccttcatgtatatcgcattcttctcctgcatcaccttccacaaagaggagtgtccctgtaacacggtatccaaaaccgtacactcgtcataagcaaagtggtcctgtttcaataccgacaaccgttctcccggtccgaacatcacggttcctcgcgttggctccaaatcgccactcaatattctcaagaacgtagatttcccggcaccattggcacctattactccataacaattccccggtgtaaacttcaaattcacatcccggaacaaagttctcttcccaaactgaatctctaaatccgaaactgtaatcattatttatctttttctaaaaacgcccgcaaagatacacgttaaaaagttgccatgcaactttttaatgcttctctccaatcccggatctccaaatcgaaagtttccttaatttttgtcttatccaaaattgaataagcaggtctttttactttagagggatattcctctgttgtcaccggatttactttacaatttgcccctgtaaacgccactatttctttggcaaaatcataccacgtacaagctccttcgttcgtaaagtgatacactccctccaattctgggagatcatcccgttccataatgctaataatagcctcggccagatctccggcataagtcggcgttccccactgatcgtttaccacgttcaactcgtcccgttctgaagctaaacgggatattgttttaacaaaattatgtccatacccggaatacagccaagccgtacggataataatatacagacatcccgattttttgattgcctgttctccttccaattttgttctcccgtacacgctctgcggatttgtagcatctttttccgtgtaaggatgatccgatgtcccgtcaaacacgtaatctgtcgagatatgaaccagcagacaatccaatttcacggcagcattggccaagttagccacggcatcacgattcaatttcatcgctttttccttatcgtcttccgcttggtctacagccgtgtatgcggcacaattaatgatcgtgtcaatatcatgtgtctcaataaaggcacatatcgccttaaaattcgttatatccaattcttcaacatccgtgtaaaacacgtcatccagcaaagaaaagctacgatttctcagctccgtacctaattgtccattcgcacccgtgatcaatatattcgccatatataattttagatttatgattttaaatttatgatttctctcctcaaaccccacacactttagactccttatgaactcacggactctttatcatatttttcgaattcagaatttcgactgacaaactcaggtacaatatccttcatcatcttcaccatatccgggatatttaccctagcagccaattcattcaatttattcaattcatttacgacatcaaaataattatattcccggactttcgctacccgaattttgttatgagcggtcggcaaggtgttctccttgttacttaacaactcttcgtatagcttctctcccggtcttaaccccgtgtagataatggaaatctccttatccggatcaaatcccgataattcaattatccgtcttgccatatcggcaatcttcacgggacgtcccatctcgaaaatataaatctcacctcccattcccatcgttccggcttccatcaccaaacgacaagcttccgggatcgtcatgaaataacgaataatatccggatgagtcaccgtaacaggtcccccattgcgaatctgttcacggaatctcggaattaccgaaccgttagatcctaacacgttcccaaaacgggtcgtgataaaacgggtggttcctacttgcaaaccatcccgaatggccacacttaaactttgtacgtatatctcggccaagcgcttggaggctcccatgatattcgtcgggtttaccgccttatccgtggaaaccataacaaaacgctccaccccatatttcacggcatgatccgcaacattcatcgtaccaaacacattcacccgcacggcttcacagggattcgattccatcaagggcacgtgcttgtaagctgccgcatggaataccacttgaggatgataattacggaacacaaaatccattcgatcaagagatctcacgtccccaatcacaggcacaaaaggagtcttcggaaacttatccgtaaactccaactggatattatgcattggagtttcagccgaatccagaaatatcaattgcttgatattgaaacgtgtcaattgacgacataactcactcccgatagaaccggcagcacctgttaccatgacaactttcccttccaatccttccgcaatctccttcatgctaatctttatctcgtcacgcccaagcaattcttccaaacggatttccttcatttgcgggcgcggcaactgcccatcactcatctcctccacggaaggcaataccaacatttccaactccaatttctgacaataacgcaccaatcgtttttgttcttcctgagcggtccgataattcgggaacacgattccatcaacccgtaaacgctttaccaaccggttaaatccttcttctcccgtgataaaatataccgattcaccggataaccggtaatgcttatatctttttccaatagtcaaataccccgttaccttgtaagatggcagaaaactgttagaaactgccgtattgagggaggcagaacaatcatccatcccgaagatcaacacccgcttttgttctccatgtaaacggactttcaaaaagtcatacaagctcactaacaccactcgcacggaaaccaacactacggtagttgtcatcatgtccaacaaagcccctaaaatcaatctctcattagatacctgcgggtagaatacatgaatcaaagggtaaagaataatcactttcaaagccatcgctatccccaaacgccaagtttcccgtaatgtggtgaaacgcatcacgacacgatgagcatgtaatatggcaaacgccaaagcactaatgaccgccgccaataatgccaaatatgcaacccacgaccaaacaacaagttcttccctgacaaaccggataagccagtaagcaaaaaccgttaccaaagttgaaagcacaacgtcaattcccatcacgatccagcgactcaggtatctcgtgtgtacaatcttggtagctaatccatttggtcccaataaataatttttcatttaattcctttttacaacaatatcgcatcccgcaacctcggatgctttttatccttctccgacaatataatatcctttaacggtaatttccaatctattcctaaatccggatcgtcgtaacaaatcgccccttcataatccggagcgtaatactcgtcacacttatactgaaatatcgcttcctcactcaaaaccgcaaatccatgcgcaaatcccttcgataagaacaactgcaatttattctcttcactcagctccacggcaacatacttcccaaaagtcggtgaacctctacgaatatccacggcaacatccaaaactcgacctttcaccactctcaccagtttcgcctgcgtatatggaggtaattgataatgcaaaccccgtaaaacaccatatttagatttagattcattatcctgcacaaacaccgttttacttaccttctcttcaaaatgttttaaagaaaaactttcgaagaaatatccccgatcatcaccgaacacccgcggttcaagtataaaaacgccttctatttcagtctcaataaccttcattataattgaaaattgaaaattgaaaattgaaaatgtacctaatggtacaatttcatacctcaatttacagattatacattgattcgtaatacttcatatattccccactcgtcacgttatccaaccaatcctgattctccaaataccattttaccgttttttcaatcccctcctcgaactgcagggaaggctcccaacccaactcttcatgcaatttagtggaatcaatagcgtaacgcaaatcgtgaccggcccggtctgttacatacgtgatcagtttctctgaggttccttccggacggcctaataaacgatcagtaaccttgatcatgaccttaatcagatcaatattcttccattcgttaaacccgcctatattgtaagtgtcccccactttacctttatggaatatcaaatcaattgcccgtgcatgatcctccacgaacaaccaatccctcacattctctcccgttccatacaccggaagtggtttattatgacgaatattgtttataaacaacgggattaatttctccgggaactggtaagttccgtaattattagaacaattagaaattttcacgggtaaaccgtaagtatcatgataagctctcacgaaatgatcggaagaggctttcgacgccgaatagggagaatgaggatcatattttgtggtctccaaaaagaaacctccatctggttgcaaagaaccatacacttcatccgttgaaacatgataaaacaattttccgtcaaaattaccctcccaagccaatttagcagcttgcaacaaacttaacgttcccattacgtttgtctgggcaaaagaaaacggatctttaatagatcgatccacgtgactttctgctgccaaatggattaccccatcaatttcatattcagcaaaaatctcacacattttctcgaagtcacaaatatccgctttcacgaacttgtaattcgacatattctcaatatccttcaaattcgctaggttacccgcataagtcaacttatctaaattgacaatacgatattccggatacttgtttaccattagccgaaccagatgcgaaccgataaacccggctccgccagtgattaataaatttttcattcttcaaaatttagtttcaagtttgcaggttacaagttgctggttgtggaatccaaataagtaattaatttactgatacctttagataaaaccatacaatcggacaataacccgtttacttttatttcgtctatatatttcaaatccttagccaaatacagcatactccgaacttcaccacaacttcccctcgatatttgcaaaaacttcttaaacatcacattaccaccagcctcatacccctccgcaatattattcatcaccgaaaccaccgcccttctaacctgatcattaaacccataatccttcactcctgcagtgtacaagtaaacctgatttaccaacaaacgggcatcctgccaaatcttaaaatcctcaaaacacctaaccgtccccataaacgatttataacctgtaaataacctgtaacctgccaacctgcaacttattgaaattactgcagtaatttcaataaatactgtccatactggtttttaatcatcggttgcgctactgccctcaaccgatccgcatcaatccatcccttcatataggcaatctcctcaagacaagcgatctttaatccttgacgtttttcgataacttccacaaaattagaggcctcagccaatgaatcatgagtccccgtatccaaccaagcaaatccacgtcccaacaactgaacttttaagtcacccgcttctaaaaaggtctgattcacagaagtaatttccaactccccgcgagcagacggttttatctctttagcaacacgcaccacttcgttcggataaaaatacaacccgaccacggcataattcgatttcggactcttcggtttttcttcaatactcagcacattcccgtcttgatcgaattcggccaccccgtaacgctccggatcatttacccaataaccgaaaacagttgctttatcctctccttctgcggctctcacggcatctaacaacattcctgtaaaatgttgtccataaaaaatattatcccccaacaccaagcaaaccgaatcatttccgataaactcttccccgataataaatgcctgtgctaacccatccgggctaggttgttctgcatacgtgaaatgaaccccgtaatcggagccatcaccgagtaaacgctcgaaacccggcaaatcttgcggggttgaaataattaaaatatccttgattcccgccagcatcaatactgaaatgggataatataccatcggcttatcatatatcggcaataactgctttgatacgcctttcgtaattggatataacctggtcccggatccaccggctaatacaattcctttcatatcattaaattctgacgcgaagttatcattttatttataggctccagtatttcatcaagtgaattttccccctgtaaattccttttatatctcctaatacagcgtgttcgtatgtcaatccccggaaatacccctcatccagatccatgtactccttatgcgctactgccacgataactgcatcataatttgcccgtggtttctcaatcaacttaaaaccgtattcgtgcatcacttcttcggaatccgcattcgggtccgtgacatccacatccacgccaaaatctttcaattcgttcactatatccacgactttcgaattccgaatatccgatacatcctctttaaacgtaacccccataaccaacactcgagcacccagaatattctttcccatcccgatcatcttcttcacaatcttcttggctatatatcctcccatcgagtcatttacaaaccgcccggcattaatcatttgcggatgatacttcaactcttttgccttatgtaccaagtaatatggatctaccccgatgcaatgtcctcccactaaaccgggataaaacttcaaaaaattccatttcgtccccgcagcctccagtacgtcatacgtgttgataccaatacggctgaaaataatggataactcgttcatcagagctatattcacatcccgttgtgtattttcaataatcttcccagcctcggccaccttaatattcggagcccgatgtactcccggtttcactactaactcgtaaaccttagccaccgtttccaaggtctctgcatcacatcctgaaacaatctttaccgtgttagccaacgtatgaaccttgtcgcccggattaatacgttccggagaatacccgatcttaaaatcaattccaactttcagtccggatacttcttccaacaccggaacacaatcttcttccgtacaacccggatagaccgtagattcataaactacgtaatctcccctctttaaggccattcccaccgtacgggatgccgccaacaggggggtcaaatccggttgattaaacttatctatcggggtcggaaccgccacgataaaaaacgacgcttcccgtaactcatccacggaagaagtaaaataaatatcgctattctcaaatgctttcggctccaactcattacacggatcaattttctctcgcatctttgccaaccgttcctcattaatatcaaaaccgatcacggaaatcttcttggcaaactccaacgctatcggtaacccgacataccccaacccgactaatgctaactttgcctttttatttagtaacttattatacatacacaacaatttaaaatgtagagtttagaatttaaaatgaaaccaaaagcaacggtttgtgcggctagagtctaaaatcattaaatctaaaattaatccagcctatcttccggccccaacggacggtacggtccatctttcacttcaaaaatcacggttcctttctccacgacttccaacgtgtgccattgcccggcaggtatatgaataccatattcacctttcaacggattcaaggtcacggactcggtcacccgcttgtcatcatcataaaaaaacacgttaatttcaccgcgcagcacgatataagtctctgcagtaaaacaatgtctatgcacaggtaattcagtccccggctccagagcattcaacaagcgttgagcatttgcctccaacgtatcgtgaaaattataattcatcctcaaacgcggactctctgcagcttgccgagaaacctcatctaacaacccattatcaataatcttcattttccctttatttttagtttttatcttctaattcttatcttttagtttttaacttttatcttttagtttttatcaccttccccaaccgaaaggatgttttaccaatggtaattttgccaagggatgataatccccttttaaaccaattggggttgcgtgtcgaatatcatgaacaatcccgatacaattacgggcttcttctatacggaacccttctcctgccaaaattttccgataactctcggtatgtagttccgtgaatccttgactaaattcaaattcctccccctcaatacggatagaacgataagttcttttctccccttgcacggcattttccggcaaattgtcagcatttatactcaaaaaataacgtacacgagccttttccaatcccaagaaaccggcgactcggtcgtgagtcatcacatgcacgatattctcctttaccggaccaaaaatccatgacaacatatcataaaaatggaccccgatattcgtggcgacacccccactcttccgctcgtcccctttccaactcgtgtaataccaatttccacgagaagtaatataagtcaaatccacgtcatacaccttgtctttcggtccttcctcgatcttctttttcagagcttttattgactcatgtaaacgcagttgcaggatcgtgtaccctttatgtccagtctctttctccacgtcctccaatgcatctatattccaaggattcaataccaatggtttctcgcaaatcacatcagcccccaaacgcaaaccataacggatatgagcatcgtgcaaataattcggcgtacagattgataccatgtccacccgttcgtctgtcttcttcaattttgaacaatgacgatcgaacaactccatctccgtgaaaaaagaacaattcgggaaataactatccatgatgcccacgctgtcaaacttatcataagcagctaccaactgattccccgtgtcttttatagctcgcaaatgccttggagctatatatcctgccacgccaataattgcaaaattcttcatatccattttattaattctttactcacgtctacctttgggtcaaattaaaaatttgaacttcaaaaatataacattaatactttacatcaaacgaaagaaggacgaaattcgaagttatttttccttcgtacatttcaatgcctcgtacaaaacttctatcggatgcaatgcctgtttccccgtaccatcctttatttgttgtcggcaactcgttcccggagctgaaatacaaacattctccccagcacccctcacggctggaaacaacacttgttccccgattttcatggacaactcgtaatgttttttctcgtacccgaaagctcccgccatcccacaacatccggaaggaataacctccacgctataattcactggcaaagataacatttctcgagaaggctcgacggaagccaatgacttttggtgacaatgcccatgcaacataatcttcaacggttgatcagtaaattgttctgcctgtattcttccggcacgaatctctcgggtaaaaaactcgtcatacaacaagcaattttttcctaacctcacggcctcttccttcaaatcctctcctaccaaatccggatattcatcccggaacgataatatacacgaaggctcaatacctactaatggaatattttctgtaaccaagtctttcaacaatagtacattctttcgggccactcctttcgccaccttcaacatacctttcgaaatcgctgtccgtccactttctacgtgtttcggaataataacctcataccctaaccaatccagcaattcgatcatctttatcccaatctccacgtccatgtaattggtaaactcatcggcaaaaagaaacacttttcccacggtctctcccctattcttttgccgataacgaccaagccaatgtttcaacgtggtcttataaagaataggtatcgtccgtttcggagcaaaatgcaatattcgtttcaacatattcccagtcatccggtttcgaacgatggcattataaaaccacggtaagatcgtacccaaacgctgaatttctgtcaaacgggcaatcaaaaaagccttcatcggtaccccgcacacatcataatgctgttgcaagaactctgccttaaaacgagcaatatccacgttagaaggacattctgatttacacgctttacatgaaacacaggtatctaacacttctaaaatctcccgctgatcatatatctttttcgttctcggacgagtcatcaactcccgtaacgtattcgccctagcgcgtgtcgtatgactctcttcccttgtggcacgaaaactcggacacatcgtacctccaaaagcatacgatttccgacaatctcccgaaccgttacattgctcaatagcgcacaaccagcctttttccttcgaaaaatcaaaataagtgcgacacatcacattcgaatccccggcctcataccgaagcgaagtatccataggcggcgtgttcacaatcttcctcgcattaaaaacgccctccgggtcccaacaagctttagtctcctgcatcaagccatacaccttctccccgaacaacaatggaataaactcccctcgtaaacgtccgtcaccatgttctccacttaaagacccgcgatgcttcttcactaacctagctgtctcttccgccactcgccggaataacacccgatcattctcatctttcaaattcaacacgggacgtaaatgcaactcacccgtactgatatgcgcatgatacacacacttcaaccccagtcgttccagcatctccccgaaatctttcatgtaagcaggtaaccgttccggagccacggctgtatcctcaatcacggacacgggtttcgcattccccggcattccggacaacaaccctagtcccgccttccgtaaactccacacccggctaatatcactcccgtacactcgcgggaaatgatacccataaccatgcatcttcatatccgtttcgatctggtctgccacctgatccactttttccctgctttcctgtgccaactcgacaatcagtatggcagcaggatcaccttgaacgaaaaaacggttcttattttgtgctatatttcctttacttagttctaatatattctggtccattaactcgatagccaccgggtgatgtttcaatgcgaccagatttccctcaaacgcttcttctaatgtcctacaatgtacacaaattaccgccttttctttaggtggtaacgggacaagattcaatttcaactcggtcacaaatgccagagttccttccgatccggctaataacttacacaaattaaactttccctcataagcaacatcaaagtaatccgagtacaacaactgatcaatagcatacccagaatttcttctccgcaaagctgggtccggaaaatgttgaataatctcctctctattattttccaacatctccacagaacacttgtatatctttccctctaacgtgtcttccgtcattttatccctcacctcatctttctccattcccttcaaccaagcctcctccccgtcactcaaaataacttttgcctccagaagatgatcccgggtactcccgtacaccaaagaatgagaaccgcacgaattatttcccaccattcctcccagacaacaacgattagaagtagaagtctccggaccgaagaacaaccccaacgactttacacgcatattcaattcatccaacaccacccccggctcaactcgaacccaatgttctttttcatttatctctaacacgtgattcatataccgggacacatcaacgatcacccctttccctaccacctgccccgctaaagaagttcccgcagcacggggaatcaatgtaatcccatttttcctggcaaacttgatacattccttcacgtccgaagcatcccgaggatatacaacagctaatggcatctcccgataagccgatgcatctgtcgcataaatcatttgatgaagagagtccgtcatcacgtctcccttcatatttcgtgttaactgttcaaaatcaatcattttcaaagactatcaaatattttatcacacactccggtccccacgtagcgcaaaggtaaaaaacttctcataaaaagaggtatgccaatacattttgacacacctcctgtaatatgaaaaccggattcccggttacaagcttattcttttataaaccgtttcaatttatcatttccaaaaatattagccacaaaaggtaatgccagaaccgtacccactccagcaaagcctcccaagaacgtaaacaacacgcaaatcaatccccttttaggtttagaacgttcaatcggaactacaaccggttccacgatcgtcaaaatcggtgtagtttcattcacagcaatcttagcctgttccatctgttttgccaactcggaatacacgctataagcaagattatactcgttcgttaaagcctcctcttgagtcttggccacggcagaagaaaaactcttgttcgcatctctgaaacgagccaaactatcctgcatcttctcgtaacgtttttttgcagcatcatattgttgctccacgaatgtcaaatttgacttcaccttctcgattttgaaatccgtaatataagtctgtaacaactcttgagcccgttctgccaactgagctacagccaaaggttctcccaaggacgcagacaactgtacataaccgtctttatcattcacgttcaaagaaatcatatcattcaacatctctgacattttcttctcatcttttgaaagagactgtatcgcactcccttgacccgcagaaatcatagtcgtatcttctccccggattgcatttatgatcactcccggtaaaccaatcgtgtattttacaattgttcctcctaaactaaatttttggtattcatcctttgtataataatccaacaacgtgatcggttgatcatactcttcaaactttaacggggttgccatcaaatccttcttaaaaggaatacttgacacaattttaggataaattgtcggagataaaacttcaccaccagaagccccacctaaattaatcccgaccatagaggccagtccactcaaatttccaccgactttcttatccccggattgagggaccatcgtacatccggcagtatattctttcggactaaacagggcaactaatacccctagtaccataaacacgactgtaatcttcagtatcagtttccggtttttccatagcttttggaccacctcaaccaaatcaatttcttcctcctgtggcatctgatttgcctgctttacttcctgttccatactatttcgtgttgttaagaattgcagtaaccattgccgctatcgaggtcgttgatgatgccagactcaaaatttccggcaaccccatccgattcttgttcacggatttcaacggaacaataatctcgcttcccggctctatctttgtacgatttcccttacaaacagctagtgttccgttcgggtacaacacgtaagcctttcgttttttcgcatcaacactgtatcctcccgcattttctatataatccttatacttcattttcttgaaatatgtcacagcattaggatacatcacagcccccctaatcttaacagtattcacataattagaaacttgtaacacatctccttcccgaaggatcaaatcagattcccctcctggattctctaacgcatctttcaggtcaataccgacataatatacctgttcaaacgacatactatcaataacaactgaatcacgtcttgaatatttagccaactgcattgcagacttcactctttccaactcatctgcattcatacgacgcaacaagcgggcacctttcacgtaagctttagaagtcacaccaccagcccgctttaccagatccgaaagacgatcatttgatgaacgtttggcatacactcccgggtaaagtacctcccccctcaccacaacattctgttgttcgctgtatcccggagaacgacgcacctttatctcatcaaaaggctcaaggataaatccaggatctccctctaccaccaagccatccttcaaagcaaatgtgaacaattcagcctctaccggcgcttcctccgtactattaggagccttaattctccgagaaacatccacccgaaccatcgaagccgattccaacaaccctccagcctgaagaacggcatcttccaacgtcatgttatccacaaaaggatatttccgaggattctttacctctcctagaatatcaatcacgtaatctccccgcaattcagttgcagaaggcacatacaagcggtcattctttttcaatgggatatcgtcaatctcacctcttaacaattttcccaaatcaaccgcaagcatttcttgacttaaatcctctttctctcgatataaaatcgttctatttaaaaaggcatcttcccgaggcccttccactacatttatcaaatccttcaccgtcttgatggaattatttatcgcataatttcccggccgatataccgccccagtcacggatacccgattttcgtaccgacttatgatcggatcaatcataacagaatcaccatcagccaacgtaaagtcaacaaaatcctcgttatttactgtatatatttgaaactcggagtctcccttacggctcacatttacattctttttgtaagcatcactagtaaatcccccagcatactccaataatttactcagactctcctctcccttcatctcgtaacgcatcggacgtttcactttaccagccacggtgacaattttctcgtaagtacccacgttaatcaaatcaccatcctgtaaagtaatatcaaaactattattaccattcatgatataatcataaacatccacgtgcttaaaggcttttccattccgatacaacacgacatcacgcaaagttcccacgttattcacacctcctgccgcatacaatgcgtgaaacaccgttgccaaagaaggtaacatataggtcccgggcatgacaatctcccccatcacgttcacctgaatacttcgaatttgtcccaatgacactttcaaaaatgttgatggattttccgacgctaaatctgaatatatacgactaaacatcgttttcaaataagaagatgcctcttgaatccgttttccattcaaataaatcggtccgatattcgatacgtttatacttccttctggagaaatcacctgccgaacagtcgcttccgaatttccccatatatcaatgataacctcgtctcctggtcctaacacataattctccggtgtaggaatattcaaacttggttcaaaagttaaatttttattactaaacaaatttcgcccgaaaatactatttttattcccttctgtaaccaacactacatctcgattctctaacgagatagtctcaatacgctctctattttcttgagtcaaacctccctgctttccagaattctctctctcgtaattctccttgattctcaatacctgttctttcgtgacgcctttttgcgataacatcaaaataatctcgtcttgacttttcccttgagcctgtgcggacttcacggcttcaataacttgtgcatcggtcatctgcgcacaagcaattcccgtgacgccaagcataagtacaacaaaaattaaaaatctcatattactttttttgaatgttttttatgcaaccatcccctaggttcatctttcttgattcgcaaatcaaacctgataaaccgacatgccggatcggccacaaagatacagcattaattgaaaatcaaaaatcgaaaatcaaattttattatagttttcaacctataatgcttcttcaaatctcatatttgctctcgtaacgcataaaatttacgtctcaaaggtaaataaacaaccaccagcaccactatagaaataataaaataaatcaatgtataccctggagtatacaccaacaccaacaaataccccaaattaacaacagcctgtacacccatgtagatcaaagaaacaggcaaatgagcaaactttccctcgttggctaacaactggtataaatgcttccggtgaggttgaccaatgttctctttcaacaagatacgatgtataatagtcagcacaccatccactccataaaccgccaaaaacactaatgctgacacgtgaccggtatgtattataaagccacccaacaaaaagagtataataaaagccattgatattgctcccacatccccggaaaaacatttggcatgagaacgaaaattataaaaattaaacactagcaatgacagtattaccacaggaataaaccccgccggcgctatcgggaaaacaaatgcattgatcccccataacgccaacatggcaaccagactatatcctccggtaataccgtttataccatccatgaaattatatatattgagtatggccaacccgacgaacaaagccacaaccacgtatccccacgaaacctcatgaacccctagctgtaacagcaacaataacaaagaaaaggtctggaacaaaagacgaacctttgcagaaagcgggtgcatatcatcaataaaactcaccaaagccaccaacgtcactccgcataaaaaccaaggtgcaaaaaaatcaaagatcaatccatgcacaagtacccctaaataaaaaatcaccccacctcctcgtagggtaattgtatgatgagaactccttacattaggaacatccaaaatattatatctcttggcaatcttaaaataaatgttctccagcacgaaaagaagcaggagaacaaatccatagatccaatttatcatttctgtcgcttaaacgattcaaccatctctcgaattccatcctccaaagtgtaacgaggctcgtaaccgatagcgcttaatgctaactgacgatcaataaccacatctccccagagtttctgataaagatcaggacgaaccttctctatcagtttcaagaatatagatggagaaggtagatttatcgtgtgtactcccaattgacgagaaatttcctcgaccacgttacgcgtagaataaggaactttatccgtcggatagaatactccctcaacctctttctctacggctaaatgaataaactcaaccaaattttttacattaataaaatcacgactattccgggcagaaccgaaaggcagcggaatatgtttatttaccaaacgaatcaaacgcaacatattacccggagccatcccccccccgtatgccatcggcggacgaataattgcggccttaaattcccggtcgttcattgcaactaactctttatctgctttaagcttagaactcccgtaataagtctgtggtctttccggtgttgtctcagaaattcgactggcactaccgaacacggcaatcgtactcatctgcacgaactgacgtacccctgcctgttttgctttctgagctaataaacaagccatccgataattcacatcatcataaagctcttggtctttcaattccggacgatgtacgatagctgcaaaatttattaccgcatcaaaccctgaaaatgcttcaacaggcatatctcgaaatgctttcacaacaatctctttctcgtacccagtcggcctgcgactgtaacacgtgatagaatccgttgatacatatttctttataaattgcccggcaataaaactatctcctccaataatcaatattcttttcattccttgatccatttaaaacggcataaacctccaacttgctcacatacatgagcatcattatctatctcatattagcgtgtttataaacaggattcgctctctcctcttatcttgctccccttttacgtcgtatagacctcagatgttttattcgttctcatataattaaataatagtgttgtgtgtgttatttttaatcaagatgcaaaaatacatcaatggttgcgtcataaaatggtatttttttgtttttaacaaactattaacaaatctaacacacaaattaccatctcctcctcatgaatatgtagccaattaaagatatctattcttctgcatacaaaatcttcgtatatttgcccattcaaaataaaatatatgcaagcaattattctagcagcaggaatgggaaaaagacttggcgaactaacccaaaataacacgaaatgcatggttaaagttaacggtgttactttaatcgatcgcttaatgactcaactctccgaattgagtttaaagaaaatcatcatcgtcattgggtatcaaggggaaaaactacgttcttatttaggtgagaattatttaaacacaaaaatagaatacatctacaatcctatatacgataagaccaacaatatatattcacttgcattagccaaagaatcattacaagaagatgattctcttttaattgaatctgatttaatatttgatgattcattgttcagaaaaataattgataatccatatcctgatattacattggtagacaaatatgaatcttggatggatggtacaatggtcacgctggatgaagaaaataatattgaaaattttgtctccaaaaaagcatttaaatattcagatgtacataattattacaaaactgtcaatatctacaaattcagcaaagagttctcaaaacacaaatatgttccctttctagacgcctattgcaaagctttaggacacaatgaatattacgaacaagtcctaaaagtcatctctcgtctagacgacactcatttaaaagcattaccattaaacggggaaaaatggtatgaaattgacgatatccaagatttagacattgcagaaacaattttcgcatgcgatgaagatcaactaataaaatatcagtctagatacggtggatattggagatttccatcattactggacttttgttatttagtgaatccatatttcccgcccaaaaagatgatagaagaattaaaggccaattttgacatattattgaccgaatatccttctgggatgaaaataaactccttactagccggaaaatactttggtataaaaagtgattacacatgcatcgggaatggagccgctgaactaataaaaagtctaatggagaaattagatggaaaaatcggagttatattccccacgtttgaagaatatcccaaccggaaaaagcaagaagaacttgttacctatattccagaaaatcataatttttcctatacggcaaaagacattatgaattattttgctgaaaaagatattcaaacactactattaataaatccggacaacccttccggcaattttattccagcagaagaagtgttagaactcgttgaatggacaaagaaaaagaatattcgattcatcgtagacgaatcttttgttgatttttccgaaggttatcccaagaattcattattgcataataaaacattaaacgaccatagccatttagttgtcataaaaagcatttcaaaatcatttggggttcccggactcagattaggcatactggcatctagtgataaagaattaattacatggatgaaaaaagatatttccatttggaatatcaactcatttgcagaattctatatgcaaattttcggcaaatacgaacaagactattcaaacgcttgttcaaaatttatcaccgaaaggaaacgttttctatctgaattacaacaaatagatttcttacgagtcatcccatcgcaagctaattactttttatgcgaaattgtaaaaaaatatacatcaaaagaattaaccagattactattaaaacactacaatatattaatcaaggattgtagtaccaaatcagcctttaattcttccaattatatacgtattgcaattcgggacacgaatgataacaacacattaataaatgccttaaaaaatttcaagtagtgtaaatatatataacattatataatttcattcacgcaattgtgagttgagaacaaataatgtacttttgcactaagaaaaaatagagagtatccaattttacactctcataataaaaataattacaagtttacgcaactattttatgaatagaacatccttagtaagttaggtaaccttttaaaaatgttttatgcaagaatttgatgtaacggatttgatccgattattatggaaaagaaaatcttttattctaaaaactacgcttatatgtttatgtcttggcgtattggtagtgttattgagtcataaacaatatacttccgtttccacttttattccccaaaaaccacgaacaaactcagatcaaagagcattagatgcttatttacaaaaagaaaatccaaatatctacgaaacaaatgaaatcctgaacgccaacttgtacccacaagtagtagagaatatttcttttcgaaaaaaaattatatacatgccagtttgtgagggtcacaacggagaaaaaatcagtttagtcgaatatctaagttccaataagtatcgtccttttcatctaggacaatggatcaggaaatatacgatagatttgcctgcaacgatccgaatggcaaacggggaagatactgtaaacgaaaatacggggaaggatacttctttaattacattatcacggagagaaaaacaggccattgatatgttgcaaaaaggagttactttatggatcggagaggataacgctttattaaacgtaactacagaagacccattgattacggctcgtctagctcagaatatactatcgttgctaaaagaagaagtaacaaattaccgttctacaaaaattgaagaacaatgggcatttttaaaacagcagcaggaaattgccatacaagaactagaatccaaacgaaaggaaatgacaaacttacaaactacacaacattcctttcctactcagaatatagatataacaaaaagttttcttttagctgaatatcaacagattttcaataattaccaaaatctaaatcaaagactagaaagattaaaattaaaaaaacaagatacgactccggtatttactatgttagaagaaatttacgtaccttatcaagcatcaaatactaaacaaggtattattataaccgctttcgttgcactaggactattcctcggaatggtattagtgattacattgccttatatagcagaaataactcgaagtaaatttctaatacatcattttccagtcaaagaagatcaagaaaaagatgttaaataagcgactgataagcaatccgttgatcgagaattttctctcgttgactattttgcaagggataaattatctcttgccgttgattacaataccttatctttacaaccatctaggagtagaacgttacgggttggtaaattttgcaatctcgtttatacaatatttcctaattgtaacagatttcggcttcggactatcaggaacccgttatatcgccgaaaacagagaccacaaagaggccattgatacctatgtcaatagtgcaacgttttctcgaataggaatttgtatcatctcttttgctgtcttattgatttgtttattcttaattcctcctttaagacaagaaaaagtgtttttcttgttattttttgggcaagtaatcggaaatatcatgtccccttattggttttttcaaggaatggaacaaatgagattcatcacaatgatgacagtcataacaaaaattctaagtttgactcccctattcttcgtggtaaaagatagtgtagactatttttacatcccgatctgttatagtgtaggaagtattgggagcggaatcatttgcctttatttgatgaaaaagcaattcggggtaaatttctttttcccaaaaataaaaaatattgtgatcgtaacaaaagatagtgccaactatttcctctcgcgaatttcagtttctatgtttacaaataccaacacttttgttctaggattagttttaggtaacactattgtcggttactactctttagcggataaagtttaccaagcactgacagggatttaccaacccttagtagctgcaatatttccttatatgacaaaaaataaacgaattactcttttcaaaaagattttcatttggtcgaatttagccaacatttgcctagtagtgatcgttgcactaggaatatcggatattatgcatttactatttcgaaacgtagatgaatctagtgtgaaggttatgcatatttttctcttcgcttgtttagttgctttacccaatactctactaggatatccttttttggcagcattgggacaccccaatttcacaaactattcattagttggagtttcattgatgcacatcgtaataatagtttgtttatggacttgcggatggatatctatttatagtgtagcttgggtcgtggtaataacagaaacatcattattattcattagagcttggggtggatataaatatcaactttacggacaaagtataataaaaaaacaatgacatgaacttaagttataaagaaatacgaacttattctcctatggggaggtggaattccaggtctgtagcagattggctttgcatgcctctctcgccctttttttcaacaaaattcgtaaagtggcaattaagaccaaatacaatcacgttattcatgattttcttcggaatcgtgggatctctattttttgccttacctaagtgggaatttaaagttttaggaatcatctgttattatttatggtatataatggattgtagtgatggagaggtagctagaatcacaaaacaattctcaacatacggacgagatatggattactgggctcatctaacctgccacccgttaatgaatttggcactttggtattcctattggcaactcgatagatatcatgagtggttattagcgttcattttcattgtatttatttctatggaatttcaacatagagcgttgttaacattccaagcttatcatcgaaaagaaacaggaactgaaagtgttgacaacccttctgtgcttcgatacattttccgacaaatgtatcaatatccaaatttcattttattatttccatttgtctttttattagaatatctcacagaatttcccacgttctatttacttgcagggtggtgcttattttttgttgtaggagtaggacaagctttattgagaatgattgcattttgttataagggctaaaatgagcaaagaaagaaaaaacaaattgaagaacacactatcgatggtactatggggagtattgatttttatcatcactcgtcaagttccttttgtatcatatagtatactcggtaatttagctttactaggtatcgttgcattaaatatgcgttatgatgcaaccggattttatcgtacatttctgcctatcctctgttggtgttcttttctagtattttacgctttactacagggtaatgaagtaacactcgtagctcgctttatcttgattatttttttcttacttacagcctattttatcattttaccttcccgaatggtcaagctattattcgctcttacattgttacaatgtatatttctaattgggttggaattcattcttttactttttttcaatttagaaacttacgaacccttacgacattactttatcaatcaaggttggggagatgtttatactttcacagggcatttttataatataccggtaaaaggaaatgcattgttacctttcgtgtatatgttatcgtattttatacccgtattccctcaaaaacgaaagtctttctttagatgtatctatttattggcaatcgtgtttgctggaaattttgcttatctaatcagtttgtttgtttttcattttatgctctttttcttacaaaacgaatctttccggcagttacaattaaagattttggcattatcttttttaattatattgttttttatccccggattaatttttgttgaaaacgttatgtctaaaaaagtagattctatgggtacaagacaagatcaagtagaagttttattacgggatatcggacaagaaaatacaacaatctggttgggaaaagggttaggaaatacggtttcagaaaaaacaaattatcgggattacacgggcaatatttattttgaattacaaacgttttatttctttaatcaactaggaattataaattttattagtttcatattattgaatttattttttgcttacacgaaaattcgagatcctagattactattcgtttatttatgctatattctttatgcgttcacgaatccttatattctagattcgaatcaagtgattgtaatattgactttagtaatggcaaataaaatactggaagatgaaaatagggtgtgtacttgtaatgtataatcctcaacgggagttattaacagcctccctaaatgcattgaatgaacaagtggatgaaatttttttgggggataattctgtgaatatgccggactttataacgacattacttaacttatatcccaatacatattatcatagtttcaacaaaaatttgggaattgccgaagcccaaaaccgaggaattatttacttccaaaagaaaggatttgattttgtgttattcatggatcaagatagtttagcaccaaataatttagtttcctcccttctggccgattataatcgattaaaagaaataggaatcccaatcggaggaattggcccacgtccttttaatcgaggagaaggaaaaccgtatgtaggtgcagtaaaaaaaggaaaattaatcctacccaaaattacggaagttggggaaattatcagttctgcatcattgattccaataccgcatttcaaacaagttggagggatggaatcaagtttatttattgatggagtcgatcatgaatggtgctggagagctaaaaaaattggtggatggcgttttttcatttcggagagcgtacagttaagccaccaagtaggagaaggagaccgcccattcatttttaggaaagttgcaatacccacccctttccgtacattttatcaatttcgaaattatttccgattggttcatagaggttatgtacctttgtattggaaagtgtcaaatggatttaaatatagtataaagtttttttattatcctttatgcgttcccccgcgtataagttacatgaagcaaatattaaaaggaatttatgcaggaattacaggtaaataaggaaaactgtttttcagtattaatggctgtttacaaaaaagaacaaccactttttttcaaagaagctttacgtagtgtatttgaacaaagtctaattccgaatgaagtcgtgttagtgaaagacggtcctctaacggaagaattggaacaaataattgttgacttctctagtaaaaacgaacaattaaaagttatcactttagaaaagaaccaaggattaggagaagctctacgtatcggtctgaatgcttgctctttcgatctagtagcacgtatggacagtgacgacatatgtaaaccatatcgttttgaaaaacaaatagcttttctaaaagaacacaaagaaataactattgttggaagttggatcgaagaattttctgattgtaaagaagaaatagaggcgataagagaattacctcaagaagataaacaactaaaaatatttatgaaatggagaaacccatttaatcacatgaccgtcatgttcaggaaaaaggatatacttgctgttggcggttatcaaccattttatctattagaagattactatctttggaatagattagctaatgccaattattattttgccaatattggagaatcattattatgggcaagaggaggctatacgatgttggaaaggcgaggtggatggaaatatgttgtatcagaaagtaaattgttgaagttcatgtatcgttcaggacgaattaatattgtagaattcggagctaatttgatgatgaagagtataatccgtttaatagggaaacatttacgtcatacaatatacactttctttttgcgaaaaaaagtaaccaagacttcggtgtcagtctaaatttattagatattattagagtaagtttctggtaaagacagagaattaatgtcatattatcgtttgctgggaaaataggggacaataatatttttttgaaagaatcgagattacacagaattcgtttggattgatgattttctctaaattaattgagaaatctggattatcttctgttagaatggcacatatattcatttctctataatctcctgttttgtaatcatgtacggtaatactaccttggggaagaatcaaagttttaacattgagcagagttagagtaatcgtattgagttcccttgttatgcgataatttattttgtcttcagttacgtcataagattcctcaaaattgattgttgaaaatcccatcaaacggcaaacaaatttgtcaacatcaacatacgggtttctttcataatattcgttttgatgcaatgtgttgcttttccagcgaataagatgtgcattgtatacaccggtccatattttatcttttacgaaagtataagtagaaaggcctcctttactatcttgccagtaacctttcatccttgcgtaaccgttaatacatacatcgccattacaagctttgccttctacagcacgatctgtcatgcaataatagcttactgttttggattttctttttcccttggagtaatttttcccgttgcattcggatttttcgaaagctctgtataaaggttcaaaatgcaaaagtaaataatactcaaaacagcgacttgaaaaggctatattgatcttttttccatcgatctcggtaattcttgccatttcgaaagcctcttttgccttcgggtgaccatctttatcaaaaaacacccaaacttcgtcgtataccttcaaattgtcgatgcctccttttacccaagtttaaaggttgttctccggggaaaaaatccgtattctctatttcttgctgttcttgtgtcgtatttttaagcaagcgtttttttctcttctctttgcctcgatttaaatctagaacatcatcgcttggggatatggtcggtttaggtttaatcgtggtagcaaaatcaattattccagtttctttaaaatcttcaatcataagtgctaaaaaatttggctcggtgtgagttccctcgcaaataagaggcatcgaataatgtgtttgtttcgtatcagtcgatcgcatcagaacaatttttgtaagggtttaatggatggtaccgctccaaatttatttgccatataccatttcgcaaaaggggtatcttctcgaacacctgaaaaatctgaaagagaatataaatctgacgtacccctttctgatttctcggtaaaccaaatttggtctcttcgtaatttatcttcgttaagtaaatttatatcgtgtgtagtgaggattaattgagcattctttttatttatttccttatctctaaaaatatctaggatgaaagaagaaatataggtatgaaaacctgtatccatttcatccacaaataatggacttccactttcaagtgattgcaagattttaccaccaagtataaataattgacgggttccataagattcattgtcgaaagaaaaatcgatatcttcaaccctttgagcaccacgataactttcgtgtgtaagtaaaaccttttgaagacttgtttcctttacgtctatcttaaatgcttttattccgagatcggcaaaggctaataatttcattaatttatttcttctgctttcatcttctgctaaccagtctcgaaattcatcccataattgattaatcattcgactatggtaaccattggcaatatgaatattagcaagatatttcgcagcgggagtgattaaatcaaaaggaatatcataaagaaatttggaaaggatcaatttattgctgaacactgcgaatttttgtaccttacttttaggtattgaagtgaagtatttgggttcataaacttttattattgaatcattttctaccggtactctttcaaataatattgcagcaacaccctttggaaaataagttagtttttccgataaaaattcctctccattatatgtcagttcatataaatgtttgatattatttacaataaagctgatagaaatttctgtcggttcatttttagaatcttcatctaaaacaaacggttcatatagatatattccttcacctccttgatttgccgtcatgttggagatcatagaccttaaggcataaagcattcggattatattagttttcccagaagcatttgccccataaataatagcaattttcaatagtctttcttcatcattttctgataccggtgcaacaaaaacattgttcgcttttgtttctgttgaagaggcttccattgaaaaactgcatttatctttaaatgatcgatagtttttaaattggatgtctaaaatcatatttttgcattttatctacaaaaaaacggatttaatttgataaaacaaaggattgcctcttgtttttatttcaatgcaaaatttacaaagataaaatttacatctatagtcaaactcgtaataaaatcgaaattcttcattaatcattctactaagattttactaccctttttccaacgttcaaccacctctcaaccgttactccccacatccaaaatcgttatcccgccgccacgtgacgggtgcataacgtaagagaaagcgcccggtaaggcccgagaagtagtaaaaacattgaattaaggtaatattaccctagaaacaagcatggcaagtaaaattacagccaagaaaatatagtgtaacataaattcaaccccaattaagaagtaatataacccaaataatcccacatattcagagatcattcgatgcttactcagagcttagacatcccgtaatgtatgagccacgaataatcttcgaatgagcttcgaataagggggattatttccctaggatttccttagcttctcaacaggttctcatcataaacctagttctacgtcaagagaaacattttccccctccgcaaaaaaggtaagaatcacgattatttaagcatagctatatatcacaacctgcccacaaccttggttcccggttcaaaaaacataatatcattttccttggtttatgaatataaatatacacttttccaacgaatgagtcatgttaaaaatacacttttcttatattttacagtataagcaatcacacttttatccttgccacacattctatcaaatatggaatacgaaccacaacccgctgtcctccggccacctcgatcaactcaccctgtaccccagctaattcaccttggagcactcgtatagcagatcctacgggtaatccttcattcacgatttcaagcgtctctgcccgttcattcaagattttgaaactctctaactgctcgtccgaaatcacaaccggaacctgtttctcctgtaacaacgcaatcactccccaaattgataacacggaaggtaaattcacttcagaaacacggacaaaaatacaccccgtaatcacaggaatttccaatcttctcttttgcccatctctcacaaattcaactgctctcacaggcaaatagttctcaattcctgcttgttccaaacgctccttcacacgtttttccgcccgagaagcagtgaaaactgcataccaattcgtcttctccattactctctgacttctaaattttcggctacctgaattttatttaaaacctcttccatatgatgctctacaccttcctcttccatctggaaatcaatagattcataggttgaatttttcgatttaaactcaggaacgatacatttcatttgtttcaccacggcaaaattatcttttgtctgcaaagctatatcaagagcctttatcgcatccgtaacttcactataattatattcacgtactttggcaatctttattcgctcatgcacggtcggcaaagtcgtctccttcacgttaagcacctcctcgtacaatttctctcccggtctcaaaccggtaaagacgatatgaatatctttccccacttcataaccggaaagtttaatcatcttacgggccagatcaacaattttgacgcttttgcccatatcaaaaacgaatatttcaccgccatttcccaacgctcccgcctgcaaaacgagttgacacgcctcgggtatagtcataaaaaaacgagttatttccgggtgagtaaccgttatcggaccacccgcctcaatctgtttcttgaaacgagggatcaccgaaccattcgatcccaaaacattcccaaaacgagtagtaataaaacgagtatttgcaatgcgattcaatgattgcgtgtaaatttccgcaatacgcttacttgcacccataacattcgtcgggttcacagccttatcggtggagaccatcacgaaacgctgacaatcatacttcacagcacaatcggcaacatttttcgttccgaaaatattagttttcactccttcgatcgggtgtttttccatcatagggacgtgcttataagcagccgcatgatacacgatattgggatgatatgttttaaagattccttccacccggctcgcatcacgtacatccccgatctcgactttataatccgtgaaaccacactcttctttcaattccagctcaatatcataaagtggagattcggcctgatcaaacaaaacgatcaaagaaggattaaaatgcgtcaactgccgcacaatttcactcccgatagaaccagccgctccggtcaccaaaaccactttattcaataattgttttcgaagattggtctcctccatgtgaatcacgtccctctccaacaaatcttcgatcttgatattccggatatgccgcatactcaactccccgttaatccaactttcaaaacgaggcacttcgagtacgttcacatcagcggccaagcagatctcgacaatttcccgttttttatcaggagaaatcatctttttggcgataaccaccttgtccacccggttacgtttcaataaaccgggtaaagatgacattttgtaaatcttaactccctcgataatctttcccgctttccgatcattcacatcaacaaaagcaagaatattatacgtggcatcctccacgttatccatagcatgttttgccatgataccgtattcatcgctaccacatataattacgttctttttagtacgttcggcaccaatatactgcgcaaacactttcttcacgatcacccgactcataaccatcaaactggttagaagaacatactccgtgagtaaaacggaaaccggtataaaaagataatcatacaacaagaaaaacacaccactccccaaaagaagggcaatctcccctgccgtcaacacgtaatagatgcgcaaagcatcctccgttcccgtgaaacgtactattccggaataagtatgtcccaacaagaaactaaccacccggatacctacaataacaagggctccggtcaagacaaaatccaatctcatccggtcaatctgaaaattgacccaaatcagataggcaacgctaactgccataatagcaagagccacgtcaatcaaaaatacaatccatcgaggagtgtacgagaatgaacgcaatgtcctcattctattcagaccatttgtgataagtgcaaccataattttttaatataaaaataaaaccttcacgggataaacctcctaaaaggtggacacctgcaaaggtaatagtaataatattaaaaaaaaaatttttagtaggccttcaaaatattaacctcatcttcagttaggaaacgccagtgacccctaggtaaatttttcttcgtgatcccggcaaaaaagacacggtccaaacgaagaatctgataccccaaatgttcgaaaatcctccggacaatacgatttctaccggaatgaatttcaatccccacctgtgtacgatcatcttctgccactctcacgtcatccgcctggataaaaccatcctccagatcgattcccttacgaatagcctccaaatcgcccgtttgaaccaccttatccaagaacacgtgatatatctttttctggttatacttcgggtgtgtcaatttttttgccagatcgccatcattcgtgaaaagcaacactcccgtggtctggcggtcaagtcgtccgatcgggtacacgcgctctttacaagctccctcgatcaaggccatcacggttctacgttccaaaggatcttccacggtcgtcacgtaatctttcggcttattcaacaccaagtatactttacgttctggagtaatcacttgatcatctacctccactcgatccgtacgctttacttttaccccaacttgttgcacaacttccccgtttactttcacccgaccggctgtaatcaacgcatctgcatcacgacgtgaacacaccccgcctttagcgatataacggttcaaacgtaattctgtctcctgcccctcattcttcttacgatattcaatttgttttttcttactatacacacttttgggagcactatccccatcttcccgacgggtaaacacttttcttgccggacgatcagaataacgatcccgacgatcatccccctctctgcgatcccgacgatcgccacgatacccttctctacgtcctctgtcctcacgggaacctctttcccgccgtccttcttcacggcgatcattacgctccctgttttgataacggttatctcgtctttctacattttcatcccgatcttgaggccgcctttcacgacgttctccacgatcggaaaaacgattgttatccctgttacctctctcgtacgatcttctgttatcccgattctcgtaacgattattctcccgatcccctctttcatggtttctgtctgaatcccggtaataacgattcccgttatctcgatctcccgaaccctcgttacgctctctctcccgttctttgttcaaatcacggatatacccgtatccttgttcccgtctcggtctgtccgtgttgaaacggttaggtcttcttgtttcgctttctccaccttcacggttttcgaaacgcggtgttctaccccgacgattctcatcacgattctcgatcggccttgtaattctaggtcttttagtctccctattcatatacttacgtataaatttttgattttaaatttatgattcttgcttatagccctcatcggcctattctattgattgaagatatgcatcattcttcataccttcttatttattcattctcaattctacattttcaactttcaattatttcggtgccgcccgatatacaaataacgccaccacagcaaataacatattcggtatccataccgctaataacggactcatgcctccattggttgcaaaaaccgtggaaaattgcataaataatatgtacgagaaactgattaacaatcctaatcccaaatggaaccccattcctccccgaatcttacgggaagcgatacataccccgattaacgtcaatataaatgtagcgaaagctcccgaaaacatcttgtacttttcaatctggaactcaaccacgttactacttccccgcaatttttgtcgggctatgtattcatccagttccggtaatgtcaaacgttctttaatttttttggggtcctcggagaattccgccgcactaaaatttaatagcgtatcaatagtttgtcccgtcgtgtaagtctccttgatcccgtcaaattcccgtaacgtccagttgttaatccgccatttctcaagttctttattccatgatatagattttgcggtcaacttactaaccagcgtatcctcccgaaatacctcgtaggtaaaatcattgccccggctagaatacacattaaaactcgacatataaataaaaacacccggcgcaatctgtcggtgaatattctcctccttgttactatactttttccaaatatattgctcggaaaactcgatccgtttcttgttggcattcggaataataaaagcactcaaaagaagtgacaaacaggcaatcaccccggccgatatcatgtatggccgaaccattctccggaaactgatacccgtacttaaaatagcaataatctcactattataagccatcttagacgtgaagaaaataaccgaaataaaagtaaacaaagaggaaaatacgttcgcaaaataaggtacaaaattcaggtaataatcaaatatgatcgccttcacgggagcctcgttctcgataaatttttccaatctctccgaaaggtcgaaaaccacgacaatactcaagatcagtaccatcgaaaagaaaaaggtacctagaaacttccggataatatataagtctaatttcttcattttatgctagttgcttctcagcactataatcttcgtgtaactttttttatcgtgctctctttccacgtcacgaaatctccttccaatatgtgtttacgagcttcacgtactaaccacaaataaaacgacaaattatggatcgagcaaatttgtagccctaaaatttcatccgctttaattaaatgtcgcaaatacgctttcgagtaatcattatcaacaaaactcaacccagccggatcaatacgactgaaatccttctcccacttcttgttctttatattgatcacgccctccgtggtaaacaacataccatttctcccattccgggtcggcatcacgcaatcgaacatatccacgcctaaagagattgcctccaaaatattctccggagttccgacccccatcaaataacggggcttatcctgcggtaaaatccggtttacgacttggatcatctcgtacatgacctcagcctcttccccaacagctaatcccccgatagcatatccttctcgatcaagagcaacagcgtgttccgctgccttttcccgtaaatcccggaaagtacatccttgcacgatcggaaaaagcgactggtgataaccgtacaatggctccgtagaatcaaatcgtttcacgcatcgttccaaccaacgctgggttaattccaatgaatttttcgcgtaaccgtattcactctgccccgggggacattcatcaaatgccatgataatatcagcccctatcttacgctgaatatccatgacattttcaggagtaaacaagtgtttcgaaccatcaatatgagaacggaacacgaccccctcttccgtgattttccgacaatctcccaaagaaaaaacttgaaaaccgccactatccgtaaggatcggacgatcccatgaattaaatttgtgtagtccacctgcctcttccaacacctctgtacccggtcgcaaatacaaatgatacgtgttgcccaaaatgatctgggccttaatatcttctttcaactctctcgcatgcacggctttcacggttcccaccgtacccaccggcataaagatcggagtttcaatattcccatgatccgtggttaacacaccacatcgtgcatcactgtttttgtctttcgctaaaagggtatatttcatctaatcatgattttgagcgcacaaagataggaataattaaatctaaaatcataaatctaaaattatttatatctttggtccaaattaaaaaaacaaaaaataattgtcatgaggatgttttacaagttaattgtatgtatgtttatcgtggggtttgccctacccggaaacgctcaaaacaagggcaaaaaattcactctggaagattttaacttgacctacacgttcaggacacaaggtgtttcaggtcttcgttcgctaaatgacggggaacactatacagtgttggaagacaaaggtaaaaaactggtcatgtatagttacaaaaccggaaaagccgtaagcactttactagacttgaacgatcccaagtacaaagctgttcagaccatccaagattacgaattcagcccggaagaagaccggatattgatctgcacgaatataaatccgatctaccgtcgttcattcacggcagactacttcgtgttcgattttaaaaacaaggaattaaaacctttatcagaaggaggttctcaacgtttggcaaccttctctcctaccggaacgaaagtggcattcgtgagaaataacaatatctttatcgcagacttacgtttcggttccgaaatccaaattacctttgatgggaaatttaacgagatcattaacggagctcccgattgggtatatgaagaggaattcggattcaacaaagccttcgagtgggctcccgacggatctgctctcgcattcatcaaatttgacgaatcagccgtgaagacttaccacatgaatatgttcagaggacaatatccggcatacgaacaaaatgccctctatccctcgaactattcctataaatacccgaaagccggagaaaccaattccatcgtgagcgtccacgtttatgacattaaagatcgtgtcaccaccccaatgaatattggtgaagaaacagatatttacatcccccgtatcaaatggacaaaagatccgaaaagattagccatcatgaaactaaaccgtttccagaatcaactggaaatcctgttggccaatgcccgtgtgggaagtacaaccgtgctttatcgggaagaaaataaatattatatcgcagaaagcaacctggacaacttaatcttcatggaagacgggcaacatttcatcatgagtagtgaaaaaagtggttattctcatctttatttgtatgccatgagcggtaaagaaattcagccgatcacttccggaaaatacgacgtggttgacttctacgggtacgatccggtaaaaaaactttactattatgcttctcatgaagaatctcctctggaaaaatacatctactccattgatttgaagggcaaaaagaaaaaacttaccccgacaaaaggatggaatgaagcagaattcagtaaatcattcaaatactatattaatatagtatctaacgcagatatgcctcacgtgtacaccttgtacgcagcaaacggtaaagccgtccgcacgctggaagacaatgctgcattgaaaacaaaactggcagattacgatgttgccaaaaaagaattcattcaaatcccggcagcagacggaaccaccatgttaaacgcatggctcatgaaacccgtggattttgacgcatcaaaagcttacccgttactaatcatccaatacagtggtccaaattctcagcaagtaagcaatagctggggtatggactggacacaatacctcgcacaagaaggttatatcgtggcttgtattgaccctcgaggaactgcagccagaggggaagaattccgtaaatgtacctatatgcaactcggcaaaatcgagagtgacgatatgatcgccgcggccaaatggcttgccggacaatcttacatcgatgctaaaaaagtaggtatctggggttggagttttggcggattcatgtcatcactttgccttatgaaaggaaatgacgtgttctccacggctatcgctgttgctcccgttactcactggggattctatgattccatttacacggagcgcttcatgagacgcccgcaggataatccttccggctacaatgacaactccccgattaattgggtaaaacacttaaaaggaaatttgttgttatgccacggaaccgcagatgataacgtacacgtgcaaaacacctacgaactatcagaagctctcgtgcaggcaaacaaacaatttgatatgcagatttacaccaaccgtaaccatagcatatatggcggttacacccgattacagctgtataccaaattcgtgaactatttaaatcaacacttgaaataaaatttcaaaagttgattctagtttcaggttgaaacaaaaaaacagataagttgtgattgagtcacaacttatctgttttttttatatcttgcaaacgatagaaataaacatgatctcagtgtaattatcttcgggataaccaaactgaaatcttaaatcataaatttaaaaataaaaacgttatgagtaaatgtatctgtacgttagaacccaaagctatctgggaaaacttttataaactaactcaagtaccacgcccgtcaaaccatgaagaaaaagccagagaattcgttatgaattgggcaaaagagaacggaatccatgctgaaatggacgaggctaacaatatattattgagcaaaccggcaaccccggggatggaaaaccgcaagggagttatcctacaaggtcacctagacatggttcctcaaaaaaatgaagacaaacaacacgacttcaccaaagaccctattgaagcatatatcgacggagaatgggtaacagcagacggtaccactcttggagcagacaacggtattggtgttgccactggaatggccattctattatcaaaagatattcctcacggcccggttgaagtgttaatcactgctactgaagaaaccggaatggatggagcaaacggtatccgccacaactggttaaaaggagacatcttgttaaatcttgactctgaaacagaaggcgaattgtatgttggttgcgccggaggtattgatggagaaatcgcattcgattacacacctgaagctgttccagcaggacataaagcattccaattatcactgaaaggtttaaaaggaggtcactccggaatggatattaacttaggtagaggaaatgccaataaattatatttccgtttcttgaaagcagtcagcaaagagctggatcttcgtctttcttccgtatccggtggaaacatgagaaacgccatcccgcgtgaagcattcggcatcatgactgttccggctgccaatgctgacaaattcctgactaaagtaaaagaatacgagggaatattcaaagctgaattaagcgctaaagaaccgaatctcactttctttgcagaagaaacagctcttccacaaaacgtgatgccggtaaaagtacaatacaacctgattaacgccatcaaggcttgcccgaatggtgccatgagaatgatcgattccatgccgaacacggttgaaacatccaacaacttggcgatcgtgaaaggtggagaaggaaagatcgaaatctacatgttaatgcgttcttctgttgaaactgctaaaacatcattagctcaagttgtagcatctgtatttgaactggcagaagcaagcaagataaactttaccggagaatacccgggatggaaaccgaatccggattcagctatccgcaaagaaatggaagaagtttacatgaaattatacggtaagaaaccggcaatcatggctatccatgccggattggaatgtggtatcctaggatctgcctacccacattgggacatgatctctttcggaccgaccatcagttctcctcactctccagacgagaaagtgaacatcgaatctgtaagtaaattctgggaattcttgaaagctactttagctgcaattcctacaaaataattaaaaaaatagactccgatgacattatcggagtctatttttttcttcttttcgggaaaagaagaaaaagccgggtccctcaaataaatcaagtgttgccgatacgtaaaacaccagaaattgtttcaattttccctcactttcaagccatttactctatttttaaatattttaaccacatcgtattgttttctgtattatctttgtatggaaaattcatattattaaaacatgactttaaagaaattgacgttaccggaactcttgaaaaatagctgttccaagttttcaaaaaatttatctttaaattttgtcgcaagcggaaaaaaaacttaccaagatttatataacgaagtcgtatctattgccaaccatttactgcatttaggtgtaaagaaaggagacaaagttgccattttaagtgctaatatgccaaactggggtattacccaatttgctatcgcaaacattggagctattgccgtacctgtcttaccgggcttctgttctactgaactccagaatatactggaacacgcagaggttaaagtgatctttgtttctcgcttactggcaaaatgtttggaaggagtaaaaacaccgttccttgagcataaaatcttgatcaataacttttcaactatcccggaaggatgttaccaaccggaagaattggataaattggttccggatattagtttgaataacacaactcctcttcctgaagtttcaattgaagaagaggacattgcatcaatcatttatacctccggtacgacaggattctcaaaaggagtggtcttaacacacaaaaacttggtatgggatgcacgtcagtgccataccatccaacccgtggatgaaacttatcgtttcttgagtattctaccgatggcacatacttacgagaatacgctgggattattgttacccttgatgttcggagcacaggtgtattacttggatcgggtgccgaccccgaaactacttgttccggcgatgcagaaaatccgtcctactgtagttttatccgtgccattgattatcgagaaaatctacaagtcgcaagtgctacctaaattcactagctcgaaattgatgagcaagctctaccaattcgcccctgctcgtaaattattcaaccgattggcaggaaagaaactaatggaaacctttggtggggaattaaaatttttcggaatcggaggttctaaactggatggaaccgtggagcaattccttcgggaagctaaattcccttatgctatcggttacggacttaccgaaacagctcccatggccgcgggttccaacccgtcacagaccttccttcaaggagtaggtcctgtcatggaaggcgtacaaattaaaatcaacgatccagacaagagcggacaaggtgaaatctggatcaaaggtcctaacgtgatgaaaggatactacaaacgtccggaactcacggcagaaaccttcacagaagacggttggttcaaaactggagacttgggttcttttgacaagaagaacagattagctatccgcggaagaatcaaaaccatgattctcggtgcatccggagaaaacatctacccggaagaaatcgaatctatcattaataacttccgttttgtgaacgaatccttggtagtggaaaatagtggtaaactggttgccatggttcatttcaacatggaagaacttgaaaaacagtaccagaaattaaaagaccaagcgggaaactacaaagaaaaaatcaacgattatattgaagaacaaaaacaagaattacgggattacgtgaatgcccgggtgaataacttctcaaaactacagctcgtactcgtacaacacgaaccttttgaaaagacacctactcataagatcaaacgtttcttgtattgcaaataataaaaaatcgggttcttaaaaacccgattttttatttctatcattttatttgaaagtccagtaaacattccccgtctaaaagaccccgaaggcgatccccgatagacaagttcctttgtcgaaaaactcccccacaaaacaagaaatctcctattttcaacatataatactcagacattacggcaagtgtcttctccggtttttgcgaaatctcaccaactttacctgtgagaacactttccccattcaattcaaatgaaaaaatcatatcttccagcgagacacccgccaatgatttcatcgaagaaattgcagccgaagaatcaaaagccatcgcagccgagggagataacgaagccgccaacaattccctttccaaattgtccgcgtaaaaacggattcccactcccacctcctcgtaataccgctcggcaaaacgttctgccacgtgttttccgatcttcccgatccgtaatactatttgcggcacacaactcaactccgtggcaaaagccggaatatagaaatcatcattgtttcgcaggagggcattgtcgccaatgacattataggctacctcacccgcctcattatactccgcacaaagtaatttcatttctacaatcccaaatttagaatcaaaccttcaattatcacagaatcaccaattcttccaaagcccgtttcggtacatgatgcgatccgtccgtctcccgccaatacttgtaatcaccgtctttcatctcttccaacaccaccgtttctttcggtttacccaatgcgataacatacatgatcttcaaatgctccggtaattgcaatacctcacgcaaagactcgttcttaaaagccttaataatacaaccaccataccctttctccacggctcccaacaatatagcctgtgcttgaatcccgtcatcacacaaacagttctccacgatagaagtatccaacaattgaatcagataagctgccggacgttctccctcttccggaccatcccaatcttttagataacctgcccatgctaaattaggaaacaccttgtcacacaaatcaacatctgccaccaccttatacttcaacgcctgcgcatttcttcccgatgcacaataccgagtcagcccaaccaattccgtcaattcctcccgtgagatccgaacatcctgaacaaaacgacggtaacttctattttttaataacagttctttcagcataaatctatattgaatctaatgattaaattgtaaatttgttccgaaacaaaaatagtaataaaatatgaattcgtttctccatctcctagcaaaagatctgattcagaaatacagctataattttgacaacctgaccattctgttcccgaacaaacgagccggcttattcttggctcaagaactggcccaactgattgatcgtcccgtgtggatgccggagatactgacgttgagcgaattcatagaacgccaaaccggactgaaaaaagccgaagaactgactcttatcatcaaactttacaaaacctatcaagagtacgccggaacgaccgaacgttttgacgatttctatttttggggcaatatgttacttggcgattttgatgacattgataaatatctcgtggatgcgaaagatctcttttcaaatatcacggcattaaaagaaattgaatccgccttcccctatcttaccccggaacaggtggagttcattcaaagtttctggcggagtttcaactcggaaaaatacagccgggaacaacaggaattcttgaacgtgtgggataaactctacccaacctacacccgtttcaaggcaaaactactcgctgaaaacctgtgttacgaaggaatgggacaacgtctgttctgcgaacaactctccaaacatcacaccgatcaccaactgatatttgccggattcaatgccttgaatcaatgcgagaaacggatattttcctattttcgggacaatcgacaagccctcttttactgggattacgacttgtactattcggcaaacgacaaccacgaagcgggactctacattcgggagaatatgaaactgtttcccaatgcccttggattggaacatttcaataacttccggtacaacgacaaagccatcgagtacatctctgttccctcaactatcggacaggcaaaactaatcccgacactgatcgaacagatccatccggaacggcaaaattcatacacggacacggccatcgttctttgcgacgaaagcctactcaccccggttattcactccattcccgacacgatcgacaaaatcaacatcacgatggggtacccggcacaaaacacatctgttgccgccttgattgccatgctgggagatttaaagcactatgccaagaaagagggagaaatgacccattattactacaaaccggtcattgccctgttgaaccataaactgataaaaagttcctgttcggaagatattccaaagatcacgaattacatcaacacgaacaatatcgtgtacgtggcagaaaaaagtcttcaattcagtgacatcacacgggccatattctcctcgtcggaagagaacttactcgattacctgttgcgcattttgaagcaactgattacttccatacaacccgaaggccatgaaagcctagccatcgaaaaggaatttctattcacgattttcacgacgattcaaggcataaaaaacacctttatcgaagaaaatattatcccggacaacaagttttacctgcaaattattcacaagatattacaaggtgagtccatcccattctccggagaaccgctggaaggcatgcagatcatgggattgatggaaacccgtatgctagatttcaaaaacctgattatcctgtctgccaacgaggggattctgccaaaaggcggacacgcctcgtcatttatcccctacaacctgcgactgggattcggactacctaccccggaacatatggatgcccttttcgcctattacttttaccgtctcttgcaacgggctaaaaacatcaaactgttgtacacggatgtcacgaaaggcatgagtagcggtgagatgagtcgtttcctttaccagataaaatacgaatcgggactacccatccgggaagtccatttccaaaacagaatatcggttcaagacaacccaaccatttccatccctaaaaatccatcgatcctggagcaactgaaaagttacacggatgaaaacgagcggggaatatcgccatccgcactcaacacgtacatggaatgtcacttgaaattttatttcaaatacatcgcccggatcaaagagaaagaagagatggccgaagaactggatcaccgcctgttggggactattttccatcaaagtacacaatctctctaccaaactttccccgatgggcagatcacagcagaaggcctcgacgccttgatgaaaaacgattcactgattgaacaacatatccaggctgcctacgagaagttatatgacacaaccgtatccaaaatgctggaaagcggggctaatgaccttgtactatctgtagtgaaaaagtacgtgaagaaggttttcgaatttgataaaacgttatgccctttccacatcatttccatggaaagaaaatatcgtatgcccgtcacgatttctgcttttgatcatcccaccgtgatctacgtggaaggagacatcgaccgggttgaccgggtagcccaaggaacccgtgtcatagactacaaaaccggaaccgacaaaaccgatctcaaagacctgtcgtccatctttgattcaaacaacaaacaacgaaataaagcggctttccaaaccttgctctattgcatgatgtacgagtatgaaaatcccggtaccgacccaattcttccgggaatatacagcacgaagttgcttttcacgcccaattacagctatctgttgaaatgtaacaaagaaccgattcatcgctttaaaccatacgaaccggaatttcaagatctactcgtgcaattattggaaaaactcttttcacccgaagtaccgttcacgcaaacggaactaccggaaaagtgccgtacttgctcgtacaacgaaatctgtaaacggaaataaaagaaagttgggatcattccgaaaagagttcagcgggaaataagtcgggatggacgtttctcactccattctccttcgtttcaaagccacttgagctgatcgaatatgatgggtagggcacacgtctttagctgccacgtgggggcttatttcccaataaacacgccccgcactttcacgtgacacgggtactatacctgttccttggctttcaaataaaaagaaagtcgggattccagatgctcccgaacaaaaaattccaactcatcatcggaatacatcgctaataaaggccggtcggcacgttgccgtttcaagcgatcgacaataacaagaggcgacgtgttcaaaaaaacagtcgttcccgcttggttcatatagtccatattgtcaaaaaagcaaggtgttccccctcccgtggccagcacgaactcatccgcctcgttacatatttcatgcaagatctcccgttccctcttccgaaaatactcctccccctccttggcaaaaatctccgaaatcgaccgtccctctctggactcgacactctcgtccaaatccagaaaaggaagtcctttatccttggccaattccttcccgaacgtggacttaccacttgccatatatcccacgataaagtacttcatacttatcactcccgccatttattcaaaatccaacttcatctgcgcctcgtcactcagcatatccggattcgtgatttcgaaatcaatatcggtcgaagtcgtatcctcactttcctcctccccactatccaaaggttcgatctcgttaatctgttttacctcgtaagtcgttacccgctttccgcgagccttgtatgatttctcggcaatgaactcatccgccacgatcacctcagccagacgactttcgtaacgcccaccaaacacaacctcgaaccggggccgcttttcaccactcaaagctacaagatacgaaccttccgtttccccgataaacaacgtgtgacgcaccacattctcgaaacggaaacgcttcaagtaatagaattgctgttccgcatcaaagaaaacagccgaccatactttctccggctcatatttctcgatcaccgagaatccctcctcgtagtgattactcaaatcataatccgtcgtgtagtaagtaccgtttttattcaccaccagaatccgatcttctccctggaattctcccaagtaacggccacgcccgtcagtattcaatcgtaatacatcctcgtcaatccatatcttccgaccacccagcgtggaagcccctttctgtaccaaggaaatcttatgaatatcattcttactcaacacgttcccctgtgagtcgcgccccttaatcgccaagcctgcaaaatcatactcgaacaccagtttcttcattcccggtttcggtttcaggcataccttaatcacttcagcctccccgttcgggtttgcactaaaatacaacacccgtgatccctgcgtacctttcgtcaagttatattgcttatcgcgggtcgttcccgtcacgaagaaacgtttcacgtaagacggtcccaccttaccatcccggtaggccacgttatatatcgtacgcttatcattcttcttgaacacattcacgtgcagcacgtcttttccaacgaacaacttatctgccaccttagtcacgtaatacgtaccatccttccggaacacaatcacgtcgtcaatatccgaacactcgcagataaactcgtccttcttcaaggccgtaccgataaaaccttcctcccggttgatgtacaacttttcgtttgccaccacgactttcgtggcctcgatattctcgaaattccgaatttcagtgagtcgttcccgacctttaccgtactttttcttgatattctcgtaataattgatcgagtaagggataatatgctcgatgtcaaatttcacccgggcaatctcctcttccaatcccttgatataattctcagcctgttccgagttgaacttcaagatacgtttcatcttgatctccaacaaaagctttatatcgtcatccgtcaccggacgaattaattccggcaagaacggttccagtcgtttccgcacgtgaaccacgacttgatcaatcgattcgctctcctcgaattccttatctttgtaaatacgttcctcaataaatattttttccagagatgaatattgccaatccgtctccaactcgcccaacttaatcttcaactccaacaacaacaaggccaccgtctcgtccaccgatttccgtaaaatatcggtaatcggcatgaaaatcggcttgtcgttctcgatcacgcaagagttcggagaaaccgacaattcacaatccgtacaggcatacaaagcatctatcgtcttatcggaagaaacgcccgcagccaaatataccaaaatctcggccgttgctgccgtgttatcatcaatctttttgatcttgatctttcccttctcgttcgccttcagaatcgaatcgatcaaggcagaagttgtccgcccgaatgggatctccgtgattcgcaagatcttattcccggcgtctttctctatcttggcccgaattttcaccactcccccgcgtaacccgtcattatatttcgacacatcgatcattcctcctgtcgggaaatccggatataaaacaaaatcttcatttttcaaataagcgacacaggcatccagcaactcgttgaaattatgcggcaatatcttcgaggccaaccccactgcaataccttccaccccttgagctaacaataacggaaacttcacgggtaaggtcaccggctctctcttccgaccgtcgtatgacaacttccagttcgtcgtcttcgggttaaaagccacctccaaggcgaacttcgaaagacgcgcctcgatataacgtccggctgccgcatcatctcccgtcaggatatttccccagtttccctgacaatccaccaacaagttcttctgtcccaactgcaccaaggcatccttaatagaggcatctccatgcgggtgataagccatcgtacttcccacgatattggccaccttgttaaatcgcccgtcatccatctccttcatcgcgtgtaatatacgacgctgcacgggtttcaacccgtcgttcacataaggcaccgcacgttccagaatcacgtaggaagcataatccaagaaccacttctcgaacattcccgacaaatgctgaatcgaccgcacccggccgttttcttcctgttgctccggctccacgttctctacttcatccacttcctcgttgtttatctcgtcactcatatgaattgaaaattgaaagttgcaatttaaaatctaaaatcataaaatggttagatttcatccttctccacgtacagattatctataataaaatcctgccgatcgttcgtattctttcccatgtaataggatagaatcgttccaatcgggtcctgctttgtcatgcgtaccggttccaaacggatgtctttcccgataaatccaccgaactcatccggggaaatctctcccaaacctttaaatcgtgtaatctccggtttcggtcccaactgcttgatcgccttctcccgttccgcatctgaataacaatagcgtgtttctttcttgtttcgcacccggaacaacggggtttgcaaaatgtacaagtgccccgaccgtaccacatccgggaaaaattgcaaaaagaatgtcaacagcaacaaccggatgtgcatcccgtccacatccgcatccgtggcaataataatattattataacgtaattcctctatcccgttctcgatattcaacgctgcctgcaaaagattaaactcctcattctcgtacacgatcttcttggtcagcccgtaagaattcaacggtttacctcgcaagctgaacacggcctgcgtgttcacgtcccgtgacttcgtgatagacccactggcagagtctccctcggtaatgaatatcgacgattccgtcttccgttcatggttggaattgaaatgtacccgacaatcccgcaacttacgattgtgcaggctaacctgcttggctcgttctcttgcgatcttctggataccggacatcgctttccgctccttttccgtctcgacaatcttacgcaacaataactctgccgtgtccggattccggtgcaggtaattatccagctccttcgtcacgaaatcaaaaataaaattacgcaccgaaggaccctccggggctatatctttggaacccaactttgtcttcgtctgcgactcgaacatcggttcctgtacttttatgctgatcgccgcgataatcgaagtacgaatatcggccaaatcaaaatctttcttgtaaaaatcacggattgttttcaccacggcttcccgaaaagcgaccaagtgcgttcccccttgcgtcgtgtgctgaccgttcacgaaagagtaatactcttccccgtattgccgcccgtgcgtcatcgccatctcaatatcattccccctcaaatgaatgatcgggtacaacccctctccactcatattctccgacaacaagtcatacaaccccctcttggaatgcaatttctgaccgttaaaattgatggtcagcccggaattcaggaacacgtagttcttgaacatggcctccaggtaatccatgatataatggtagttaccaaacaactccttgtctgcgataaaagtcaccaacgtaccattcggttccgtggtcggtgccacctcctgatcttccacgatcaacgctttattgaatcgcacccgcttcgtctccccgtcccggaaggactggataatgaaactctcggaaagggcattcacggcttttataccgacaccgttcaatcccacggatttcttgaaagcctcagaatcatacttggcccccgtgttcatcttcgaagccacatctatcaatttacccaatggaattcctcgtccgaaatcccgtaccgaaaccgtccgttcctccacgttgataataatctcgcttcccgctcccatcgcgaattcgtcgatactattatccaccacctctttaaccaatatgtatattccatcgtccattgccgctccgtcccccaattttccgatatacataccggggcgcaagcgtatatgttccctccagtccagcgtccgaatagaatcttccgaatagttctctaccataagttatccatgttttgcacaaaaataatcaaaactccgcaatttaaaatctaaaatctaaaatttaaaatcataaaccgcaaatcataaatctaaaatttgtacgcaacctctttaaaaccatacacccgttctgtccctctctcgtctaccaatatcagttgtccgaactcgttcactccccgaaccgacgcctggaacattccctcttcatcctcccaatcatacaccccctcccgacgatacaacaccttcaaaaaatcacgttccagcccctcgtaatcccgtatcatttcatatcgctttccaatacaatccagcaactcctccaacgcctgctccacgggaatctcctccccgatcaactgaaacaaggaaaccggattcggtgcatcggacaagaaacgttcttgattaatattcaccccgataccgcacaaagaacctcccacgtaacgccccatgatggaatgttcgatcaatatcccggaaatcttccgatcccccacgtaaatatcattcggccacttcacggaacactcgttcacgtaacgggaaataaaatcacaagcccccaaagcaatcaccatagacaccgcaaactgttgtcccgccggtaactccctcggcttaaacaccaccgtcatggatatatttttccccgactcgctctcccaatgattcccgacttgtccccgaccttgtgtctgcctatacgtcaaaatcaccatcttatcttccaactcgctccaccccacacgttctgcttccgtgttcgtggaccccagctcctcgtactctctcacccgaaaaccactaacttgatattcttgtatcatacttaccacatttgttttttcaagccaaaagtaactctttccacccaattgcacaactttgtgcaacacacatctgtgcaatttatattcttcgcccgaacacccctatcaataacgaaaggggccgttgatcgtgcccctttctcgtataacatcaccttatctttcctcgttctttccaacgttgttgtaaccaagccacgatcaccgcactcaccacccctccaaccagactcatggcgtgcgtgaacagcatatcccaccagttgacatacatcaaaccgagatggatactaaacgtcgagcatgaacccaacatgaatacaatcaacttattcatagcctattccatgcttattgccaatgttctcgaagttctccttcccgcaaccgtcgtggcaaaagcatacaccaacacttcggcagccgtccagtcttccggtaacgcaaaactcgtcactccgttctctcctcgctctctcaacttcaccatttctacctcgttcaatgccttctcgtacacaactgcatacacctggtcatccctattcgcccaagacgacgcttcctgactttcctgcgtgaaagtaatcgatttatccgcaagagtcgccgtcactttaggcgtgcgtaacttcaaatccgaagaacacgccaacttggaataatccaccgtcgccacgaaaccctcgtcaaccgtcaccgcctgcaagttcgccgatacgaatccgttatacccggtctgtccggcggccattgccggaaaaccgatcttcgctatcggggcaaacgcctgagccagctcaatcgttgctttcatcttggctcgctgcacccgctgcttatccgtccggggattcgtcacgtgtttggctttatgccttacgatacgaagcttccgacacacgcacatggtaaggttatcaacagattgagacatcgcacccaacaaaacagaatcatgaattgccataattacaaatttttaaataaaacaataagattaactgtaaggtgggactaccttgagttccctgaatgcatcctgcaagagaatggttgaaacgatgtcgctgattttaaaacatcgtgtagatttttgatgtcacaaatatataaccaaaaatatccgatttccaaatattttcgcaattatttttcaaatatttttaacccctatctcaattcccctcaatattcaagcaaacaagtccaaaagaacattataaatacaactttttcggaatcaattccaagaatttcttaacttttttggaatacgatccaaaaattcttcaactttttcggaatcactctcaaatttcatcgtatttataaataaaaaagccccggaatttccgaggcccaatccttgtataacaaaatttcaaatcacttcaccgccaagtgtaatttgaaatactttctcataaacaacacgtaccctattcccaatacggcaacacttccacccaaacaggcataatgcatccccggtatagccagataaaccgccacgatcacggcttgtaccaccatatacaacaaagataccaccacgtgaggaaacttcaactcgttcgccattaactggtacatatgcttccgatggggtaacccgatattctcgtgtaacatcaaccgatgcacgatcgtcagcacactatccaccccgtaaaccgccaaaaatataatataactccaatcccccgtctccagaatcaaccgccccaataaaaacaaaatcacgaaagcaatactcaccgcccccacatccccggcaaaacacttcgccttccgcctgaaattaaacccatcaaacaccaacaccgccaccatcatcgtgtaaatcatcttctcgtcaacaaaaggaacaacccattcgttcacgtacgccaatcctcccaacaccaccagactataccctcccgtgatcccgttaatgccatccatgaaattgtaggcattaataatccccgtgcagacaaccaaagccaccaccacataccaccaaggcaacgacaccattccccattggtaaaacatcaataacatcgccacaaaatgtaccaccaacctcacccgctgcgtcatggaccgcacatcatccacaaaactcacccctgcaatcaacgtcaatcccagcataaaccacggaaaactaaacccactagcaacaaaataaaccaaggcccccacgtaaaacacaacccctcctccccgcaacgtgattcttgtgtgagaactcctctcgttcggcttatcaataatattaaaatgatctgccacccgaaaatagagcaactccacccccagtagcaccacaaacactactaaataatacaacatggaaactaaaagttaagaactaaaagataaaagtatcccgaaattgaatgatcctacaattcaacaatcagctaatcgaaaatcgctcaatttaaaatctaaaatttacaattagtaaacgatcttatcgtcttcctcaacccttctatcgccgtcaccggcatccgttcaatacccaaagctcgcttgatcttctcattcgagaccacgtaattttccgtcagtttcttcaaccgttccaaattcaacggcaaatgcaacagcgtccccaaccccgcacactccttcatcaaccccttgttcatccgccaaatatgcgccttcctccccatcacctcacacatctcccggatcaattcgttcgtcgacaatgcctcatcatccgccatgtgatatatccccgacgggacatccttttcgatcaaaccgttcaccacgtaacaaagattatccaccgacgtgaacgacctcctgttctcgaaatcccccaacggccacggtaaccccttcttcactacactatacagcaaattcaagttccccttattccccggcccatgaatcatgcaaggccgcaaaatatacacctgctttccgtgcattttcaattctccattttcaattttcaattgttcaaggatgtaattctctgccgcaatcttgctctccccgtaaggccccttcggtgtcgggatcacctcctccgtcaacttatcccccaccacaaaatctgcaaccgccttcaccgaactgaaaaaaataaatttctttgccgaagatttcagaaagtaatcaaaaactttccgggtcaaccccgtgtttatcgtgaaataagtttccgccacggcttcattttttgtatcatgcgccttccccgccaaatgcacgatcgcatctattcctaccactccctccaactcatcccacgaataagtctttgtcaccccctctttttcaggagaaacaatatccaacccataaagaacatgcctctcttttaaggacaacacaagattagaacccacgaaaccatggatacctgtaacaagaatattcatttaattcaccaattaacaatttactctaccactagccctgccattccttaatcttttgttcctcttcttttttacatataagcaacagattgttatcagcagctacgatgtaatcgtctaacccttgaacgatcatccttttcgctttaggagcgtaaacaacacaatttttacatgatatcaagttcacaccatttcccacaattgcattaccgaaattatcccatttcaaatgattgtataaacttccccacgttcccaagtcactccaaccaaaactagccggaaaaacataagttattatacttttctccatgattgcataatcaattgatatattctcacaagtagggaacaccctatcaataacttgttgttcctctcttgaataatacacatcatctaaagccgcaaattttgccgcaagctctggagtataccgctcaaactccgaaataatagtatttacattccaaacaaaaatcccggcgttccaaaaataacgaccatctgccacatactttctcgctacatccatactcggtttctccttgaaagcttccactttccttattccgacttttctccccaacactccctttatataaccgtagccagtttctggtctcgtgggttcaattcccaaggttacaatagtagtggaagagaccgtaaaggctaaactttcgataatcacttgtttaaatttttctatatctaagacaatatggtctgcgggtgaaaacaccaagtttgcattaggatattttttcttaattttatacgtcacgtaagcaatacacggagccgtatttttcatacaaggttccaataacacctgttctacaggaattccatcaagttgagctataacaatattcctgtaatttttagaagtcacgacccacacattttcccgtgaaattaaactggcaaacctttctaccgtaagttgaagtaaacttttacccacgcccaacacgtcgacgaattgttttggcatttccggtgtactcatcggccaaaaacgactaccaacgccacctgccatgattatcaagtgattattactcatgcttattaatttttaccctccaaacaaatatttatgataacaatctattgtagagattaacatacttctctccttgtatctcttctctgaagatagattcataacgtacgaaagcattcttccccatattctcacacaaaatattgtctaaaaataatatattcatcgccttttgtaattctacattatttcgaggaggaacgacaaatcctgtttcattatgcaaattcacataacttgtacctgtacctaattcagttgttatcattgcttttgaaaaataactagcctccaataaaacctgaccaaaagcctcagctggagaaatagatggtaatacgaagaacctacattttctcaaaacataacataattcactatctgacaaaaaacctaacatatacacatttgttaaattttcttctcgaattcttttttctattgtctctttcaatggtcccttgccaactatcacaatatttcctttcacattcttagcagcatctaataagaagtcaagacctttataccatcttagcactcctgtaaataaagcgtattgtcccaatttttcaattttacttctaaaacttacatctacatccgaaatagactcaaaacgagttttatccaaccagagatttattaccttagttttttgcttataacgctttaaaataggtgttgagtttaacaaattcgtacttgttggtacaataacatttacctttttcattaaaatccgaataaatggttcataacaaactctcaaaaacaagcgattgcgtatttcacaatggaatgtaacaacaataggtttttttactcgagtaaatagcgtaagtaattctccataaggataagggaaatgtaaatgcaatatatctgtttccttaactattcgagcaaaatctttagccatatcaatacttactggcatcgaagaactacctaaactaaataaataggatttacattttattccttccaattcattttcacgaggaaccttcgaaacagaaacaactctaacttcaaatcctttagatattgaatattttccaatttgacggatagcttcttctaaaccgccatgtgtatcaggaaaataagttttgaaaacatgcgttattataggcatatagatacatttatcattaaaatttaaaacacaaattagaacccgatttaaagtagattctaaatatctagaatcagattcccccttgcagtggatatatccttcatacgtgtaaattagttagaaaatcctaaaattagcagtattaacaggctattatgctatgagtttttatcgcaattgtatgccgctctgtctgtcttcattcatggaacacaggataggtcttcttgttccattcaataggacatcctcacatccttttaagatacctacatccggtcgagctattcacctaacgcctttaaaatgtgtctacgtatctcacaaagatgaatctatttcttaacccatgctgtgacgtttcaaattgaacggtatgaaactcctaaagaagatttgtcttcaggtataccagtataaaaaatattttgttctgaatcaaaagcagaatagttaataaacataattttttattactacacctattcatttttcttgatttccaatacacgataatatttaatcttacataaacgggggaatataataaatgcaaataatgcatatgttccagcccccgcaatcatattaagattgagaatgaacaataatattatatacaaaaaaataactaaaggcaaataaaatatattcccttttatatacactttactccatatatatttgcaataaacaccaaaaccaaacataaaaaaaatacccaaccatccaaaatcaagataccaattaaaaaaaaaagttgaccaaatgccgggacgagcattatactttacattatcaacatgttctagaccaaacaatttttcaaataaacgataaaagaccccaaaagttgattttccatacaaatgaatattttcagcatcaatatgtttttttacaattggaaactcaaataatgcatgagtaaaatactgacttacatgcaaataggcaaataaagttgtatagcaacatttttcttcattagcttgcataaaattcacaaaattctgatttgcaggaactttattagaatatccttcaaattctgacatcactgatgccctatcaaatttcatatcatctaatcgctttaaaaaaagagaacctattacatttaaaacaatcaatccaacaaatgcacttattacaactaaccttaatgaaaactttctcctttttgaataaaggaatacaatcatcccatacaataaaggaatcattagtgcattcctagaaccagtcaacagagttataagagcagtactcaacattaaaatcaaagataaaactttaattttttttgtatgtagatttctaaaaatcatgtctagagtaaaaggtataaaagcaaaatatatcaaaaatgcagaacatattgacaataaattcccacttccttctattgctgaatcaaaattttctaacgtgctataaaaaaaagacattcctcttacaaacaacaaatcaatatatctaaatccgactcctaatattccaagaaaagttgaaattcgataaatttttaaaatacgatctttttctattatgacatttaaaaccttgtctcttattctatttctacgaattaatttagtacctaataaaaacgaagacagagcaagtataagataagccagcgaagcaacatctaatgtattaataatatgaataggagcaattattaataataaaaggaaaaagaaaattgcagtaatcactgctctttctggatttatacaatataaaaaactggtattaatctctaaattatacataactaccaactagtaaactatcttaataaaaacaaactcatacttgtaacactttctcaaaagcaatcttacactgttcaagattattttcgtccatatttatttcataaggcatacctgcaaaactcgtacgagtaattctattaaggaatgcaactttttgcttgtcatcaatacacggaaattcatttttccgaaccatatcaatgcacaactgcaaatcattaaatttttctaaaaaaatggcatttgcaacatcattataaagcgtcctcactaatgtaacgactggcttattagcccatatacattccatggtaatagttcctgtaacagttataaccatatccactttcgggataatttcattcatacgtacattatgatgaacaacaataattctttcttcttgttgaatataatctattaattccgaagacaattcatatttcgattttgggttaggtttcacaaccaaatatatccgttcatctgtctcttgaatgatattttttataacctgtaattgattattacattttcgtccccaaacatctaaattcgcttctggttgcatttgcaatggatatagtattttaaatactgataactctatttttttaaattgattatttgctaattcgttccatcgcaaaatatttcgttttttacgtttttccaaaaaatatttcacaatcggagaaggtgtatcataacgttcaccgccataatatgctaaggtcaattttattaattcttttaaacgagcataacgtgttgaaaattttacttttttctttttcatgtagtcaggtactattgctcgtcttacaatattattgactatttccattgcattcatttctgataaaacctcttcactaccaccataaggttctagtgtatcatacttataaaaagaaaaacgcccaaccggatatctacaagaacttggatgcaaatacaaaatattatcacctttacaaatttctatcgtcaaaagttcatgaaaagctgtactctcaccaaacactatatctggcttgattttaattatataagcttttatttgctcataataatattcataatgattcgaagaagttaactcaaaataatttatcgcacgatccgaacacttaattttttcaaattcaatacgagaattaatttcgtttaaattctttctaacaggatacggaataacataaacattctttcttttgggtacaaaagcatgattctctacaataaaataaatttcatgcccatctttttccaaacgattagccatttcttcccaaaaataagtcctatatctattttcaacaaacagaattcgtcttcctattgccatttcaaaatgtaaaataataaattatagttactacaaaagtgatatatgtatatatacgacatctcgtaaataatatattcctactttttaatatctgtaattgagataaatatgcgacacaaaacattaagacatttaagaatgtaaacaattctaatgtcatttgctgtttgaataataacaataacaaagggaaagttactacttgtcctcccaatacaatattcattttatatattacgttctctctggaaataatcccttcatttaaagcaattccgatccaaataggcatcatcacactcaataaaatataaagttttgaagatgaaaatatttgcctcccatctaacagataattactaaaaaatggataaatgcagtaaatcaacaaacaagctaataatacaactatcattaggaatgaataatatatatctaaattcttgcttgaagataaatataatttcttaaaaaatgcaatataacaaaactgataaataattacagcaatacctacatatctaaaatacaaactataaatacctacttgttcatatcccatcaaatacttaatataaatacgagaacttgaagttaaccaaaatataatgattcccgataatattaatgatgaactatatttcaatatatcaaaacactcttctttgcgataaaaacacaccttatttttactatatttagaacaaaacaagaatatcaatcctcctaaataaatttccattcctattcttaaagccaacaaataggggaaatgcataatataacaaaaaaggattaccaaagaaagtaaaaaataatatcctccatcatatataacccccaagtatccttcattattagactttaggattgaactatatattcgttgtaatgaaaaaattgctgaaaataaatatacaacataaattgttgaagaaataacaccacaataaaaaagtatcaaaaaagagaaagaaataaccaaaagaaaataaccatataagaaaaaataatattccttctgtaactcttgtcgtttcaaaataaaatatgggtaagcacctccaagtcctaatgataaaaaaacggcacaaacacttcccgttgaatatgcgaattcgatctctccatattctcctaaagaaacaaatttcacaaaaacgataggagctataaaagcaattcctttggataatccaaaaaaaaatatatttttcgacaagtattttaatttacttttcataaatatactcgtcagttttattcaatttttttattgcatcatcgggttcaaattgtatatgacgcaatgcctggtttacatacaatccttcttccttaagatctttagaaacaattactccagctccaattgtacaattactacaaatattaacccctgcacaaataatacttcgacttcctacatacacgttttctcctattataaccctaccgtcaacacgccaacgttgtccataattatttttactatgataaaaaccatgagtccaaacttgtgtaccctttcccgcaagaatcgcataacgtcctaaaaaaaaatcagatgtcaaatctatcgtatgagcaacacctataatcccaaaatcatctaaccgacaacaagttttcttaccttttgtagcattcgtaatataattaaactgatttataacactctcttgacctaatttcaaacaaatatttcctttgattacattaaattttttaatgaaagctcctaatcccatgtgtaactccgtcgtagaaataaaattaccatgccctatacgagcattatctgcaagttcaatcttgctcacacaaatccaagaaaaaccaatccgacatcctttccccattctatatcccaaaagtttcagaaaaaacacagcgacaaacgatggactgagaaaaattattaaagcacataatctttttttcatatacgccgtttcaatatatttttcttataataaatacacaaagcccccagataatttgcatatatcaaaaaataggtatctttaggttgccatttactctgtttagctattatttgacgagctttgtattcatgtccaaaacgtttacaaaaagaatccggagataaaagatcattttttattatttctataattttattccccaatgctccatttaacattaaatgtcctgaaacagaaacagcttttgcacgtaccattatatcccaaggtaactccgcttcaaatgctttacgcaagatatacttatttactttaattcgcttattcttgaatccatccaacccatcgatctctttgtttgcataattccaaggaatcgtagactcaaataaattcaactcatcttgataaaatggcatcatcataaatccattcactaaacgccccatatcaaccatataacgaatatcgtccgtatactgttcctgccatttcaatttaacgatacgattaaagatttccctttctgacatcccacttttcaaatctaactgataataatcagctattgaattaaaattagtcaaatcatatttccaagatttatatttcaacggatctacttgaaattttcttcgcaataaaaataatttgtaatctaatgcagataataacaagtgcgaatatttaattctacgattcggtgagttataaaatttaaatatataagcaaaattttcatataaagatataatccatttttttaaacacgaatctgagattttacctttagatatatttgaaataacccacttatcaataccattaacagatggcgtatgtaatcttgtatcttgtcccgcaaaataatgctcattcccatttattgttcctctcatacggtaaatccaatttccaataatcggattatttacactcattatatcatcttcataattttcaattaatttgcaatcattcggactggtttcaactatctctaatttatatcccaaatatttagcaactttatttgcatacaaagtttcatcttgtgttgtaccttttatcttaaaagaaattgtatttacattatttggacaaatattatgcaaagaagctaacattgcacacgaatcaattcctcccgataaataaacaatattattatttcctattaattcttcgtgagctacaattattttatcccttaacaatgaaatattttcttcctctgaaaaattattttctgtaaaagaaataggcaaatcactcctcgtttttgaatatgttccaccagtaatattaaacttcaacaaagttccaatttctaattcatgaacatcttcatatattgtatatccatcaggaataaattgttgatataatagaaaatctgtatacaattttgataaatctgttgacatcattgaagctacataatgcatattagtagaaatatacaacgtagaactagtttcatcataaccatagtaccctgtctttattccagaaatatctcttaataaaaaaacttctttcttttcaatatcaaataacgctataaagtatcctccggcaaaaatttttttagcattttcatgattaaaatctaccactaattcaccatactttttttcaacatctttcaaattattacgttcaaatccatatgctaaaagatatttcccatcaatctctcttttaatttcatcacacttaacatgacttattttaagatcattaagatcaaaaattatatccataatttctacaattataaaccatctaatcaatcacttcagcaaataatcttgacccttttttcaaatctttatttatctttctacctaaaatatcaggcaaatacttcgggtgcataccaaatcctggtcttacggatcgaatatttttttcagtaatcacatctccaactttcatgtcttctgctacataaagagaccgacaaaattctcgccctgatttcattttttcagtcaactcgtaagaaacttctccaacagcacattctgccacacgaatatcttttaccatctgtgtgaattccttttcatccattgaaaatgatgcatccggtcccccgattcgtttatcaatgatgaagtgtttctctatcatcgtcgctcccatcgtcaccgccaccaacggaacaacacttccaagcgtgtgatcagacaatccggatttcacttgaaaacgctctgacaggtcttttatcatgcaaagattagcctcttctacaggagcgggataagaagatgtacacttcaataacgtaatgtcattatttcccacggaacgacatgtatcaaccgctaatcgaatatcactttctgtcgcaattcccgtggatataatgatcggtttcattttacttgcagcgtattcaattaacggaatatctgttatttcaaatgatgcgattttgtatataggattatttaatgattctaagaaatccaccgcaactttatcaaacggggaagaaaaacaaattaagccctcttccatggctatttgaaataacccctcatgccattcccaaggagtatacgcttctttatacaaatcatacaaatattttccatcccacaacgtaccctgtttaattttaaaatcatccgttttacaatccaatgttatcgtgtctgccgtgtacgtttgtaatttcacggcgtcagcaccggcacgtttagctgccttgatggttgcaatggcagttgccttatctccattatgattcgcagacaattccgctacaataaacactttattcataataattttcttgtttgttcctcaccttttcaatttcaatctcgctgaaatatttagggttaaaacatcctactagcacccgatcctcgttacgcccgtctacctgataaaaaccttttaaccgaccttctattaaccatcctgcacgtaaataagcctttattgatgcaacattggactcatacattccaccatataatttccgtatatcataaacagaaaaagctaattgatttcctagttttatggcttctgcagccaaaccttttcccaaaaacgaataatctcctattaaggttgctaaatcagatgttcggtgtactttatttatcggccccaactttaatgtaccgattaataactctcgctgtatatcataaatcccgtaagtaaatgtattcccctcttttttaccctgctcaatagccgctataagggaatccctagttattaccttttgggaattcgtgtaatatttcatcaattgtttatccgagaaccaagccatcacgctatccgttaattcatctatctcgatctctttaatatacaagtgttctcctgttatttttatcatattagattacaatttttcaaataattgaatgtaacgttcttttataccatacattatcgaacgatcaaacggagaaataaaatctagcttttccggcatactaaaagatgagctaagaagatttcccaaaccgtacacgtaatgattacctgtcaagtaatgataaaattctttttgattatcaacataataacctgcatatatagtcattcccatcaccaatgcttctatacataccgtactcgaagaaaatattccaacttttgattgttgaaacaaatctacaatattgcttgccgataggtttcgataaaatttaactccaggaaactccgtttccacaatctcacttgcagtccctaaaatcacgactaattttttgtcaccaatcctaccgaagagatgttcaagtattaatctatttaaattaaacgggtctgctccccccatgcaaacaatgatattatcctgcttgttagaaattgcctcctgcttgatttttaaaaaaggttctctaagtaaagcccattttaaacctagacaatatcgtgtccatgtttctcccgaaaatttatttctatttaccatcccatgatttatcacaacatcagccacataatgtttatcatggacatcatcaatacaaactaaacaacatccttttcccttgattctttgctgataggccgtcgtgtaaaaataattatcaagaactacaatctcgtctcccgtcaatagttctaaaaaatcattgaagaacgtgtctgtttccaatgatacatgtttacacacctttctcatctcctctatttgataaggagtaggacagacagtgtaaaacgtacactcgaaatcgtctttcaacatatcagcaagtgccaatgttcgagtaaaatgcccataaccaatatccacacctgcatccgctctaaaatagatttttctattcattcgaactgattatcaaactatacttcatttctgcgagttgccaatcagttggagtatccaaatcttgaacttccaattctgaaaggatcaacccggcagtattctgtccccaaaatgaaccgttggcgataaatgattttacatttgaaatataaaactgtccagcatcatgataaatcacttctaaatcttgactacgagtcataagatattctggatgtaccatgaaaatttttccttccttcacatataaacctcgttgaactggatacgagaatgccacacaggtaaaaatagaatcaatatcgtctttcaacatggagaaagcctctcggattcgttttgcagttacaaagggtgccgtggcatagatacaacaaacagtatcaaaggtttgatcacgtccatatttcccaagaacttctagaatcacgtcggttgttgtcgcataatcatttgatgttttatcaccccgcatgaaaggaacgcttgccccgtattgtctcgcaatacttgcaatttcatcgtcatcagtggaaaccatcacttcatcaaacaagccggattgtaaagctgcttctatagagtaagctataatcggtttccccataaatggtttaatattctttcgaggtattcgcttactcccaccccgggctggaattattgctagatttttcatctctaaacaaattctaaaactttctggataacgaactcctgctcctcgtctgtcagcgtcgggtacatcggtaaactcaaacaatgtttataatattcctctgccacgggacaatcccccagcctacttcccaattctcggtaatagggttgcaaatgaactggaacgtaatgcacttgtgcgtagattttattttcccgtaaataattatacaatcccaatctatctttcacttgaataacgtacaagtgaaaagcatgtaacatatcccctgtgcgatacggcatttttatcccagcgatatttctgaaagcctcgtcgtaacgattagctattatctgtcgacgttccaatcctgtatcagcccttttcaattgagaaataccaagagcggcttggaaatcagtcaaacgataattgtaacctaattcctgcatttcataataccaacctccatgattctcatacaaatataatggattccttgtaataccatgtgtacgcaataaaatcaatttttcgtataatattttatcattagtcgttaccattcccccttcacccgttgcaatatgcttcaccggatgaaaagaaaaaacggcaacatcggaaaaaacaccattcccacaacgttgttttacccccttactatccacaaaatatcctcctggagcatgacaggcatcttcaagtatccaaagtccatactcatcagcaattttgcgaacttcttccatatcatgcgggtaaccggcaaaatccacagggacaagacctttaaaagttccttttggataactccccaacaacaatttcaatttccgaatatccatcaagtaagtatcactatctatatcacaaaatacaacttcacccccacaatagcggatacaattagcactagctgcaaacgtcatcggagtaacaatcaccttatctcccggtttgacccccaaagttcttgaggctaaatgcagtcctaccgtggcattattcacggcgacagcatatttagccccgacatacccggcaaaagttcgttcaaattctgcaatcttaggtccctgagtcaaataatctgatttgagagtctcaacgacagcctctatatcttcttctgtgatattctggcgtccataaggtatagctttatctatcatctcacctcgaagttaggatcaacaaactttttgatattctcacgcatactctctaccgtttcccactcgatattattgtccgagctataatggaaaccctccggaaccagaacagcgtgatgatgtcggatatattcttcacgggaatgattaaatgaaacagagggcataataacataatatttgcccaaatctatcgtgtctaaagcatccgttactgttatcatctcttcatgcagtttctctccagggcgaacaccgacctcaacttgcggtaaatgaggggctatcgctgttgctacatctttaatatgataagacgggattttaggaataaatatttcacctcctaaatggtgtccgatagcgtacatgaccaaatcaactcccgcttccaatgaaatattaaaacgagtcatccgcatatccgtaattggtagctctttcgccccgtgatttcgcttgttaataaaaaacggtatcaccgatcccctagaccccatcacgttcccatagcgaaccacagaaaatcgaatatccctattccctttcatattattcgctgcaacaaacaatttatccgatgtcaacttagtcgctccgtacaagtttatcggggcacaagccttatcagtagacaaggcgactacgtgtttcacgcctgttgccaacgctgcattgatcacgttttgagctccctgcacgtttgtctttatacattcttccggattatattctgctgtatcaacctgtttgattgcagccgcatgaataataacatctataccttcacaagcccgctttaaacgttctccatcacggacatctcctataaaaaaacgtaactgaggataccgatcatatggatatttttgtttcaactcgaattgtttcaactcgtctcgagaataaataacaattttttgaacttgaggatagtctcgtaaaatggtctctatgaatttttttccaaaagaacctgttcctcctgttattaatactgatttattattcaacataacatcatcaattatttcttttattttttgtaattttcttgttaatatttctagatatgccaacttaagatgaaaaatatcttgttactatatctaaatttcttcataactttttacagatagaatttcaaaatacaatacaacatcttcgaatttgtctgaattttcacgagaaaatagttcttcaaacaattccattcgtgaatctattttttcttctatatctgttacattattatagaattctattgccctaactattcgccatagagctaagactttaaaattttgttcatttccccactcttttataatacttttagccaactccacacactcctcctcccccgtaaaatagtaataactacacaacaacctacacatctccggagttcgacaaggtaatacaatctcatctctaccctccgggtatataatcccgtaagccgcattcaacgctatatctaaaaaatccatatcggaataagtcaaataagcctccatcaagtcggcaatatgtccaactcgatcttccaatgtcacagacggatcttgtatcaaatccgctaactctcccgctatttctcgaatccgttcatggatgtcccattggctaccatacacgtcttccaaccacgggcttactcgcacaatggaataaaccgagatatacccatgcaataagccggacaatgcggatgggggaaaatccccgatcgggatggccgatactttcttgtacaaatcattaagattcatcgccactatctctattttattttttctaggaatgaacccggaatgtaagaggttgccacagaaacgaccccttccaggcgtactattacgcgtttatgcccctttatgcggagcaattctccttcaagtccaattagcggacctttgattacccttacccgatcgcctcgcttcaactcttcattgatcacctccacggtggaatctgaaaagtcaagcaaaaacataaaatcacgcatttgcttatcgggaactatcagcaaatgacgagtttctaagtctttcaggtaaacgacgtttaaaccatgttcattaagtaacgagaaagctgttgtttgatccgtccgaataaaaatcaaatgagggatcaagattacccgcacgtttttcttcccgaaagaagtctcacgcacctcatcacgcatggctagatagttttctatcgccaagtgatctaatcgctttttaatcgttaattcctgattgattttagtgtacgccgcataccaatgcatttttctcgtaccctctgacatattttatagcttgtgaaatctggaaattctcgtgattggttaataaaaattcaatatatcacgattaatatagatacgcttcgcgcactaacctgtagaatcaggcttaacgttttatgcccatgtgcctcacgcaccatccttaaacaggtacagcacgtaaaaactgtctttgggaagaattacattcatccccatgcaaataatctgattatactgattctagatattgatctaaaaaaacgatcgatt

SEQ ID NO: 10754 - DNA, 8492 bp, Unknown
  gut microbiota DNA sequence
gtatcattatccattatcaaatgaagaaaaaatgaatagttaaggtaatcaccagataatcatagagcaaaaacctattaacttcggtgcaaagacgttcgtgaacgtctttgaaacgtctttgattcgaagttgatacgtctttaatccctaagtacatcgaatacgcaatgggtaaacaccgtgtcttgccctgtattatcttgaaaaagtttacagtaaatttaggataaacttgtgtcagaattgccaaaatgtatttctctttttaggtgtaaggttataatgcattataggaagtaaatgtaagatatgctatatcggataattttgattgttaatttttgaggtgatatttgttttttgtaaaaatgtttatatatttgtgatgcgtaacatatcacgaaggtggggaatcctgccacagtgtagcaggcattttttttgcctgttaactccatacggcggttccgtacccccgtgtggagtgttaatgcacccacagccttcgtggtgttacgcaacgggacaggcggaaccgtttcttttcgccctaatcttgataccaaaagacttatgagggtaaatcgtgattatgtttttgtgaggagaattgctgatccggcttccatgtttctttaatttttagtgtttacttgtaacggggaaggctaggagaacatccggatttgggaatgttttgatctttatattttttataggttttgtgaaatctttgtcttacaggataaagtgtgagatcgtcatgtcaaattgtaacgaaatgtggatagtgaaataagaagcagaaaatgaaatagggagtgtattctatgcctgagaaacgttgaatatcacccccttgtgtaaatcaattttatcaattaattaacaatcaaagttatgaaaaaaacttatgacaggaaagtttttaagcgaaagttacggtctcgaaagatggcggtaatcgtggttatccgattatttatggttttgttgctgggattcccggtgttggtaaatgccgggacgagggattcgacacggttggaaggtaggcaggtggaggggaaggtgacggatgagaagaaggttcctttgccgggagtcacggtgcggtgggagggaacaacggtggggacggccacggatgtggaggggagattcaaggtgttgatgcctgcggattcggcaacattggtggtttcttttatcgggatgaagaccgagagggtgaagattctgaagttgaaggccggagaggtgcgagaggagcttttcatcgtgttgcgggatgaggacgtgaagctggaagacgtggtagtgacgggaatctttacccgtaagaaggagagtttcacggggtcggcttccacgtattcggcggcggagttgaagacgatggggacgcagaatatcttgcaaagtctgaagacgttggacccggcttttgctattatcgaggataaccagtttggctcggacccgaataggttgccgaacatggagattcggggaaagtcgagtatgttggggttgagggatgaattggatgccgacccgaatcagccgctttttatcttggacggttttgaatcgacattggcggcgattaatgatttggatattaaccgggtggcgtcgatcacgattttgaaggatgcggcttcgactgccatttacggatcgaaggcggcaaacggggtgatcgtggtggagaccgtgaagccggaggcggggaaattgcaggtgagttacacgggaaacatgaatctctcgatgcctgatttgtcgagttataacctgatgaacgcgagggagaagttggagttcgaacggttggcggggaggtacgagcctgtgaattggtcgacgacgaacgaggtggtgttgaataagttgtataacgaaaagttgaaagtgatagagagcggggtagacacgtattggttggcagaacctttgcgggtgggggtgaaccagaagcattcgctgtacgtgcaaggtggcgaggggaatttcctgttcggtctgggagcgggatataacgggatttccggggtgatggagaagtcggagcgggacgtgatcagcggtaatattgatttgatttaccggatgccgaaattccagttttcgaataagttctcgttgacatcgactcatttgaagaacccgatcgtggcttttagtgcgtatgcggcggcgaatccttattataaaaagtataacgaggaggggacggttgacaaatggttggaatataatgattacttcaaggcttcgaatccgctatggaacgcaagccagaatagccgggacgaggggaagaatctcttgttgagtaattatttcatggcggagtatttccccacgacggagtggcgggtacgtgcccggttgggattgacttacgggaatgatgacaccgagaagttttattcccggaatgatactcgttacgagaacgtggagaccacgaaaaagggtgagttttattcgaataatgtccggacgaatcaggtggaggcggagttaagtgttacttacgcgaagatgttgggaaggcacaggattaatttggttgccgggggaaatatatccagcaataaatcgctcacgcaagggtattcggcggtgggattcccggacggggatttttcttatccttctttctccaacgggtacccggagtacggcacgcccgcttattacgagtcggtgtcccgctcggtgaacgggtattttaacgcggggtatgcttttgatgaccgctacctgatggattttagcctgcgcacgagtggatcgtcggttttcggtacttcccggaagtataataccacgtggtcggtggggctgggatggaacctgcacaaagagaagtttatcatggatcacgtggcttggattaacgtgttgaagttgcgggcttctatcggaaatccgggaaaccagagttttgattcggcacagtcgttattgacttacgcgttccagttcggttcgatgaactacttcgggttgggggccgagttgtcacaggttggtaatcccgatctggagtggcagatcacggtggacaagaatatcgggttggacgtgacgttgtttaacaagcgtttttccctgacggcggattattattacaaggtgaccgatccgttgttgatcaaggtaagtaccccgttgtcttccggcacggcgacttacatgacgaatgccggggaacaggtgtcgcaaggtttcacggcatcggtgtcatattatgttttccagaatttcgagaagcgtttttcatggatggtacgggcgaacgtgcggacacagaagaaccggatagataaaatcggtaataagctctcgacgttgaacgccaacgggaaaggggagaataccgtgaggtattacgacggggcagacccggatgatatctgggcggtgaagtcggcggggattgatccctcgaacgggaaggagttgttttacgcgaaggatggaagttacacgtacgatttttcttatgatgacgaggtggtttgcgggaatacccgtcccgacgtggagggggtgatcggttcgtcgttgaactggaaaggtttttcggtgagcctgaatttccgctaccaaatgggggccgacgtgtttaacgaggctctctataacaaggtggaaaatatctcgaaaaatgatttgaacaagaatcaagatcggagggctttgtatgagcgttggcagaaagtgggggatatcgtgcatttcaaggatattgccagcgcggagactaccccgatgtcttcccgtttcgtgcaggaagagaacgtgttgaccttggagtcgatttacgtgggatacgagttctatgacgggtggatcaaaaagttagggttgagtagtttaaagattcaggcttctatgcgtgacgtgttccgggcatcgacaatccggtcggagagaggtatagcgtatccttttgcccgaagtatggaagcggggttatcgtttaatttttaatgattgatgaatatgagattacgaaatatgatttggatcggcttggtgttggcgtgtggagccgggtgttcggattttctggacgtgcaacccaaggataaacagtcggaaaagcaattattctcgacgagaggcgggttttacatggcggtaaacggtatttacaataaggtggcttccacggctctttacgggaagaatctttcttacgagctggtggacgttatttcgaaacggtactcgcctttacaagctaacacgtacttgacggcattaagttctttcgactatgcggataactcggtacagacgggattgtcgaacacgtggacggcggcttataacacgatattgaattgtaacgtggtgttggataatcttgaagagtgtgacggaattctgttgacacccgaataccggatgttgaaaggggagatgctggcactccgtgctttcttgcattttgatatgttgcggttgttcgggccggtttacaagaatcacccggaagcggcggcgattccttacaacgagtcggcgagggtgtcggccttgcccttgctgactgccgattcggtgatgcacgagaagattctgcgggatttggacgagtcggaaagtttgttggcggatagtgaccccgtgatcgaggggggaccgatggcttcactggagaatgatcaggatgtttacctgcgttatcggcagttgcggatgaattattatgccgtgttggcgttgaaggctagggtgtacttgtacgcgggagagcaggcgaaggcattggccgcagctcgcaagctactgacggatgcgagagtggacgaatatttcccggctgtcgatccgaataaacttctggctaatcaggataacccggatcgggtgttctcgacggaagtactggcgggaatttacgtgaaggatcgggctgatattcattccaattatttcagttcggaacaggcgggtaataattacctgcatccccggaagaatttcgtgaatatgagtcttttcgcaggggagacacaggattaccggttccaagcgtggtggcgcacggcttccaacgagagtgaaggcgggtatgactttatcaagtacgaggagattgcccagcccgcggagaagggggaaaccgagtatttctatgccgttttcatgtcgttgatccggttgagcgaggtgtattatatcgcggccgagagtgaacccgtgctggcggataaatatgcgtggttgaataaaatacgggaacgcaggggattaggtgttttaaccgtgatctcggaagatgattttatgaagcgcttgcgtacggaatatttgcgtgaatttatgggagaaggacaaattttcttcatgtataaacggttgtatgcagctattcccagtgatgagaatgggaatgatgccaatgcttatgaacctagggaagaacgttacgtgttgccgttaccttccggggaaatcgctaatcgttaaatagtaaggttatgaaatggaaagatattttatttgtactgggactaagtgctgttctgggggcttgtgaaaagaaggatatcgaggtttttaccacggatgacgcagggatttattttcaattgataaaggggtattacgggacaaccacggaaatttacacggattcacttgattattcatttgcatcacttccggcctcgatgaaagatgtgattcttcccgctaccgtccggacgatggggaaggtggcggattatgatcgtccttttaaagtggtcgtggataaagagggaacgactgccatagagggggtgcattacgagattgatttggactcggtggttgtgcccgcgggaaaaagttcggcgaatgtcaatgtgcgtttttttaggacggatgatttgatggagaagtcggtgcggctggctcttcgtttggaggataacgagcatttcaagtgttattttccggagtacaagaacatgaatacttattcatcgacgggagtgctgattcatggtgattcattctctttcacgttgagcgagatgtacacgataccttggtattggagggttgttattgaaaccgattatttcggggtgtggacacctaaaaagttcgtggtaatcaatatggtttgtggttttaccatggatgattggaatagtgcgggtggtaccggggtaaagatcatatacgggcgttgtggtttttttgcgacaatggttcaaaagtatttgcaggaacaggcggatgccggaaccccggtggtggactcggacgggaaatatatgcaactagattcggattatgccgtggattattctcgatatgaataagattaaaaagtgacgttatgaaaatgaattatatcatattgtttttgtttggtgtttctctttgtgcttgttttgatgataagggaaactatgattaccgggatatggcggatattacaattgagaatatcccggaagtgatcgaggtgttggggaattccgatcatattatcgtgagcccgaaagtcgtttcttctttggatggagaggttaaggagggggatgccaatttcgagttcacgtataaaattgagaaaaaatccgggggaacgatggtggccggacagaagtgggtggatttgaatcctttgaagacgttgaatctggataccttggcggctttcgctgccgacacgtatatcgggtggtttggcgtgaccgataagcgttcgggggtagagacatccaagacttttgatattaaggtttcttccccgacctacgagggatggatggtgttgtgcaacgagggggaacaggaacgggtgcggatggatatgatttcggttatttcggcagagcgggttatcccggcttatgacgtgttggcacccttgggatttccggagctaagacatgcgagggggataggcttttatcctaaccgtcgggcgaatcctgatgacgtgatttacgtgatgtcggaggagggtacgtatcgattggatcgggaaacattcaagacggatgaatcgtggaatattaataatgtagattttattattcctccgggagatgagcatgtcgtgtattataacacggtaaacaataataattcttcggaggctttggcctgtctttgcgtgacagacgccggaaatgcgtatgcgcaggtgttgagtactcccggtgccgctttcgagaagccgatcaatacttccgctcgtggagaagcccctacataccgggttgccccgtatatcggggtgagtatggctcgtccggggaatgggaaagctgctgtgttctatgatatggataaccagcgtttcatggggtggaaacagggatatgttgatttcctgatgcaggttttgaatcctatccgggacaaggagggggctttgttcactttcaagacgggaatggatttggtgtacatggagagtacccgttattccaacgggctggtttatgccatattgcaggatgccggggggaaacgttgtatttacgggatcaatatgtcgggtaacgggtatgttccggaatcaatgtataaggatttgaacgcacctgattttgacaaggcgtcgatttttgcttttcattctcaattcccctatatgttttacgctgtggggaataaggtgtatttgcataatctggggacaaatacgacctatccgatgaatagtatcgctttgggtgagcatgaggttgtgacgatgttgaaattcaacctgtatcgccaatgttctttaaaggatttgaacaatcaatctgacgagttcatggcccgacagtatgagttgatggtgggatcttacaatactgatgccccggataataacgggggtaagttgggattttatccggttgacggggtgaataacagcgtgacgaaacgggcggaatatgacggattcgcgagaattaaagacgtggtgtatcgtgagcggcggtaagtgacggggtgattattgtgtctgtggagaggggaactcgaatgttcccctctctgttatcatacacgggggagtttaatatcgtgattgattgtaataatgccggcgtactggcggagttttacagtaaattgttgggatgggaatggactcgtccccgagcaaacgggtgggctgccgttgcctctccgacaggcatggtgttcgcttttccggaagtggaagagtattctctgtaaaaggtactttttctttgattgtacttgtgtcgggattgtataccttgttttggatatattacaacatatcgaatgtcttttcttttgaacgctcatcaatcttttcaggtagatatttagctatgttacgggtaacgatgattatttcgattttgagtaactcttagcattaacgggtgattcccaatttttaatgtgtcgtgaactaatgaaacagaagtgctcatgtctaaatttcggtttaaacatggtttaaacatcctatcccaaaaaactaa

SEQ ID NO: 10755 - DNA, 23555 bp, Unknown
  gut microbiota DNA sequence
tgtcggatcgaaggacggtgaccgtgacaatccggttatttatgattttattgttgggtttcccgctattgacgagggcggggacggtgaattccactcgtgtggaaaatcgggaggtgcggggaaaagtggtggacgagaagaagctgccaataccgggagtctcggtacgtttgggaggaacgtcgatgggaacagccacggacgtggacgggaagtttaaattgttagttccggcagacacggccacgctagtcgtttcctttatcgggatgaagacggaggtcgtgaaggtgccccggttgaaagcgggagaggaacagaaggagttgacgatcgtgttgcgggaagaggacgtgaaattggaagacgtggtggtgacgggtatcttcacccgtaagaaagagagtttcacgggttcggcttccacctattctgccgcggagttgaaaacgatgggaacgcagaatatcctgcaaagtttgaagacgttggacccggctttcgctatcctggaagataaccagtttggttcggacccgaaccgtttgccgaacatggagattcggggaaagtcgagcatgttggggttgagggatgagctggacgcggacccgaatcaaccgctttttatcctggacggtttcgagtcaacattggcggccattaatgacctggatataaaccgggtggcctcgatcacgatattgaaggacgcggcctcgacggcgatttacggttcgaaagcggccaacggggtgatcgtggtggagaccgtgaagccggaggcgggcaagttgcaggtgagttacacgggaaacatgaatctctcgatgccggatttgtctagttataacttgatgaacgcaagggagaaactggagtttgaacggttggcgggaaggttcgagccggcttcgtggtccacgacgagtgaggtggaattgaatcgtttgtacaacgagaagttgaaggtgatcgagagcggagtggacacgtactggttggcggaacctttacgtgtgggcgtgaaccagaaacattcgctttacgtgcaaggtggcgagggaaatttcctgttcggcttgggtgccggttataacggcgtgtcgggagtcatggaaaagtccgacagggacgtgatcagtggtaacattgatttaatttatcgaatgtcgaaattccagttttcgaacaagttctcgttaacctcaaccgattacaggaacccgatcgtggctttcagtgaatatgcggcagcgaatccttattacaagaagcgtaacgagacgggtacgattgagaagtggctggagaataataatttctttaaagccgcgaatccgttgtggaacgcgagccagaatagccgggacgaggggaagaatctcgcgttgacaaattatttcatggcggagtattttcccacggtggaatggcgggtacgtgcccggttgggattgacatacgggaatgacgacacggagaagttttattcccgaaatgatacccggttcgagaacatggaaaccataaaaaaaggggagtatcgttcctcgaatacccggacaaatcaagtggaaggcgaattaagtgtcacgtacgccaaggtgcttggcaaacaccggattaacctagtcgtgggtggaaacgtgtctagcaataaatcgctcacgcaaggatattcggcggtaggctttccggacggagatttttcctacccctctttttccaacggttacccggaaaacggtacacctacctattacgagtcggtgtcccgctcggtgaacgggtatttcaacacgggctattcgtttgatgatcgttacttgatggatttcagtttacgcacgagcgggtcatcggttttcggcacctcccggaagtataataccacgtggtcggtgggattaggatggaacttgcacaaggagaagtttatcatggatcacgtggggtggattgatttgttgaaattacgagcttccatcggtaacccgggaaaccagagttttgactcggcgcagtcgttgcttacctattcattccagtacggttcgatgaactatttcgggttgggagccgtgttggcgcagatcggtaacccggatttggagtggcagatcacggtggacaagaatatcgggttggacgtgacgctgtttaataaacggttttcgttgacagcggattactattacaaggtgaccgacccgttattgatcaaggtgagtaccccgttgtcttccggtacggagacttacatgacgaatgccggggaacaggtgtcacaagggttgacagcctcggtgacgtattatatcttccagaatttcgaggaacgtttctcgtggatgatccgggcgaacgtgcgaacacagaaaacacggatagataaaatcggtaacaagctttcaacgttgaactccagcgggaagggaagcaacacggtgaggtattatgacggtgcggacccggatgatatctgggcggtgaagtccgcggggattgatccatcgaacgggaaggagttgttttacgcgaaggatggaagttacacgtatgatttctcttacgatgatgaggtgatttgtgggaacacccgtcccgacgtggagggggtgatcggttcgtcgttgaactggaaagggttttcggtgagtttgaattttcgttaccagatgggggcagacgtgttcaacgaagcgttatacagcaaagtcgagaacatttccaggagtgacttgaacaagaaccaagacaagcgggccttgtacgagcgttggcaggaggaaggcgatatcgtacgcttcaagaatattgccagcgcggagaccaccccgatgtcctctcgtttcgtgcaggaagagaacgtgttgacgctggagtctgtttacttggggtacgagttttatgacgggtggatcaaaaagctagggttgagtagtttgaagtttcaagtttccatgcgtgacgtgttccgggcatcgacgatccggtcggagagaggtatatcatatccttttgcccggagcatggaagcggggttatcgtttaatttttaaatggttgagagtatgaaattaaaagatataattttgttcggggttatactggtgagcgttgccggatgtgcggattttctggatgtgcagccgaaggacaagcagtcggagaaacaattatttgccacaaggggtgggttttacactgcggtgaacggtatttataataaaatggcttccccggccctttacgggaagaatctttcttacgagttggttgacgtgatctccaagcgttacctgcctttgcaggtgagtacttatttgacggctttgagcgggtttgattacacgaacagtctggtggagaccgaattgtcgaacacgtgggcggcggcttacaacacggtgctgaattgtaacgtggtactggagaatatagacgagagtacgggtgttttacccgtggaggaaagccgggtgttgaaaggtgagatgctggcggttcgtgcttttctgcattttgatatgttgcgtcttttcggccccgtttacaagttaaacccgaaggcagaatcgattccttacaatgaaacgtcgaaggtgatggctttacccttgttggcggcggattcggtgattcacgaaaaggtgttgcgtgatttggacgaggctgaaagtttgttggcggacggcgatccggtgatcgaggggggcccgatggcttctctggaagatgatcaggatgtttatttgcgttaccgtcagttacggatgaattactatgccgtgttggcattgaaggcaagggtgtacctgtacgcgggagagccggggaaggccttagagatggctcgcaagttgttggcagacgcgaaagtgaacgagcattttccggctgttgatccgaataaacttttggcgaatcaaagcaatcccgaccgggttttctccacggaggtactggcgggaatttacaagaaagacaggaaagatatttataccgattattttgactcggaacaagccgggaacaattacttgcatccccggaaagatttcgtgaacacgaatctgtttgcgggggagactcaggattatcgtttccagacatggtggcaagtggcttcaggcgtgggagaaagcgggcacgtgtttatcaagtacaagggaatcgacaaaccgaccggggataccgaagccgagtatttttatgctgttttcatgtcattgatccggttgagtgaagtgtattatattgctgccgagagtgaacccgtgttggcggataaatacgaatggttgaatcggatgcgtacacggagaggattacccgttttaggagtcgtttcggaagaggattttatgaaacggttgcgaatggaatacttgagggaattcctcggggaaggacaaattttctacctgtataaacgtttgttcagtaatatcaatagtgatgaaaacgggtacgacacgaacacttatggcgcgaaagaggaacgttacgtgttacctttaccttcaggagaaattgcaaatcgttaaaatgataagattatgaaatggaaaaatatattgctggttttagctttgtgggtagtggctggggcttgtgaaaagaaggaaatcccgatgtttaccacggatgacgcgggcatttattttcaacgggtgacgagttatatttacgggagtacgacggagaattacggggattcagttgcttattcattcgtgtcggctcaggccacggctaaaagcgtggtgctttcggccacggtgcggacgatgggaaaggtggcagattatgaccgacctttcaaggtggtggtggaccaagaggggacaaccgcaatcgagggaaaacattacgaggtgaatctggatacggttgtggtgccggccggggcgagcacggcgtatgtccgggtacgttttttccggacgagtgacatgatggagaaagcgatacgcttggctcttcggttagaagagaacgagtatttcaagtgttattttcccgagtacaagaacacgaatgcttactcggccacgggagcgctgattcacggggacgtgtttgctttttccctaagtgagatgtacacggaaccgagttactggaattggttcgggggtgattattttggaaattggactcctcgaaaatacgtgattgttaatatggtgtgcgggttgacacctacggactggagtaatgcggggtatgccggagcaaaagtgtcactcgggcgttttagcttttttgctgttgccgttcaaagatatttgcaggaacaggcggatgccggaaccccggaactggattcggacgggagttatatgcagcttgccccttcctattcggtggattattcccgatatgaataatgttaaaatgataaggttatgaaaataaatgcgattgtactgtttttattcgttttttctctttgtgcttgttttgatgacaaagggaattacgattaccgggaagtggcggagattaccatcgagaatgtcccggaagtgattgaggtgttgggaaattccgaccacattgtcgtgaaaccgaaagtcgtttcttctttggaaggagagataacgggggacaacgctaatttcgagtttagttacaaaatagagattaaagggggagggacaatagagtccggacaaagatgggtggatttgaacctggcgaagacgttggatttggatacgttggcagcatttgttgctaacacgtatatcggatggttttccgtgacggataaacgttcgggagtgcagacctctgccacgtttgatatcaaggtgtcctccccgacttacgaggggtggatggtgttgtgcaacgaggggaagcaggaacgggtgcggatggatatgatttcggtgatttcggcggaacgggttattccggcttatgacgtgttgaccccgttggggttgccggagttgaaacaggctaaagggattggtttttatccgaatcgttttgctaatcctgctgatgtgatttacgtgatgtcaggagagggaacgtttaaaatagaccgggagacgtttaaaacggatgcctcgtggaatataagaaatatagattttattattccccccggggatgaaaatgttatttgctataccccggtaaataacgcaagtacggccggggctcttgcctgtatttgcgtgacggatgtcggtaatgcttatgttcaagtctttgatgcagccggggctgcatttgaatatcccgtgaatacttcaatacggggttcggttcccgaattccgggtggccccgtatgtcggcgtgagcatggcccggccggggaatggatccacggctttgttatatgacgtggataaccgtcagtttgtgggatggaagtacgggtatgatgatgatgccatgcagacattgaccccgttgccggacccggaaaacggtctgttcagtttcaagacgggaatggaactggtgtatatggagagtacccgttattccagtggcctcgtttacgcgattttcaaagataacgccggaaaacgtagtatttacgggatcaacatgtcgggaaacggttttgtccaagaggcgaaatacgagaatttgaacgccccggattttgacaaagcgacgagttttgcctttcattcccagttcccttatatgttctatgccgtggacaacaaggtgtacttgcataacttgggaacgaacacgacattcccgatggataatatcgtgttgggagacaatgaggaggttacgatgttgaaatttaatttgtacaggcagtgttccttggatgacttgaataaccaatcggatgagtttatggcccggcagtacgagttgatggtgggttcttacaatcattctgccttggataacaatggcggaaggttgggattttacccggtggatggggtgaataatagcgtgacaaaaaggaccgagtacagtggtttcgcgaaaataaaggatgtggtgtatcgtgagcggcggtagggggtgaggatgttttttggaaaaaacgtatgctagatactgtttttactggcccaaagagaaaaacttttctctttgggccagtcttgtttttgttatagaatgtgtttccctctaatctgtttggtaaccgggagtgtggtataaatagaatgctgaaatgaggtaatgaaagggaaattattttttgtggaaagaacgtttgttgataagattatgattaaaataaaaatatttatctttgaacggacacattaaaggattatagtggataaagaaaagagggacacgtttgagttactgtataagactcattataaggaattgtatattcatgctttaagctttgtccgggatgacgaagaagcgaaagacattgtgacagatgtttatgaatacgtgtggaagaattttgacaaattggattcttcggtttctttacgtccttttttatataccctagttcgttctcgttcgcttgattttttgaggaaggagaaaaccaaagagaagtttctagcctataaaaagacttttcccgaagaggaggaagaatacgtggagtatgaacagctcattgaaaaggtgatgcgcattattgaaaatatgccccaacagacggccactgtgttaaaaaaatgttttatcgagagaaaaaagtatcaagaggcgggggatgagttgggaatttcgatcaatacggttcggtggcatataacaaaggcaatcagtatattaagagaaaaaatgtcagatattgaaatggtgttgttatatgcatatttcctaaaaaaataaaaaatattgctttttgacccacatcatttgccatgctttacgtgtaatgttaaaatgaacgtgaagttatgaaattcgagaaagaagaagatcgtttaaattttgtcaccgagatactgaatcatcctgaaatgttacgggaagttcgggtgcgggaatggttagcagagccccataataaggatttgtatgaggagtgccggaggtatttggaaggaggccttcgattgacagtgagcgaacagctggatgtggagggtgagtatcagaactttattcggaaaatgaaatccggaggtcagtctcgacgaattgcttggttttctgttgcggcaactgtggttatactgatttccgctagttggtggttactggaaaattcattgctgtcgaaaaagcaagaggtgatgccggtggcagaacacattgtacctggaaggaatcaagccgtattgattacagaatccggagagaaattcgtgttgaatgcatcccaaggtgaaagtcgggaggtgggtgaaggtgtacgggtggagtatgatagtttaagcgggattaattacaatttggccgaggggggtgtggttcgttatcacacgcttcgagtgcctaaaggagcagagtataagttgaccttgaacgatggaacggttgtatggttgaattcagaatcagagttgcgttacccaacttcttttgtgggtgaaaaacgagaggtatttttgacaggagaaggttatttttccgtggctcacgatgagaaacagccttttatagttgtgtcttccgatatttacacgaaggtgtatgggacggaatttaatgtacgttcctacggggatgaggaggtacacgtgactttagtacaaggtcgggtttccgtgaagaaaacggaaggcggttcagagtataccttgaatccgggagagaatgcccgctttgtcgagagtgtgccggagatcacgaaagtgaacgtgaatcggtatattgcttggaaggatggatatttctattatgagaatgaatcgatggaatctattatggatgatttgaaacgatggtacgattttgatgtcgtgtatgtaggtaatcgggttaaggactatcgatttgaattgtgggtaagccgggatagcgagatctctgtgattaccgatttgttgatgaaaacgaatcgggttggaataaaggtgaatggaaaaacattagttgtttctgaagtagtaagataaatagtaatcatttaaattaataaccaaaacgatcatttatggcaatacttttgagtaagaaacgttccatagacaggaacgttagtaggagaattgtgaaaatgtttttgatacaattcgtgttttgcttgtgttttttcacaagtattgcatccggtgtgacacaaaatcgggtggtgaacttggactttgaaaatgtggagttgtcaaaggcattgaaaagtttgagtgaagcggctaattgtaagtttgtcttcaattatgatgacttgaacaattataaggtgtccgcaaagttggaaaataagagcgtggaggagtgtttggatattttgttggcgagagtgcctttcaaatatagccaagagggtgagttaattgtaatttcctataaaagtaatgacgagaagaagatttacaaggttcgaggagtggtaaaggatgagacaggaatgcctctccccggtgtggcggtgattcagaaaggtacgacgttgggagcagctaccgatgtggatgggagattcgagttccaattgaccgaaaagaatgttaccttggtgttttcgtttgttggaatgaagacgaaagagctgttgtatgatggttcggacaagttactggacgtgacaatggaagaagaggttgagatgttaggagaagtggtggctactggttaccagacgatttctcgagaacgttcaacgggttccgtgactattttgaaagcggaagatttgaggaaagtgcaaggtacgagtttggtttccaagatagaaggtttgactccgggattatctacttatggcgataagttggaaatgcggggaacatcttcatttgcggttagttctaccccgttattagtggtagatggaatcgtgatgaatcaaggcttgaatagcattaatccggatgacgtggaaacgattactgtgttgaaagatgctgctgcaacctcgttgtatggagtacgtgcttccaacggggtaattgttatcacgacgaaaaaaggcaaaagtgataaagttaatttcgatttgtctgccggtttttatattaatccgctccctaaattgagttatatggattacgcttcaacaagcgatattattgattttgagctggaattcctgctcaacaatgatttgtataaacagaatccgggagattattttgatgataagaatcagactacgagttcaaagccatacacacgaattgaacgttattattacgagttgtacaaagggaatatgacgcaggcgcaagtggatgaaaaagtcaatgcgatgcgcaagaatgattatcgtaaagaagctcgtaagttaatgtccgagacggctctgactcaaaattataatctttctatttcaaaaggaggggagaaatcgaacctgtatttctcgttacgttatgaagacaatggaaagtatttgaagtcggatgcagctagtcaatatagtatttatttgaagaacgagttgaatttgacagattggtttacattgacttatggggcaaatacttatattgccaaaatgaaagaatccatgtctgggatttcttatctggatgtaatgccttatgagaaggtgttgacggatgagggtaatcccgtttatcaatatgggtataatttttaccgtagcatagaaatcgatgaaacggaaggattggagtttatgggattcaatttgaacgaggagaggaataataatatgcaaaaaaccaatagcttgtatgtgcgtttgtttacagatgccgatttcaagttatggaaaggtttagatttaggggtgaaatttcaatatgaacgcaaaaatataaatatcaagcagtttgacgaggcagattcttataaaatgcgagaattggttaatcgttatacttctggttcagttggcaattttgtgtataatttgccccagggaggtcatctctcggagaataatcagaatgaagagtattttaattttcgagcacaattgaattaccagactacgatgggggagaagcacgatttgaccgtgttggcgggtgctgaaattcgtcaggatgaatggaatggaacgatgagtgagcgttatggttatgatgacaaaaaattgacttataagcaggtggattgggctacattggctcaaggggttgtcggtcagttgtcaagtgcttctttgacattttccgaaagacttcaagtaacgagcactaaacatcggtatgtttccgcttatgctaatgcaggatatacttacgattctaaatatagtttaaatgcgagtgtgagggtggaacaagcagaccttttcggaacggatcctaaatatcgttatcgtcctttgtggtctgtcggagcaggttggttgatgacaagggaatctttcttgaatgacattgcttggttggatatgttgaaactacgtgtaacttatggtattacgggtaacgtggatcaatcttcttctccttatttgttgggagcttacataacctctccttacacgcaaaatagcttgacatctatattgactcccccgaatccgatgttgcgttgggaaaaaacgtccacattgaatatcggtacagatttcgctttgttgggaagattgaaaggatcgttggagttttatcgtcgatatagttcggatttgttggcaaacaaaacattggatccttctttaggttttgaatctgcacgggtgaataacggggccatgagaaatacgggattggagatatcgttgtcttatgattggttgaataacaaggagtgggcactgaacacgactttgacagcagccaataataaaaataagattatgaaggtggggttcacgccgtctaacgctttggatatgttgagatatccgggaagcaattacttaaaaggagatacctataattctatttatgcttatcgttatgcagggttaaccgagaatggtgatccgtccgtgtatgacgaaaatggcgaaataaaagccaacgaaccggtacgtaatatcaatgctctagtaaatgtcggtcagttaactccaaaatggaatggtgctttggctgttaatctgagatggaaaacttgggaattctttacgaaattcgtgtactatacgggacattcgttgagaaatgacgtgactccgttgtatagtacttatggtagccttcaatctacttctacttatggtagtataaatggtgcaatgcataaggatatggttaatcgttggaccgagagtaataaagacacggatattccggcaatgagaagcgcaacttctgcggattcagaccgggaaaatctatggcggtatgcggattctcacgtgctcagtgcttcatttatcaagtgtcgtaatatcggggtatcctattctttcccgaaaaatttgcttcagaaaataaatctgcagaatgttgttattcgtgcccaggtggataacccattttattgggcagccaatgacgagggtattgatcctgaatcatttaatgcaaatgaaggtacgcgtactcagttcatgatgcctacttatagtgtgggattgaatattaacttttaatgagtgagaatatgagaaaatatatagtgatagtaagtttatgtctttcggttttcctgatgtcttgtgacaattacttggatttggtgccgaaaggagaatcagtgttgaacacgactgatgattatcttggcttggtggagtctatgacctcagaattcccaacggatgatttttggtatttttccggagatgctacctggccttataaaaatgaaattgaaaattataaatacccgttgcgttcaatcgcttttttgtgggatgaaacagaagggttacgacaacaacatactgtgacgagtgaactttatagtaagtgctactcccggattgccaattataatatcgtggtggaaaatgtgaatgatgcagaaggcccattggctgataaaaaattagctatggcgcaggcaaaggcgatgcgagcatacaactattttatgctagtgaatacttttgcaaaaccttacgtgaaggaaacggctgccacggataacgggattattattcataaaaaatttgatttggagaatgaaagtaaacagtattccgtgcaggaggtgtatgattttattatggaggatttaaacgcagccatacccgatttaccagaaaaaccgttgaatgagtttcggcctagtttagctttcggttgggccttaaaggcaaaagtacatttgtataaaggagaattggattcagctttaaatgctggattggaagtattgaaatcaacttatcataagttgtgggatatgagaccaatgtattatgatgttgtagcggaattaccttttatggattttatgtcaacgggttgggattcatatgcaattcatccgaaggcagaccccgagaatctgttatatcaattctgcaataatgataatggggagcctttcccgttctggattcgtaaggaaacattggatttgtttgataaacagaacgatttgcgttacaaaacttgtattagttatagtacacctaatagaccgacgggagaaagtggggctagaatgttcgggtctatccaggtaaaatggaattgtggaggaatgcgtctttcggaggtgtatttgatcgttgccgagtgttacgctagattgaatgatccggtaaatgcaatgaaatatttgaacgagatgtacaaatatcgggtaaagaatggaactcctgaattgacggcagctgatgcggacgaggctttgaagcaagtgcgtaatgaacggaagcgggagttgatgtttacttataacgggttctttgatatgcgtcggttcagcgtgcagttgaatgaaacgtttactcgtacatatatcaatgaggcaggtgaaacgaaagagcttactttgaagccgggttctccattgtatgtatggcctttcccacaaaatgcaatggaaacaagtaacttgatccagaatacaaaataaagatgcaaatgacacgtaagatatgttgtgtgtttctgacactatcggtcctgatttttatcggggccgggtgtcgggattcgaaaatggcaactgatgcgaaggttgtttttagtaacacgttgaaggggaatttctttttccaaccggaaagtaaaactgcctatgataaggtggcggcagattcaaccgggaaatatcagtttgtagcagaaattcaagaaccgacttttttccgttacgtgggggtaaagcaagggttttattccgtgtacttgacaccgggagctaatgtggagatcgttgaaagtgaaaacggagttgagtttaaaggagattgggctgcagaaaatacttttctggctgaaaatcgatatatcgggatctcgaaggaggggattgaaagttattctgccgaatggttggaaataaactcagaggagattaaacgattgattgcaaagttggaggcgtcagggcttgataatgagtttattcaccttcaaggtttgaaatataaatatgatttttataatcaattacttttcgggccggcaaatgctatgatgtttgcacatatgaatattgagttgccggaacattattatgatttcgcccaaagtatgacttttacggattcggctatcgtgcagatacctaaatggtttacggttatgcttggtgttttcgagcgtggagaaaaagaggggtggattgaagtatccccggagcattacatggaaatttatgtgaagaaaattgaggatgagaaagttcgttcgctatttttggttaaattgttggatcatgttttgcagaaggggtattcagatgattttccggtttatattgagagtgtccggccgtttattacacatgcagcagcattagaggaattaccttctcttgaggctcgttatagagcatcccgtgaggctcataaaacgatattgaggggcgagatggctccagaattcaaggctgtcgatataaatggcaaagagtattcgtctgctgattttaaagggaaaattcaagtgttggatttttggttcacgggatgtattccgtgtcgtgctgagatgccttatatggaaaaattggccgatgatatgcaaggagagaatatcgtgtttattgcgatgtctgtggatacaggggatgagttgatggctttgtggagggagatggttaaagataagagaggtgcggaattacagttgaacttgccgggaggttttaaatcggatttagtgaaaaaatacttgattcatggagttcctcgtatcgtaatcgtggataaagaggggaagattgttgatgcaaatgcgaaacgtccttcggatcctaaattgcgaatgctattggagcgattgatttaaaaattttagattatatgatccgttttttgttcgttttcagtgatttatggggcttttattttgattggaaataggcagaattccgggatcgtataatttaaaatcttatggattatccgtttaggctgaatttcacccggttgactagagagcgaccgagtgtgagctcatcggtatattccaagtcattgccgatggcaatacctttggcaagagtgctaatcgtgatttcatcctgacgggggagttttttgaagatataatatcctgtggtgtctccttcgatggtggcccgcaatgcgaaaatgacctctttcacggaaggattggctactcgttccagtagggtgtttatgtgaagatcggagggaccgatgccgtccatgggggagatgattcctcctaagacatggtaaagcccgtggtattgtccggtggcttcaagggacatgatatccttgatgttttccacgacacatatagtctgggcgtctcgtttgggatcggaacagatctcacagatgtcactgtctgaaatgttgtgacagtgttgacattctttgatggcttctttcaaggcggtaatgctgtccgtaaattgctttacttcttcggggctttggcgaagcatatgtaacacataacgtaaagctgttttgcgtccgattcccggaagggaagcaaattgttctactgctttttccaatagtttggaagataaagattgcatgttttattcctctttgaattttaaatctcgaatcatcatttgaatgtcgctttttcccatgaattcgttttcctgaagggtgtagcaaatatcgaaatattcacctttactgatacgggaaaatgcctctcccatgccgaaagctataccgctccggtcgttgcagactctcgtgtcatccacgacaaccagttttaggtgttcgttgttgcgtccgacttgtttcgagccgatgaaattcgtcacgttttcagtcatgaacacgggaatcgtgttgttgggaccgaatggtgcaaacttctgaatcatggcgtaaaggtccggggtgatgtcgtttagtttgatttgggcatcaatgttgatttggggtgtcaacatctcttcagtaatcgtttcactcacgattttttggaatttggccttgaaaggttcgatgttttcaagccttaatgtcagtcctgccgcgtatttgtgtcccccgtaattttctaaaaattcgctacattgcgaaatggcgtaatacaggtcgaatccttccacggaacgagccgatccggttgccaaaccgttggattctgtcaggatcacggtcggtcggtaataatattccgtcagacgtgaggcgacaattccgatgacacctttgtgccagttcgggttgtaaaggacggttgctttttgggattgatcgtaatgggactggttgatgtattcaagagcttcttcggtgatatcgtgatccagtttcttgcgttggtcgttgaagttgttgatgctggcagcgacttctgtggctctggtctcatcgtcggcgatcaggagttctactgatttgttccccgattcaactcgtcctgctgcgttaatcttgggacctatgcggaaaacaatgtcgtttatcgtcaagtcctttccgattccggagaagcttagtattgtttttagtcccagactgggttttctatttaattgtaataacccgaaatgagcgaggatgcgattctctcccgtgatcggaacaatatcactagcaatactgacgcaaactaggtccaacaatttgtacaagtcggccatcggtaagttgtgtttcatgctatatgcttgtgccagtttgaagcttaccccgcagccgcttaaccaccggtagggatagtgacaatctttccgttgcggatccagaacggcaacggcatccggaagttcgtctcccggggtgtgatggtcgcagatgatgacatccactcccttggatttggcataacggactttctccacggctttcacgccacaatcggttacgatcatgagggaaatcccgttgcgtgctgcgtagtcgatggctaggatggaaaccccgtaaccttccgtgtatctatctggaatataatattctggattctcgcatttatttttcaagtacttgtagagtaaagcaacggccgtggtcccgtccacgtcgtaatcgccgtagatcatgactttttcttcggtactgattgctttttccaaccggagaactgctttatccatatccttcatcaaaaacgggtcatggagcatgttgagggttggattgaagaaagcatgggcctcttctgcagtgtccacaccgcgttgcaaaagcaagttcgcgataacatgactgcagttaagttctttggatagtttgtcaattttctcccactcgggtggggtgttgatgacccatctttttttcattatctctttctcctattctgctacaaagaagcagaaattccttgggatttcaaaagattcctaattatattttttaacaggtttgttctaaataaggttatgcgattgtgtttcagttctataaaaatgtgattggatgtttgatgataaatttttaacaaaaagcgggagaaatgtaaataacgagggagagtatcccttttactttcttctttgtactttatttattatctttgcacattaatttttgaataaaatttagagcgggtgtgtacccggtaataaatggattttatataaccttttaaagcatataaaaatgagtcttgcagaattaagcgaacaggaaattattcgccggaactctttaaatgagttgaaaaatttgggaataaatgcctatccggcaccggaatttaaagtaactcacctttctaaagagatcttggataaatttgagaaatcaccggaggaattgcaagaggttgtgatcgccgggcgaatgatgagcagacggattatgggtaaggcttcattttttgaattacaggatgccgaaggtaggattcaggtctacgtgagtcgggatgatgtgagtcgggatgaagcttgcacgatgtataatactgttttcaagaagttgatggatatcggtgacatcgtgggagtgaaaggattcgtgttccgcacgaatatgggagagatttctgttcacgcgaaagagctggtgatgttgtctaagtctttgcgtccgctaccgattgtgaaagagaaggatggtaaggtgtttgatgcttttaccgatcctgaattaagataccgtcagcgttatttggatttaatcgtgaatccgcaggtgaaggatgtgtttatcaagcgtacgaagatgatcaatgccatccgtcagttctacacggaaatgggatgtttggaggtggagactccggtgttgcaggctataccgggaggagcttcggcccgtccgtttatcacgcatcataacgcactggatataccgttctatttgcgtatcgcgaatgagttgtacttgaaacgtctgatcgtgggtggttttaacggggtgttcgagttctcccgtaatttccgtaacgagggtatggaccggacgcataacccggaatttacttgtatggaggtgtacgtgccgtacaaggattatttgtggatgatggatagcacggagagaatgattgaggcggccgctatggctgtgaacgggacaactaaagctccttttggggagaacgaggtggatttcaagcgtccgttcaagcgcgtgaagatgtccgaggcgattaaagaatataccgggtttgacatcacgggtaagagtgaggaggagatccgggcattctgcctgtctatcggtctgaatgtggacgagaccatgggtaagggtaagttgattgacgagatttttggagagaaatgtgaaagtcattatatacagccgacttttatttacgactatccggtggagatgtctccgctgactaagatgcatcgttcagatcccggattaacggagcgttttgagttgttcgtgaatggtaaggaggtggctaacgcttattccgagttgaatgacccgattgatcagttgaatcgttttaaggatcagttggcacttcaggaaagaggggatgatgaagccatgtttattgattacgactttgtgcgtgccttggaatacggtatgcctccgacctcgggaatgggtatcgggatagacaggctttgtatgttcctgaccaatagtccatctatacaggatgtgttgttgtttccgcagatgaaaccggagaaagtggcaactgtggatgctgacgagaaatttattgagctgggaatcccggctgattgggttgcagtggttcgtaaagccggttaccagaccgtggaagccttgagggcggtagagaacccgaacaagttgcatcaggaattgagtggtttaaataaaaaaatgaaattaggcttgaaaaccttatctccggacgaggtaaaaagctggataaaataggttcgtaaggtttgtaaagtttataaggtctataaagttattttttggccttataaactttataactttatgaactttataaacttattggtatcatggaaatagttgaaaaaccaaggattggagtagtaggtgggggtagctgggctaccgctatcgctaaaatgctgacagaaaataacgggcatattaattggttcatgagaaacatagaatcgataaaggcctttaaagtattaaaacataatccgcggtatttgtgtggtgtcgattttgatatagacaaaatctcgttctcggatgatctggattgggtgatcatgaattctgatgtgatcgtgttcgccatcccgagtgctttcctgcaaaacgtggtaactccaagattgcaagtgtcgctgaaagataagattattgtttcggctatcaaggggatgattccagatgagaatctacttatcggggagttcttccaccagaaatacgaggtacctctaggacagattgtaattatttctggaccttgccacgcggaggaaatagccttggaacgtttgtcttatctgacattctccagtgagaatctgcgggtggcacgggctgtggctcaattattcgagtgtttctacgtgaagaccacgatttccgatgatatatacggggctgagtatgctgcggtgttgaaaaatgttttcgcgatcgcatcaggaatctgtcacggactgcggtatggcgataatttccaggccgtgttggttgctaatgctattcaggaaatggaacgctttgtgaatgccgtgcatccgattcaacgggatattaagttttctgcatatttgggagatttgttggtaactgcctattcccagttcagtcggaaccggacatttggtacgatgattgggaaaggatattccgtgaagtccgctcaaatggagatgttgatggttgccgaagggtactttggcgtgaaaggaattcatgaaatcaatcagcagtataaagtccatatgcctatcacggaggctgtttataacatcctctacgaacgaatcagtccgacaatggaaatcagattgttaaccgacgagcttcggtaatttagaatttaaaatgaaaagtcgccaagcgaccttaaaattataaaagtttaattagaaaattggaagttgggagtggggttttatcatttttcaatttccatttttcaattttcaattaatgcgtatggcaagttacagtacgagggtttggggatgtgtcaaaaaggccttacccgtggcgataaagacgtcagtatggtttttgaaaatcatgttgccggtatctttgttcgtgaccttgctgtcatactttaatattctgccttatatttcttcattcgcatccccgttgtttaccttgatcggtttgccgggagatgcagccttagtgtttgttaccagtatatttacgaatatatatacggtgatagccttgctttccacgctcgatttttccgtgcgggaaagtttgatcatggcgacgatgtgtttgatttcccataactttgtcgtggaaactatcgtgttacagaagactggctcgtctgcagtgtggatggtgatcttgcgagtcttgggaagtttcgttgcggcaattggtttgaattggttgctgccggaaatgaacgggaagatgatggcagaaacggtggcttctctcggtttctgggagacaatgttacattggctggagagcagtgtgatgctggggctgaaaatcgtgctggtgatttcgggattgatgatattgcaacgattgttggaagagttcggcattttgaaaatattgtctgccatgttatccccgttgatgcgcttgttcgggctgaacccggatgtggctttcctgtggttggtgggaaacacggtcggattggcttacggttctgcgattatgatggattatgccaagatgggaaaactggttcataaagaggccgatttactgaatcatcacttggcaatatctcattcgcaactggaagatccgttgttgtttgtcgtgatgggattgcctgtcggttggctgatcttccctcgtgttgtgttggccatgctcgtcgtgtgggttcgtcggggcgtttatttgttgcaggcacatatacacccaccagtaaaagttgaaaacattagtttataaaaatatgaaatacactattgaagaggttttgaacgaaaagcaagcaaaagaatttttgttgctacctgtatccctttacaagaatgatgaaaattgggtgcggcctttagataatgacattacgaaagtatttgacccggaaaagaatcctttttttaaacatggcgagtgtacccgctggctgttgcgggatgaaaaaggttgctgtgttgggcgggtggcttcttttatagacaaaagttcctgtcatttggattcgtattcggtagggggaatgggtttcttcgagtgtattaatgatcaagaggccgctttcatgctgttcgaccgttgtcgggcatggctggaggaacggggaatggagtccatggaaggcccggtgaatttcggggagcgtaacgagtggtggggattgctggtagatggtttcaaaccgcctgtattccaaatgccctacacgcacaagtattatgttccgttcttcgagaactacgggttccgtgactatttcaaacaatatatttaccggactcgcttggtggaggaaagcctttccaaggtcgtggtctggaagtctgaacggttgttgaagaatgaagattaccggattatttcctatcgtgaaatgactccccggcaggcaaaagattccttcttgaccatttataataaggcatggaacctgaatgtgcatggcgtcggggggatggataaggaacaggtggaggtgttgttcaaaacattgaaacccgtgcttgatcctgatttattgtattttgcttactataaaggggaacctatcggtttctttatcatgattccggaattgaattatatcgtgaagcacgtgaatggtaagattagcgggttgggtattttgaaattcttgtactatcgccatatcaagcggggacgtgtggccttgggattaatttttggtgttgcatccgaattccaagggcgtggggtggaggctgctatgatttatgctttctgtaaaaatattattcaggacaagaagacttatgattggctggatatgagttgggtgggagattttaatccgcagatgatgcatttgatggattacatcggggcaaaacaatcccaaacttatatcacttatcgtaagttattccgggatgatattgaattctgtcgttctatcgataaaaaagtgaaagactcagagagtgcagggtgataaaatagcgagttattcaatttaaaatctaaaatttaaagtctaaaataagtatgtcttggttaagtgagctgttttttggacagggggttgctcattcggtgttaatgttcgcaatcgttatcgctttagggatcgtgttcgggaaagtgaaagtttggggaatttcattaggaataacctggattctttttgttgggattatttgtagtcatttcgggat

SEQ ID NO: 10756 - DNA, 39583 bp, Unknown
  gut microbiota DNA sequence
accactggattttgttgctactgacataagtttacttgttgaacaagtcaacttttttaggataagacacactctttggtattataatttttctcggtccgtgcgggaagaaaattatatcgtgtatatttgcattcgggtaaaacagaaaccattaaatcgaaaatatgaaagggattgttgtgaaatctaccggaagttggtactccgtacggatggattcgggggaggtgatggaatgtcggattaagggaaaattccggatgaaagggattaaaaccacgaatcccgtcgcggtgggggatgttgtcgaggtggaggtgaatcccgatggtgcggtgatcaatcggatcgaagatcggaaaaattatattatccggaaatcgacgaacctgtcgaaggaagcgcatattatcgccgcaaatgttgatcaggcggtgctggtcgtgacggtaaatcatcccgtgacttctactgtttttatcgatcgttttttagcttctgtggaggcataccggattccggtcctactcgtgtttaataaaatagatgcatatagcgaggatgatttgatgttgttgggagctttgacccggatttatatgcaagtgggatacgagtgttttcacgtctcttcgttgacgggggaagggatggaggatgttgttgcggccttgaaagataaagtgaccgtgttttccggtttatcaggcgtgggaaaatcttcactgatcaatcgtgtcgaaccgggtttgagcttgaaaatagcggagatttccgattcccatgacacgggaaagcataccaccacgtttgcagaaatgttccctttgagttttggtggctctatcatcgataccccgggtatccgggctttcgggttgattcacatggagaaaaccgaaatatcccattattttcctgagatatttaaacgggcagaagattgccgtttttataactgtactcatattcatgagccgggatgtgcggtgattcaagcggtggaagacggggagataagcgagagccgttattttagttacgtgagtatgtttgaggagggagacgagaaataccggaaataaatagagacgtattttttattgtccgggcataaaatttgaatgtttttgtgtaggtttgtatatcatagtataattgatatctttacagttgcatggaagttgaaccagggccgtttgttcaattaaataatcaaggagtttgcggttcccttgggttaaatgaaattgattatgtggatttttttgttgtactttctatgacagtgtattttcaaaaagacacgaatctagatcaaatgaaggaaaaggaacgtgttgaatacttgaaaaaaagctctaagaaggtagttaaacaatatggtcctgattattatagaaaagtaaaaccattaattatagaaagaattgtaatcggtgtacgggattcaatatcggcaggttggatgcgtagagaacataagggacgggcatattatctcgtcgaatttccttatgatcctaattatgaatattttcatgcagggtttgcagcaagagtctatttttgggctgacacggggatagtatttcaagttgtattcggtaatggttggggctttgtagaaatagatcagcctgaaaagtataaagatcaagaacggattatggaatatgaacgacaaccacctaagaaacaggaagaataatatgaacgaggatatgatgcctttatttaaatcaataaattgagtttggggtaatttgcaagtaaaaggcaagagattgagggtgaggggaagaatgagatataaaatgatgaagaaaaaactaacaggatatgatgccatgtattatttttttcgtacatttgcgccgttttacgtgaagaattgtggacagattgaaagaatataagatagcccacagaggcttaggggaaggcgttcacactttcgagtttgtcatggatggcagtttttttgattgttttgacgcgacaaaaggaacgaaagggaaagtaaacgcaagagtaagtatcgtgaaatcatccctgctgatggaggttcggatgacgatcgaagggacggtaaaagcaatttgcgatcgctgtctggaggaaatggagttaccgattagcggggaattgaacttgtatgcgaagtacggggagagggaggaaggaaatgatgatgattttattatcttggctcaagatgatgattatctggatttgagtgaaccgctatatgaagtgtacatgctgaattatccgctacgtgtggttcacccggagggagagtgtagcgaggaaatggagcatgtcttggaagagttgacaatggaagaagagagtgaaaaaattgatccccgctgggatgaattgaggaaattaattaataataactaaataaaactagagagaaatggcacatcctaaacaccgaatctctaaacagagaaggaataaaagaagaactcacgataaggctacggttcctgcaatagcaaagtgttcaaattgtggtgctgcagtacagtatcatactgtatgtccggaatgcgggtattacaggggtaaattggctattgagaaagcagttgttgcataatattgatgcaatgataaagattgccttagataatacagccccctgtactagggggctatgattgtatataggtgtctgattctattattcaatttgaaaatttttattttatggaaaggccaagagcggtaatcacaggggtaggagcgtattatcccgactatattctaactaacgaggagttgagccgaatggtggataccactgacgaatggatcatgactcgaatcggtataaaagaaagacgtattttgcgggatgccgataaaggcagtgcttacctcggggccagagcggtggaggacttgtttcgtaaaacaggtttgaaaccggaagaagttgatttattgatttgctgtacggttactgccgacatgcacttccctgctaacggaaacgtgatttccgatatggtgggaataaagaatgcttttagttttgatcttaatgccggatgttccggtttcctatatggtttgatcactgcgacacagtacgtggagagcggtcgctataagaaagtgattgtagtgggagctgaaaagatgtccgcgatcacggattacacggatcgtgcaacttgccctattttcggtgacgcagctgccgctgtgttgttggagccgactactgaggatttgggagtgattgaccacatcttgcgttcggatggaatgggacgtgttcatctgcatatgaaagcgggtggctctttgaaaccgcctaccattgatacggttttagcccgggaacattatatttaccaggaaggacaacccgtgtttaaacatgctgtgtcgaacatggctgatgtgtcggtggaggtgatgaatcgtaataatttgacgtcagaggacgtggcttggctggttcctcatcaagcaaatttgcggatcattaaggctaccggggaacggatgggattgccgaaagaaaaagtgatggtaaatattcacaagtatggaaacacgacttcggcgacaattccattgtgcttgtacgagtgggaggatcaattgaagaaaggggataatttaattcttgccgctttcggtgccggtttcacgtggggggctatttatttgaagtgggggtacacgaaagataaaagttaaaaactaaaagctggaaaagttataagtgtgatgagatccatagagtctagatttaaggctttatggatcttgtcatttttttgaatgttcagatgtttaggatttttggattttatggaataaaaaattatttccaattttaaattacttgttgtatatttggtcgattattatggatgctaaatgagaaaaagtgcgagtcaggacagtaccgagatgaaacagacgattgtcttgaatgattccgagatcgagggagatattatcctgcctggggatttgtgtttatttggcaaaatttctggaaatgttactgcaaagggtaaggtagaagtgaagtcgggagccgtggtaacaggaaatatttcttgtgtggagctagaggtagggggattggtggaagggaacgtggaaacttgttttttgattattgaagaaaatgccgttttgaaaggggatgtgcaagcgggaaaattgcttgtgagagccgtgaagtatgatataaagcggttacgtttggaaagaaaataaagtaaacgataaatcatgggaaaagaagtacaacagcaaatagcgttaaatttactcagtgaaggaactcagatcaccggagatcttcatgcttcaaatgacattcgtattgatggagaacttaagggaaagattttcacgaaaggacgtttagttatcgggcagatggctaaggtggagggagaggttaattctccgaatgttgatattttaggaaccatggaagggaatatcgtgtcgacgggaactgtttctttgagggcaaaagcggtattcacgggaacgattaaagctgcttatatcgcaatcgagtccggagcggtttttaatggcgagtgccatatccaacgagaagttcaacaaaaataattaaaaacgtggtgtgtcgtgtattggtagtgatctcattgctactgagtctggtttcttgtgaaaaggaacaagataaggtagaagatggtgtgtctttggaactggccaaagaacgtaaagcgaatataggcggcgtgacctataaattgtatttttccattccggcggacaggagtgaggctattatggctgaatcgacgatcttttttgaattgtttgatttgattccggtcattctggattttaaagaggcaaaagagaatattcttgccgttacatcttcggatgggagaaaaatcccgtacacgtttaaaaatgaacatattataattcatccggaacacttgaaaaaggggcggaacgagctggtcatccagtttaaagcgggggagtcctctttgaatcgaagtgacgatatgctatacacgttgctggttccggaccggtgtcgtacattgatgccttgttttgaccaaccggatataaaggcgagatttaaattgacgttgaaagtaccttcccggtggagggctgtggctaacggggaaccggttcgtacggaatattttaatgactataagttgtatgaattcgaggaaacaaagccattgagtacttatttgtttgcttttaccgtggggaggttctcgtacttggaacgttacgtggggggacgttggatcggtatttaccaccgggagacggatacttcgaagattaatgccagtatcccggtcatagctagagaggtaagtcatgcattggattggatggaacactacacggggatacgctacccgtttgatgtatataatgttgttgctattcccgatttccagtatggtgggatggagcatccgggagccgtgtattatcgggcatcgacgatgtttttggatcggaatgcagacttgacggcatggatgaaacgcagcgatgttatcgctcacgaaacagcccacatgtggtttggtgattacgtcacgatgaggtggtttaatgacgtgtggttgaaagaggtttttgccggtttcatgtctgacaagattatgacccagttatacccggaggtaaatcatcgtctgaatttctttttgaatcattacgagccagcattgcggacggatcggacgagggggactcacccgatattgcaggagctggataatctgaaggatgcgggaactttgtacggggatattatttatcacaaggctccgatcgtgatgcgcatgttggaacgggagatttccgaacggcggttgcaggtcgggttgcaaaggtatcttcgtcggtggtcttattctaacgcggattgggacgagttgatcaagttgttggaaagtacaacgggacaggatttgcaggcttggaacgagatatggataaaagagagcggggctcccgtgatcgaattccagaagaacgggatcgtgatgacggatgagagcgggaagaatcgggtttggcctcaggcggtgtctgttttttgggattacatggggttgaagagaacgttgatcccgttgcgagattcgctgactcctttcaggtatggggcttctgtcgtgttgccggatggggatgtcatgggatacggttgtttcttgcctacggatttttctattcgttttctcgatgatgaactgggaaatttgaatgacccgctttatagggcagttgcttggcaagctctctatgaaggggttttgcataaaaaagtgaaaggggagtttttcttaaagttatgtatcaaacatttaccacaagagaagaataacttggttgtgaaccggacgttaagttttttgagaattatttattcaacttatctggacgagggaagtcggcagttaatacaggacgacctggaacgtttttgtattaatatggtgaataataaggccgaggggaagaataaaaaatcgtattttaatacgttattgtcaatttgttcttcaccgaagagttgttcctatttgtcaagcgtgttaaagggtgaacaagatttaccggaagacgtaacgatcaatgaacatgataagattagtattgcgtttaatttggtattgcgggatacgaatgtttatgaagatatgaaggcatacattatgaaaacggttaaaaacaaggatttgctggatcgttttgaatatgtatacccctctttatccggagataagtatgtgcgtgatagcgtgtttaacgctttactcgtaagagaaaaccgggtgaatgaggtatgggtggaagagtgtctgcggtggttgaatcatccgcggaggagaatggaggcggaggggtatgtaccgaaattgcttggtgcgttgcaggagattcaacagacgggggatattttcttcccgggctcttggttaagcgcaggattagcagggcatacgagtaagaatgtgtacacgatggtgaattctttcttggagaagcactcgaattacccgcagaatttgaaattgaagatattagctaattcagatcatttacggcgtttacattcagaagaagaaaataaagacagattgaaataagatggcgatagaagagacttcattgatattgattccggctcgttacgcttccacccgtttccccgggaaaccgttggtggatattgccggaaaacctatggttcaacacgtgtacgagaaggctgcagctgttgctgctcacgtgtacgtggcgacggatgacgagcgtatatatgatgccgtgctcgcttttggtgggcgtgcggtaatgacttccgagacacatcggagtggcacggaccgatgttacgaggcgtacacgaaagttaaggagatgttgcatcgtgactttgacgtggtggtgaacgtgcaaggggatgagccttttattatcccggaacagattgaatcgttgatcgcatgcttcgaagatcctgccgtgcagatagccacgttggctaagcctttcgagaaaaatgatgagatttttgatccgaataaagtaaaggttgtattttctgctaatcatactgccctttattttagccggaatccgattccttattgcaggggcgtggagcgtgaagattggctggctaaaactccattttataaacacgtgggaatgtatgcttatcgtccgcagattttgaaggcagtgacttctatcccccagagtattctggaacaggcagagtctttggaacaattacgttggttggaaaacggttacacgattgccgttagtatcacgaatcatgaatcgatagggattgatactccggaagacttgagaaaactaaaagataaaaactagaagataaaagttggggataaaattgaaagctaaaagtgaatgctttgttgacattaacttttagcttttaattattagttgttagcttttagcttgctaaattgtcataatatctttttctttctttgcaaagtattcatcggctttcttgccgtactcgtctgtcattttttgagcgatggcttcagcgtctttggacatatcttccggaagtccgtcctttaccattttcttcacttgctcaatgacatcccggcgagcgttgcggatacttactttcgctgtttccatctcgcctttactttgttttacaaggtcgcgtctgcgctcttctgttagaggcgggatatttatacgaataatttctccgttgttatccgggttcaaaccgagattagcgttcatgattgctctttcaatgggagagatcatgcttttttcccaaggttgaactgcaattgttctcgggtctggggttgaaatattggctacttgtgataacggggtaggactaccataatagtcaaccagcacgtcttgtaagattttcgggttggctcttcccgctctgattttactaagttctgattccaggtgactcagagcagcttccattctctcttttgcttcgtcgagataaaattgtacttcctcgttcatataatttttatttgatttaaatatcccataatgaatcaaacaaaggtataaaaaaaactttatttttactctattctacgccacgtttccttgacctgaacgtttttgtgggttccatcggccagttttaattttacttcgcccgtgaggacaagtatccggttatttgcatcgtattggtaatgagcggaggattccacgatgtcttttatttttacggaaggggcatgttccgatagaaattgtccgtgggtgattttataggttccattgactccgttagagcaactgaacgtgaaatcgtcgaagtattctttttgtaagagttgtttggttgcaaccccgttttccgttactttttcccatttaccgacaaaggggttggcaataatagcccgaatgagtttgccgggattgaaaatacagtcttcaacgtatcttttgaatttcttctctcccaggtagtcccggattttgatctctcgcagggttgtgtttgccctaaaacgaggggtgattcgtatatactccgaagtgaaatcttctgtcggcagactgtctataagccggatttgttcgtcccattcttccttatagaattgtaatattttgtttttgtcggaaacaggaagagacatggtgggcatgacgatgcttaacatgatttccgaggattgttgctgttcccgggcggaagtgatgatacctttgtaaacagccttgtctgtcccgtaacgttttttcagatagaggcgatacatgtcgaaagaagcctgaggaaccgtgtcaagtccgttttttagcttttcttcttctgtattcaatgctttcaagtacctgtcaaaggtccttctttcaatgctgggagaggtgcttcttaaagcgaaataaacgggtaccgtgtatgaaacacgcacgggagaaccctcttgtttccccggttcccatttgggcatggaggcgataactgcttttgcctcgttgtccagttctggtgaaactccccgaataattttgacattgctgacgcttccatctttttcaatgatgaaccgaacatacactttcccttcgagttttttctctttggctgcttccggataacgtatgttgttgtatatccatgtatttaggttaccgggaaatacgggcatctcttgaacgaagaaatggacttggttgtcttctgtggaatcttgaacggtttgtttatcttgaatttggctaattgccgtgtgagtgcttaaaataagaaagatactcaccaacccaattggtaatttggcgagggattttaatttagcatagaatggttttaatgtcatggtgtgtttcttagtgtgataaatagttctttttatcacagctaaatatagaaggaattttttgtttttgcaatgaaaataaagatttaatgaaagtttaacgcatcctgttaagagtggtctttaaatttttaatttccaattaagggagttacttttgtctccttaaagaaacgatatgaaaaggaaagattttgaagtgatggctccggttggttcttatgaatctttggaggcggctttgcaggcaggagcgaattctgtttattttggagtagaaggattgaatatgcgttcccgttcatcggctaatttcacgctggatgatttgaggaatatcgtggaacgttgtaatgcccgagaggtgaagacttatctcacggtgaatacgattatatataataacgaacttgagaagatgcaccaggtgatcgagtgtgcgaaggatgccggggtgtcggcaattatagcttcggatattgcggctattttgtatgcccggtcgataggggtggaagtgcatatcagcacgcaatgtaatattaccaattacgaggcggtgaagttctacgcacaatttgcggatgtcgtggtgctggcgcgggagctggatatggatcaggtgatgacaattcatcggcaaattgttgagaacgatttgcgtggtcccaagggggaattgatccagatcgagatgttttctcacggggctttgtgtatggcggtttcgggtaaatgttatttgagtcttcacgagatgaatgcttcggcaaatcggggggcttgttaccagatatgccggcgttcttatacggtgaaagataccgagagtgatatagaattggaggttgacgggaaatatatcatgtctcctaaagatttgtgtacgatcggttttattaataaaatgattgatgccggggtgcgggttttcaagattgaagggcgtgcccgttcggcggagtatgtgaagactgtttgcgagtgctatgacgaggcattgaatgcttatcttgacggaagttatggggcggagaagattgcgaattggaaagaacggttgtctaccgtgtttaaccggggattttgggatggctactatttggggcagcgtttgggagaatggagcgaggtgtacgggtctaaggccacgaagaagaaggtatgtattggtaaagtgacgaattattttgggaagttgcaagtcggagaatttaaattggaatcctatgacttgaaagtaggagaggaagtgctgattgtcgggccgaatactggtgttgtacaaatgattgttccggagttaagattagaaatggaacctgttgaaaaagtggataaaggagctattttctccatgccatgcgaaacgaaattgcgaaggtctgataaattgtacaagttggtggatacgacggaagagttgatgcaatagttttatcagaaatattttgagataaaaaaacgatcaaaattaattgatcgttttttttatttatctgaaaggattcaatttgggaggtttgatgtcaaatagattataacttaaaaccaaactacctctcatgtgtaacattttatagtcaaaatactggttactaggcttgaatatatctttgaatccacaactaaatcgtaaacctagttctatgcgtggaaatagttgacgttcatatccggcaataaggcccatatcccaactgtccaatagattactgaaattgatatatagaggattaccaggatcgatagaaccattgtagaccttgtcgtccgtcatcatataacctttggttacggtattacgaaatttagcgttgataatccatgctccgtaaaggccagctagaattcggtctttttgatttttgaatgtgtacttgaaataaagaggaatttctagcatcgtaaaatccattgacatttcggcagatccgcagaaacgggatataatattgtttttatcgtcatggaatcgttggttgtcgatgcgtgcatcggcatcaatagcgactttcttgtacgtgacttcagctcctagcgtccattttttggtcacgggaaaagtaagctttgcacctattgatggcgaaagtttgggataaggattaaatacatcgggaacattactgaatgggaaaggtatggctccaccaatatcggtccccaactgaaccccgagagcaaatcgatattctacctggtcatcggaaatactatccgcttgagtagtgactgattttgattgatttctctctttagcggtaatgtttagagtacaaaataatggtacaagtaaaaggtatattaatttcattttttctcggattaaaagttaacaacaacgttatcaacggttaaagtactacctttagctccaatgaacaggtctccttgtctactggacgtcattacgatagatatatgtgttggttccagatctttgtacttgctatcgtagttgatcgggattgtatagttgtcccagttttggagtgcagtattggctccgtcgaagatcatttcaccctttcccaagactttaagaccttctacaggctcggcatgatctccgtgatattccagttctccattgccttcccagcggagtaattcaacccaaacacgtccttggtcaacacccgggatgtcttttattatataaggagatttttcatcctttctttctgattgttggaattttgctccagccacatattttgcatcgaatgagatggattgtggacgcataataaatggtatcccgaaataggtcattagcgggggattgtttaaagcagagatttttatttgaaaatatcccgtgaaaattgtcccggctgttattaattcgccaattcccaagttggctaagttttgaatacctgtttggagttgagcggcatatcctttttgataaggtaccggagttgttccttgtacaaaagaattattcgctgttgcccatccgagtcctttgccaggtgttggatctatgtttactttagaattatcaacattaatccatgattcaaaattggaattttctattgtgggaacaacctgtatattccaaacccgttcgtcttgattgtcatctgcaattaacgtgatttgtttttgatctttcggtcccgagaaggtaaagggagattgtgccgatccggcttttattttcccgttatgggtgatatcagcttcaacggtcacgggccaattaaaatcttgtttgaaattgatacggatgttattattgcgaatggcgacactaacttcttcttcggtgtaatttgtaacatggaaattggtaatttccgcgtttgttttatcttttaatatgattttccctaataaggggattccgctctccgagatgagataaaatgtttgtggagtatatacgtctttgaatgtgatttcttttaaatttaaaggttcctcatcaacgctaatgacatcatctgtggtagatgaaaatttaatatccgcttttatggtaaggggaaataattttcgtccatagtctaaggggattgtaactacgttattagtgatcgtgatttcatctttatttaatatgattccttcagtttgatccaatatcgtgaaggaaacaatttctgccgtatcacttaatttactgacttttgtgcaagaaaataatcccacagcaaataaaagaatccaataatattttctcataaaaatttatttttcgtaataatcagcaattttcatgccatctgtattgatacggaaataacgacaagcgggttgtccggttgtcgttattttatgggtagttaatcttttttcttgtaatggcgaatgatataaaatgcaatacatcctaataacgcgagtaataatatgctggagctgattgctgatattttggctcccatgaaataggattgtggtttatactcgaacgtgatcacgtgttctcccgcgggaacaatcatggctcgtaaaatgtaatcagcccggaataattcactcggtttgccatccacgtagacattccaaccttttgggtaatatacttcactgaaaacggctagttgttcatcggcggcggaagttttatactctaatttattcggggcgtaagatgtcagttggatggttgcgttttcatcgaaattaaaacctttgtcttgaataatagattggaattctttgttgataacggcggattctttcgggtcgatttgtttcaacgtgataatttcatcgtccggagtgtcgactagtttgtaatctttgacaaaccatgcattcccatacacgaaacggttgttgatcggggccgagttcggatcaataataatgtattttgcgttcaacatattgagcgctttttgctgggaaaggcttccctctatagcagagagagtcggagattgctttaatgcgttcccgagattctgtatttcgggaatgataaagtaatcaatcatgtcttgatagcgttgtaattttgcggcactatagcccccgattgttttgtggaaataactggtgtgggaatcgttaaacacgtctacggataaatccaacacccggtaattaggatctttatcggttaaaatagcattatctgctggacgtaatttatattggctattaaattctcgttgtgtaacgaaatggtttgcatttaaatagcgtttatccacggtccacatatctgcaagaattagtaaccccatgattatagcgacttgggttacttttaatttttggattacccacgcccagataacggctcctgccaataatataaataccaatgaacggaaagcatcggagcggagtaatgattcccgttctgcaggtagatattgttgtaaccattcggcttgcgcatcaataggtgcggagaaatttccggcaagtccgggaagcaaagcaaatagagcacaaattccggctgtaacgccaagggatatttttaatgccttaacaaggacttgtcgttcaaaacagccattgagaattttgttcagcgtgtatatgcctaataacgggatggtcacttgcagtacaaccagtatcatcgaaggtactctgaatttattgtacaaaggaacataatcatagaagaaacttgataatgccatgaaatgacgtccccaacccaagaatagggctaacaaggatattcccacgatccaccatttcatggggcctttgattaaaactaatcctaatacaaataagaagattgcgatggctcccatatacatcggtccggctgtaaacgcttgaggaccccagtataaaggcatttgcttgatcatttgatctgcattctggactcctgcactctttaagaatttgtacgtttccgagtttttacttaacgccccggcagaggctcctcctttaaagttcgggatcaacagatttagggattcatcgatcccgtaactccatgctgttgcgtattctttatccaatcctcctttagtttggttcttttgatttaaagttaattccgaaccgccacgcatggtatatttcccgtattcccatgtcggccacaaatgattcacgttagttgctcccgctaatccggcagcaacaattaacaacatggcagttttcaaaaatctcggtagggtcttttgttttatcgccgtgtataattgagcagcaccgtagaatatcgtaatgaacgccaggtaaaatgtaatttgcggatgattggccatgatctcgaaggagagcatgatgccaaacagcacggctcccaaccatcggttctttcgaaaggcatagacaagtgcagcgagaacagcgggcataaaggcgatagcggtcattttggcattatgcccgacttgtataatctggaaattataggaacagagtccgaatgctaaagctcctacaatggatagccaaggattgaccccaaatgccagcataagaaaataaaaactgataaagcctaggattaaatcggctgcaggacgaggtccaacgaatagaaattcgtaaatgttttctaggtaattccccttgtagtaggtgctgatcatggttgtgggcatcccgctgaacatagaattcgtccaaagtggttcttctccttcatttgctgcccgatagtctatcgtttctttggcggcacccacgaaagaagagacatccgattgattgacaacctttccttgtaatgtgggatagaaatatataaaaccgattagaatcaataatataattgcaaagaaatggggataaaatgctttcagttttagctgtttcattttggatctgttttaaggccatgtttattcgtcgacaaaaataaaaaatataatatgaaatctttactactcgatgaataattgctatttttgtttatcaagaattgaattatgaaagtgttcatgttatcaaatcccgccgcgatacatactcaacgttgggtaagtgcgttggctaagcggggagtggagattatgttatacagtttttatccttgtgaaaaggttgactattatagggggattaagcatgtacaggtaaaatcgttctggcaatcacgtgatagtaaggggatcaaggggtttattttagtcaaattatttacttattacctggtgttgataaaagatatcaggaattccattcaaacatttcatccggatatcgttcacgctcactatttatcggataatggtttattcgggtcgttggcgggttttcatcctttcgtcgtttctgcatggggaacagatgtatatgattatccccgacgttcatggagcagggcttgtgtgattaaatatatactgaaaaaggcggatcgagttttgtctacaagtcacgtgatggcccgggaacttgcaagatatacagataaaaaacaaattcctgttaccccatttggcgtggatatgacattgttcaagagatttccaaaaaagtatcaagagacagatagattcgtgtttggtattgtgaaaactttggaatatggatatgggatagatacgttgattgatgcttttgctctgttgtgtaaacggcgaccagatctgaacttgtgtttacggatcgtgggagagggaagtgagagagaaaaattacagttacaagctataaattgggggctggcagaaaaaatcgtatttgaaggaaaggtagtacatgatcatttgccggaagtcatcagttcttttgatgtattcgtggcgctttcccgggcagaaagttttggggttgctgtcgtggaggcaatggccgtgggctgtcctgttgttgtatcagatgctccgggattcaccgaaatcgtgaaatcgggagagtccggccttatcgttgaacgtgagaatccacaacaagcatcagaggccatggaaaccctggtaaatgatgaaacattgcgggttactttggctcaaaatggagaaaagagggttcgggaattatatgattgggataagaatgtggaagatatgatagaaatatatcaagaaatcgtggaggaaagaaatgtttaaagatataaagcaagtcatgaaagattcggtactctatggtatcggaaatgtggccgttaagcttgtcggttttattctgatacccctttatacggatgccgaatatttctctactgctgattacgggttgatggggttattggaggtgacatcacaaattttgattgcggtgatgggactttctttatattccgggttgattcgctggtattgggatgccgaataccgggataaacaaaagactatttttttcaccacattgttgtttacgatattgacttctttgtgtatcgggagtgtgttgtggttaaatgttggtgagttatcggcattactggtacagcaggaagggtattctttgggaggggaacttccatatattcttcaattactgatattgacttctatgttgggggcagttgttgaagttccacaaaatttattgcgtttacaacgtaagcctatctattattcgttaacgaatatcgtaagattgtttgtaacattagttctaacgatttattttacaatttctttacatcggggggtatcaggagtgtatgaagcgcaattagtcggtatcgttatacaattacttatggtattaccactggttattaagaacagttcttgtcgagtagaccgaaagtgtacaatacaattgctggtatatagttatccgttagtttttcccgcaatagtaggaagtttacttactgtttttgatcgttatataataaatcattttcaaggattggatgatgttggtttttatagtttgggatataaagtagggaatactcttaaagtttttattgtgacatccgtgcaattggctttaacaccattgttgatgaagaaaatgaatgatccggataataaacgattttattcaaaagtattgacttatttttcttttggtttgatgttttgtgctttagggttgaatctgttttcgcgggaaggaatcgtttgggtgacaactaatccggattatatagaggcactttacgtcattcctttcgtgacctatgctatttttttcagtatgatgcgggaatgttgcatgatcgggttgcaaattatgaagaagactaaaattataagttatgttatagttggtattaccatattgaacttcttcttgaatatgctattggtgccttcaatgggaatgtacggggcagctttgtctacaatgatagttcatgtaatttcgtggttggcatgttatatatttgctcaacggtattaccctattccctatgaattgtcgaaagtggggaaggtgtttgttgtgggaacaatattatacctgatcggtatattatttaatgaaacagctattggaataagtatattagtaaaattggttattttggccggatatccgtttttgttgtataaatggcatttttacgataaggatgagtggaataacttgaaaggtgcttggaaaaaatggtctgacctgaggcgattgaaagagaacgtgaaaaatgtaaaataccgggagtcataggactattttccataccggatgaaattaattatatttgtaagaatcttaaaatggacaaatgatggaaacagagctttttaacaggcagtatataatttcgaaaaaagaattggctctagacgggtggaaacagtttttgtttgataattatcatgtttacgtacatccgaatttggattatgtacatcaagatgggaaacatttgtctgtggcagtattgggttatctgtttgactatcggaatactaaatatacaaatgaaaatattgtaaaagaactatcggaatctgctgacgtggaagatttgatgcggcaactggatcaatattgcggtcattttattgtactttgtaaagatgccgcaggggtaaaaattataccggatgcttgtgcgcagcgaatcctttattataagaattcttttgacgtttttgcctctcaagtgaaattaatagagcatttttttcccttggaagatgttgtagatccggaggcaaaagcattttttaattcatcggtttataaatatcgattatacgcaatctccaacaaaacttggaaacaaggaatatttcgtttaatggcaaattcctatctagatgtgactgcatgtaaagtagtgcgttttttcccggtacggcctattcaaagacaagccttgcaggatgtagtggaacaggtgattccgatgtttaaaggatatatcgaggcgatagcgaaacgttataaaaaagtagtgatccccgtgacggctggctttgatagtcgaatggtttttgccgctagtcttggtttaaaagagtgtacttattttatttataaacatccttcttttaaagaaaaccacccggatttggttattcctaaaaagttgacagaattagttgggaaatcatttcaagtgttccggtattcgtcagaggtcgatcctattttgaaagaagtgtataagaatagtgttgattatgccagagatcggacagcggcaatgattctttcggggaacggaacttattttaaggatgcaataatgttaaatggtaatttaggagaaattgcccgtagttactacaattatacagagaatgtatcgggaagggagcttgcggcgttgatggagtgtagaaactatccttatgccgtacgggaattgcaagcatggtatgatacgaatcgtcctctttttaaagcaaatcatttaaatgcgttggatatgttgttttgggagctggattggggaccttcgactgcacagtcaaaacaggaatgttggattgcttcggaagtttgctcaccttttaactcccgaataatgttgacaacgttgctgagtgccgatgcaaagtatcgggtaaaagagtcttgtcgggtatttagagaagtgattaatcattttgcaggtaaaacaatagacctgcctgtgaacccgacggggaaacataaaattatagccatgatgaaatggctgggtatttatttaccttaccggaaatttcgaatgaatgtgcgttaatgtgtttatttgaataatagaataatatcttcggagcatgaaaatactgatggttttagagaaccaattcccggatgacgaacgggttgagaaagaggcgttatccttgataaaagccggacatgaagtccatttgttgtgtgcaacactaaaaaaagaacgtgtcggggatgaaaattataaagggatcaagctacatagaaccttgtcgactcccttcctgtataataaagcaaaaattgcctgtctgcgtttgcctttctattttatgttttggaagaaacaagtcgggaatttattgcggacagagacgtttgatgtgattcatatacatgaccttcccttggctgaagtcggatattgggcaaaaaagaaattcgggataagttttgttctggatagtcatgagaattatccttacatgttggatatggctccttacacgaaaggaatagccgggaaattgatgtattcttttgcagcctggaaacactatgaacgggagatgataggcaaggcggatattgttattacggtatgtaaggagatgtccgaccgaatgaatgatctggtaccacgaacatattatcacgtggacaacacgattagtatggaattgtttcctcgtccggaaccacatccgacgacaacgggaaagatacgtttactctatgtcgggggaatcacctatcaccggggattacagaatgtgatcaagggattggcgttgataaaggataagtccaagtacagtctcgacatatatggaaaaggtgcttatgccggggatattaaggatttagtattaacactcggtttggaagagattgtgcatttccccgggtatttgaagtttccggcagaagccgttaagatgtgtgcctattctttgggagtgatatcaaatttgcgttcggtacaaactgactgctcttctcccaataaaatataccagtatttttattatggtttacccgtgctggtgagcgatatggatagtgttgggaatattgtacgagagcatcaggttggagtcgtgtataaggataattctccggaagattgcgcccgaaaattagaacagttagtaaccttgaatttggaggatatggcaacccgtgcccacaaattgtgtttggagcaatataattgggatatttctgttaaacaattaatagcagcttacgagtctattcgttgaagttcccggataatgatatgtccggcttctccatccccgtatagaggagaggaaaatacgtcttttgtcgtgtgtttaagttgcttgtaactgtttaaaatatcttcgtatttccaacccgtaatgatattggctccttgttcaaccagctcaatccattccgtttcagttcggagagtgatacaatattttttgaaaaaataggcttctttttgtaagccaccactgtcggtggcaacaagggaacagtgttttagcaaatgaaccatctctaggtaacccacgggatccactaactgaaggcgggtttgtttaaaatcgaagttcaactcttgtaattttttacgggtacgggggtgaataggaataacgactggcatttcccgggcaatctcttcaagagcagcgatgatagattgtaaacgttcgggagaatccgtgttttcagctcggtgcaaagtggctaaaataaaatgttccggaagtgaaaaatcaggacatttggctttattggcataaaaaagtgcggcatcttgcatgacatcaccacaattcaataatgtacaaggaaattgtttaaagccttcttgatataagtttttaatagcttgctctgtgggacaaaacaatacggaacttatcctgtccgtgagaattcggtttatctcttccggcatattcatattgtatgaacgtagtccggcctcgatatgtgcaacccggatatgtaatttacttgctgccaaggctccggccagcgtggaatttgtatccccgtaaacgatcacccaattcggctgttccgctaataggatagattcaatcttttcgagcatctggcccgtcattgctccatgcgtcattccgttgatattcaaattatagttgggtttgggtatacacatctcttcaaagaaaatatcagacatattcgtatcaaaatgttgtcccgtgtgaacgataacttcctgtacatccgggaaactgctgatggctcgactgaccacggctgcttttatgaattgagggcgtgcgcctatgatagtaactattttcatgtggtgaattatgatttcttatttccgtaataattttttgagaatccttttacttcctttccgagtaaggcattccagcctccccagagcaacccgaatccataagcgaagacttggatgagcaaggtaatgatggagaggaaagcaacaatgatgtttcgatacttaaaaagtgattgaaagaaagcgaacaagcaaacgaacattaacccgtagtcaataatattccatgccaaatgtacgggaggatagttttgtcctgtgaaaaaggtgcctaattccagaacgactaatccgacgattaatagggctgggagcaggtgaattggttttagagtatggggatggcgtctggataaattgatgcgtgcaactccccaattaaagatttggcggaagaacttgggtatacttgtacggcgtttgtgatagacataagcatctgcgattagccccactttaaaaccggcattgtatattcgcatggaataatccatatcctgaccatgacgtaatcctcccatgtctccaatcgtgtcgtatacttttctggatattcccatgttgaaacttctggggtagaaacggcccacgtgctttttatttcctctggttcctcctgttccgataaatgaggtcatcgagtaattaatagctttcagtaggggagaaaaagagagatgacaggtatccggccctccgaatgcatcataataatgttcgttttgggccttctcaatctcagccagccattgagggggaaacatacaatcggaatctacaaagatgaaatactctccttgggctttactcattccgtaatttctagcagctccagggccttgattttgttggtatatggctcgtatttgaagtccgctggcagagcggtattgttcgatgaattccttgaatccgtcttttgaaccgtcgtccacgaataataattcaaaaagacgtcgatccccttcaagcttttctgcactttcaaggagttctttcacttcttccagacggttatatacggcaatgatgatagagtatttcatgaataggtattttaatagtaagcttcgatgttatcttctactcgtttgtgtatgaactcctgttcccaaattgccagtcccaaaatgatccagataaaattgtagtgccaccggagtttcgggtgtgccgggtaattcaggatatagcggatatagtcataattgaatatcccctgtttctcgatatattcttttgtaagaatcttttcggctgtatcttttaaatcctttttgaattgtagatacgggttcactgtgaatccccatttctttttcgtgataatcttggggggaagatatggtttcatggcttcccggaaaagatttttagtttggttatttttgatcttcatctccacggggagagtaaagccgaagtctactaaatcccggtcaaggaaaggaattcgttcttcaaccgaatgggccatggacatccggtcatctgtaagcaaataatcgtttaccattttggattggaattcggcatataacacttgatccaacccgttctgatggtgtacagattcaaaaatcttgtcaaattctttatgtaccttgaattgttctatttcttgctgtttcaagaacgattccgaatagatattcttgtagaacggggtatcgaaatcccacgtgtttcgcaggatgaggtaaaagcgttccacgttcccaatagacagtaacatttgtacgccccggcggtattcgtcgtaacgtaatgatttagaattattctgaagacggaaaataaaatctgatttccagcgtaacatacgttgcagccattgtggagtatggtgatgccagtttttgaacgggtaaatgaatttatggatatcatacccggcaaatagctcgtctccgcctagtcctccaagaataactttcacggttggatggacaaaagctgacatattgaatccctgcaacaagttaattttaggttcctcggcatgccagattaccttgggcatttgttgcatcggattcatcgacagactcaacgtgtgatgatgcgtgtgaaagtgatcagcaatctgttgggcatcgggaaactcgtccgtgggctcattaaaacctagggtaaacgtgttgatatcggggactcccagttcatgcattttctgcacgattgttgaggaatccagtccgcccgataaatacacgcctactgggacatcactgaccaattggcgtttcacggcctgtttgatcaattcgttcatcttctctttcgcctcgttttccgtgatggatcgatcaatattcacagccagctgccagtagcgttttaccgtgaacagaccattttcaaacacggcaaagtgagccgggggaagacgtttgatgccttcaaaaagagtctcattcccttgcgtgtaacgcaagttcaagtgtatatgtaaagcttttaaatttaatttccgttcatatttcgggtgtaggataatggatttttgttcagaaccgaaaactaatacaccatcttttaggaaatagtgtagaggtttagttccgaaatgatcccgtgcgagaatcagacggttattgttttgatccagtagggcaaaagcgaaaataccgtttaacttgttgaagaacccggttccgtactcctcgtaaagatgaaccaaaacttccgtgtcggtagcggtataaaatacgtgtcccttggatttgagttcttcccggatttcttcgtagttgtatatctctccgttaaaaatgacacagatactcttgtcttcattaaaaatgggttgattgccacacgtggagacgtcgataatggacaaacgccggtgtccgagagtgaaatcctggtaggtatatatagattgatcatctggtccccgatgttcaatcgtggccagcatttccgacatgagttgagtgttatctgtatcccgttcgaatattccggctattccacacatattacaagagtttgtttatacaaaagtattattttttcccgtttatattataaacgattcagtttctttaatgccgtgaacttgtggcgatacatctttaaaatattggaaatacggtcataatgatggaattttttgctaaaaaggcgtaattcctcttttccggtgattcggtagagaattaggagttgttggcgaacaagtctgagataaccgatcgtgcaggggtcatcttgtggataaccgggaagatcgcagcgattgaatcgaggccagaatcccatatcaaacagaggaagttggcgggtaagaccttctactccttcattaaacagccgaagggcgagtgcgtacccattgggttccttgttttcaggaactgcacgaatgtaatcgtataaaccgaaaaggcaaaagccatgaccatccagtactcgtgtcggacactcagccacgtattcttcgtaaaaggttgcccccttttcccggtctacggaaacccctccggttgttatatccttcgtgaaaggaattaatgcttgagttgcaatcttcaaataggtatcgtcctttgtaagctgccaggctctcaatagcatggatattcccctgctttgtgcgaaggcggatttccaaggttgataaacatgatattcgggcttaggcacgtcggttagccaataacaaccgagttctgtatgatctgtccgattgttcataaaccagtctgcaatgcgaagaaaatggccccttttctcttcggaatgtgtctttaaccacgagtggaatatggctaacccgtactgtccgatggaaataggatagtagtgcagttttgtatcttccacgtcaatataagtcgtgttcaaggggactccatttttgtcgaaagagtgaatcagacgattgagtttagctatgtcctcgtcaaatttgatgtaataatagcctagcgtttcagattgattctccatgttaatttcgatcttgcggtttgtgttgaaatctcgcaaaagtttgcgtaacatgaaaatagcttttttaatcttcatggtgggctaaaatttgggttaaagactgggttaaggactttctcgaatagcggttgactacattgttctcttttataggagattgtggatcaaaattattcagtaaggaggttagaaaatggaacataccttcttcatcgtcatactcgaatgttttcccggctttacaaacttgaatgatggttgcggcatcaccatcggtgggaccgaggcaaagaatgggggttctggagccgatgtactcgaaaagcttacccgtgagattacctttattcccttcgatgttgggaataatgagtaatagaacagaagaactcttcatgtatttgatggcatctgcgtgagctacgaacgtatggatttctacggaatctcccagttgttccgagagtttttgagctataccttgatccactttaccgacaaaacgtagtttgagtttttccgatgtggaaagtcttttaactgtatggataaaggaatcaatcgtgtagtcagccgccaaagttcccgtgtaagtaattgtgaaaacatcctcctttggaataattaggtcgaaatcctcggcatcgaatccattcgcaataacttttattttagaggcttgaattgctggagattttgctgccagttgctttttgatgtagtcgcttaccgtgattacctgatctgcatccagaagaacattccgttcgtatttccggtcaattgcttttgcaacgggagttgggtacatcttattatagtaatagatgtcagtccatgggtctcgaaaatcagcaatccaatgcaaatggaaacgcttttttagtttttgtccgaccagatgggttgacataggtggacccgttgtgatgactgcgtctattttttcttcctgaataatttgaattgcttggtgataagcatgtttattccagcctcttcgggcatccggtaggaagaaattaccccgaataaaacgggcaatcttctgttttagactgggagtcccttcattgacgaatccgctatacggggcacttggggcttttgtcagttttttataatattcatacaaaccggaacaatcagtacgatacacgatttggtcagctcgtacatcttgttccagagtataatcttttatgggatattcagccttttccggatcaaccgtgataatgatcggatcataaccaaattccggaaggtatttcgagaacttcaaccagcgttgaactcccggtcctcctgaaggtggccaataataggtgatgatcaggatctttttcacggtgaaatctctatcggttaaagaatgtacgaatttgttcgatgatgtactcttgctcttctactttcatttccgtgtgcatcggcagcgatagtacctctttgcttaattgttcagcaacggggaatgtcccttgtccttgtccctttttagcgtatgcctcttgcaaatgcaaggggatcggataataaatcatgctaggaatatcatgttcggccaagaaagatttcaactcatcccgtaggtgattttcaacccggatggtgtactggtggaacacgtgcgtgctattagcggcccgttgtggaaggataattccctttactgttgctaaccctttgtcataatgttcggcagcttgattacgggcagttgaatattcatcaaggtattttagttttacatccaagatagcagcttgtaatgtgtctaaacgggaattacatcccacgacactatggtgatatttgatcttctgcccgtgattggcaatcatgcgggcccgttcggctaattcgtgatctcggataaataaggctccaccgtccccgtaacatcctaagtttttggaggggaagaaagaggttgtgccaatatccccgatacatccggctttttgttggagaccgttactgaacgtgtaagtggccccgatagcttgtgcagtgtcttctaccacgtaaagtttgtgtcggcgggctatagccatgagtggttccatgtctgcacattgaccgtacaagtgaacgggaacgatggctttcgtgcgaggagtaattttttcctctatttgggtaacatctatcgtgaaacggtctgcgacacaatccacgaaaatgggttccagccgtaaaagagcaataacttcggctgtagccacgtaagtatgaacgggtacgatcacctcgtctccgggttgcaagccgagtgccattaaagcgatttgtaaagcatccgtgccgttagcacaaggaacaacatgctctacttgattatacactgcaagatgttgggcgaaagtcttcacctgggggccgttaatgaaagccgtggtgtcaagtacttcctgtatggcgttatttatttcttcccggatgcgttcatattgtccgtgaaggtcaaccatcgtgattttcattgtgatatataattagatttattcttctattttttgaactaacccgttttgtaaatgatagtgttgtttgctttccgggcattcggctattcccttttcgtcaaaatgaagacgatgcccgtattcactcatccaaccgatttgtttagccggattaccaactaacaaagcatatgcaggaacagtttttgttacaacagctccagctccgatgaaggcgtaagccccaatgtcatgcccgcacacgatcgtggcattggctccgatggtagcccctttgcccacgtgcgttttggcatattgacttttccggtttactgcactacgaggattggtcacgtttgtgaatacgcatgatggccccaagaaaacatcatcgtcacaagtgactcccgtgtacacggatacattattctgtacttttacttggttcccgagaactacctccggggatatgacgacgttttgcccgatgttacaattctctccgatccggcaattactcataatgtgggagaaatgccatattttagttccttttccgattgttgcgccttcgtctacgatggcggtctcgtgtacgaaataatctttcatatctgaatcattttactggcaaagatagtttttctatcaaagtattgaaagaaacgggagtgatgtttttctttgaggaaataaaaaagccgccttgacgggcggctttttcagtttgtggtttaggtttctagtaaaatttgtatcttgtatcaaccactccggcattcttcactaatgcgggaagaatcaaacggaacttggtgtatagattcgtttgttcgatgcttctcttggcagcttcaatttgttcgggagtaactgtttcaacagttttagagtttacaaccacaacataaactccttggttaccgatgatcggtttagaaatctcattttctttcattgtaacaacttcggccgtcagcacgggttcaataccaactccgggaacttggaatgaactgaaactaacatccgtggcatccattacctctgcattggctttttgtgctacagaaagtaaactttcacttccggaaatagcattagtcaattccttggcaatgatttcgcctttctttttacggataagttctgtgcggatagctgcagaaacagagtttagaggtgcaacgccttcttcttgaattccggttagaaccacaacagagaatttgtctccagcctcaaagatcggcgatttctctttggtcgtcaggatgaaacccggtttttcagccatataagcctcgcggataatatctcttgcgttgtcaatacctgcaatctgataatcgtttttacctaagtttgcgatacgtttggtttgattattagcagttagagctgcctcaaaatcttctacggtattgatattgtttgcaaaagtacgtgcgtcgttataaatcttgttgatcgtttgttgggacggggtaatttcttttgcaacgattccgatttgtaccttatcaacaggttttgatctgtctgttacctgcaaaatatggaaaccgtaatttgatcttaccactttcacctcgtttttgttagagaagaacgctgaatcggcaattggttggagcatctgatcctgggtgaaccatccgaaatctccaccatttacagaggtattctgatcggcagaatattgtcttgctaaagcatcgaaatctccgcctttacggattaagcctgctaaactatcggctaatttctctgattgggccatattgtttgatgcgatcaagatatgacgggctctcactgagtcgggtaatacacggcggtcggcaacacgaacgatattgtaagcgttatctttcagataaggtccgaatacggcatcgctcttttccgtgaacaggaattcatccagttcctcgttatccaattctccctttttgtaatatttgggttggaatcttttttcagatgaaaggttggcgaattcaagtacattctttgcctctgcaaactcgggtttcaagtcatttacccagttttccgtttctttaatgtcttcggctgatgctgtgatgtcaaaattcacgtaagcgatttgtctggcttcttctcgttcaaacaaatatttgtgtgaattataataatctttgatctcgttagctgttacttttactgcagagtcgctaactgtattgtagcttttcatgataaagctgatgtcagctgtcgttgctgcactttctgcaagttctttggcttgagcatctgtaacaaacaagctttttgctaacagagtattgtatttttcttgtttacgagccgtgtttacttgctcttccatgttcaaccaatattccttttgcggggtgccggcaggagcttcgatcaattgtttgatgatcagacgggctctttctttgtctacctgtcccgtgttgggatctgcgaataactggctgacagctgggttcatgttgctccctaataagaaatcgtataactcgtcaccgctaacgtccaaacctaattcctcgtattccttgttcagaatgatttcggaaacaatttgattccaggtattttcccggatcattctttgttgctcatccgttaaggcagataaaccgttcatgcttttgatgaaatcttcattcttcataatcttttgttgatattcttgaatgccgatagtttcaccaccaacttctccaactttatttctggaacgattgataaggctggcgccagagctaagagcatcaccaacaataaacgccacgagggctaatccaatcacgatactaacaagtactccaccgcgatttctaattttttgtaacgttgccatttatattaaaattttatgtttttacacacgaatttattctattttcgagggtacgaatatataaaatggattggttttatgcaaataaatttcaatccctttcgtctattgccctattccttctttttagtttccttttttgtctctttttttgttgtcttcgaggccgctttttttgttgtctttttcgtcgtttttttcttgcagtccccccctttttcaataattgccatggtttcctcaaaggtcaatttgtcagcttcttttcctttgggaatcttgtagttcactttattgaaggtgatgtaaggtccaaaacgaccgttaagaatttgtaccccgttttcaaattcctgaattttcctgtttttctcgatttcccgtttctcgttgattcgttcgatagcggtttcaagtgttatcgttcccgggtcgtcaataccttttttcaaggaaacgaaaagttggttatgcttaatataaggtccaaaacgaccgatgccaatactgacaggcttctcctcaaattctcccagttgacggggaaacttgaacaggtctaaagcttcttccaaggtaatggtttccattagttgccctttgagtagtccggcataacgtacgctttctccttcacctatctgagccatcggcccgaaacgtccaattcgtacgacaacagtttctcccgtttgtgggtctttaccgagttctcgggctccggtgttccgttcggattctttcagcgttttttccacatttgcgtggaagggctgatagaatgttccaatcatggattgccattcaacctctccttcggcgatgtgatcaagggcatcctcggcatttgccgtgaagttataatccatgatattcatgaagtaattggaaaggaaatccgtcacgaccattccaatatccgagggaaacaattttttcttttctgcgccgaacattcggttgatctttttgactttaatatcttgtcctttaaggtctatctggtctagttgacgttctgcgccatcccggctttcccgtaagatataaccccggttttgaatcgtggtaatcgtgggggcgtatgttgaaggacgtccgatgcccaaggcctccattttcttcacgagactggcctccgtgtagcgggggggatgcgtcgtgtattgttctaaggcttggatcaaagagcgttgtaattggtctcccttgtgtatagcgggtaataaagcagcttcatcgtcttctttctcatcatcaaaagattccatgtacactttaaggaaaccgtcaaaaatgatcacttcacccacggcctcaaacgtgtatttctctccggaaatagcgattgttatagttgttttttccagttcagcttctgccatttgagaagcgagagtccgtttccggattaacgagtaaagttgttgttcattcttgtctccgctaatcgtttccttatccatgtaggtcggacgaatagcctcatgagcttcttgtgctcctttcgtcttcgtggcgaaatttctgggtttagaatatttttctcctagcgtgttacaaataacggcttttgccgcaccgatagccagttgggataggttcacggagtctgttctcatgtaggtgatgtgtccctgttcgtatagtttctgggccacggccattgtctgtgaaacagagaatcctaatttacgggatgcctcctgttgtagcgtggatgtcgtgaacggaggtgccggtttacggctactcggtttagtctcgacatcacttactgaaaatgtcgccttcttgcaatgttccagaaagttaaccgtctcttcctgcgtggagaaacgttcggataattcagcctttaaagggattgaattaccacttgcgtctttggtttcgaatgttccggtaaccttatagtatttttgttcaacgaaatggttaatctcccgttctcgttcaacgatgagttttacggcaacggattgaacccgtccggctgacaaggaaggttttacttttttccatagaaccggagagacttcgaatccgaccaatcgatcaagaacccggcgggcctgttgggcatccacgaggtttttatcaatgtcccgggggttattgattgcgtgtaaaatagcatcttttgttatttcgtgaaaaacaattcgtttcgtgttctccttcttcaaccccagaacttcaaataaatgccaggcaatagcttctccttcgcggtcctcatcggaggctaaccaaactgttttggcttctttagcaagttgtttcagttcttttacaatcgctttcttgtcgggtgatatttcatattttggttggaaattgtgttctatatcaatccccaaatcttttttttcaagatcccggatatgtccgaaactagattttacaacataattctctcctaaaaaacgttcaatggtcttggctttagccggagactcgacaattactaaattttcaatcatatacgattttcttttacatttccgtttcctttcgaaacggatttatcgctttttttaagctgttcgtcctaaaattaaggtgcaaacttacgtaaaacaattgaaaatgaaaaactctacccattttttagtaaaaaactcactccaaaatagcgaagaggatgttccttggaaacatcctcttcaagtatactattatgagtttttcggagtttatttctccgtatttgtttgaattattttttgccaacgggctttttgcgtatcgtttgcttttgccaatgagccggataaataataagctatcatttgcgaattttttcccagtttcgggagttctttttcgcaagcagccaagatcttgtcaatattttctgtcttcacggcctttgcgatagctaaagaagatagtaaggttttctcgtttgataactttaaagcttttacttcccgtccgatagcgtccaaacgttttacatcggttttttgaccacgtccggcgataaccattaatatttcacggaagagaccttcgctcaaacggttatccactttctctttgccaatggtttcgttgaatttgctccggttatcaatcaagaattttgctgcttccgagtctttgggacttaattcgctgttaccgaaaatgaaccaataatcttctgatagtttttcttcatcggtagaaatttttaacaattcgtccacgatggcttttgcgttcggatcgtaattagctaccataacttgagcgtattgagctaaaaatgctttatcccggtcgccattgttgtattttacatccaaaactcctagagctttattatcatcaaaagactcttttaccctttctatgaattgttcgccttcgccaccgccaacaagtttatgacggatcgtcccgtccggattcacgatcacgaaagttgggtaagcacgaactccaaatttctttgccaattcgggaccttctcctttttccatatcatatttcaagcaaatgaaattcagatttagaaagtctccaaccttttcttgtttgaatacagtttctgacatgtacttacaaggaccgcaccaagtcgtgtagcagtcgatgaaaagtttacgtccttgttgtttcgcctttgctaaggcgtcttcataactgaggtcttggaaataaactcccacgtgagcagctatcttcaagttttcaaaataattttttatataagctttgccgttttcatctgcgaaacctaagaatttatcctctaatacgataattttattcaaatcttctttcgagatatttcccctaaccgaattgattgcattgaagatagaccaaagttctccgtttttgttcgattcaacctgtccggccagctcaattactttattgatgttttttcccagacaagcttggtttagttcgagagaacgagttaatgtcgcttgatcggctaaatcgagttttgttaattcttcttgaatttgttgcaatacctttagaggttcttttgtatttgggcgcatggtattgttgatggcattcgtgtagcagcttgtcaggtatttgtctactttctccttaccgatattcttgttgaatgtaccgatattatttaaaacaagtttgaaattgtcagaaccatatggacttctttcaagaataggccagtattcttttttcattttatccttttccttcaatacggcatccaactctttaccaactttttcactcttatctttttcatacgcttcgttcaaaacaacggagtaagtcatcagttgttttttgttcattttccctttctcgtacactttgttcaagtaatcgagagaagttttctcgtttaatcctttttcaacttttgcgataaatctgtccaaatctccaccgcccacaattttatgttgtactgttccatctgggcgtagaattaggaatgttgggtaggctctaactccaaatctttttgccaattcggggccttctcctttttccatgtcaaattttacacagacaaatttgggattgaaaaattctccagctttttcttgtggaaaaatagtttctgtcatgtacttgcaagggccacaccaagaagtgtaacaatccatgaaaacgagtttgttctcggcctttgctttggcgagggcttcatcaaaggtgatatgctcgaagtttaccccttgtccgaaagcaatgaggttaagcatcaataaagtaataattgagataaggcttttcataattgaaataataaatattaataaaatttgtcgcaagataaaaaagaaaaatgaggggtatcatttattaattagccattaacgaatctttaacaatatgaaagcctgtaaaaagcatgtttttgtgttatacatataataagagaggcctttcgacctctcttatttgaaattaaagcccttccagagcatcgaggaatttaacggtttccggatccgagggacggctcattttagcgttaataaccttcccttcccggtcaattagaataaaatgtgggatagccgttatcatatacgcatccataaaaggatcaaatgctccggcatataattgaataccttctaatttttcttctttaacaactttctcccaagcgcttttatcttgatcgcaagaaacactcacgaaacaaatgtttttccctgcgaatctttcttctagttttttcaacatgggttgctcccgacggcaaggaccgcaccaggttgcccagttgtcaatatagacatacttcccgacgaaatcggataagtgaacttccttcccgttgatatccttgtaagtgaatgaaggtgagggttgtcccggggcaattttgtgccatttgtcacataattcgttgaaagcggctattttcttcggggtgttaactttagctttgtagataggagctaactcttctaacttgccgattccttcacgtgtgatgtattcggagataatgtagtctaccatgaattctgcaacaaccggattcttgaaatgttgacaaacgtaattcaattgttctttaatatacaagaaatcatcgaattccggcatgttgttgattgtgatataggacaccatctttttcaggtattcttgataaacacccatacccagcatatcttcatcttcggtgaaaacttcggctagtttattaaaataggcatcgggatattggtattcgaaattttcgatagcataaagatgagcggaacgatattccagcaagctactgaaaacagtgtactttaatctctttttttctaaattattaaagtagttatcaaatccttgagctgccagatttttttcaaatttttctagctgtttatccagagaggtggcaaattcggtttcgtttaatttgtaatcgggtgtaaaactgaaatccgtgttattcaggtactggttcttttttgctccatccccggaaaatgtcggtattgctttttctccctccatttttacggaaagatcaaagctttttcccggttctatgtataataaaacatgtttttgtccgaaaaacatagcaccgtaagctggttcaaacttttccggcaatgtaaatgtggtggaattgtttgaggttaaagcctgtttataaatagaatccttggtcattaatactgcttccggataaagttgtgtatcctcgacatgaaaactgacacttgtttcggatcctgtgttgcaggataccaaagctatgaacatcatagctaaaatagtaagtttactcctcataattcttatttaaaaatcctttagtctctccttgttttgttcgtctatttgtttcgctttttgagtgtattcgttggctttgttctggtctcctagttttgcgtagcctttagcgagtacattatagcaattcgtgacgatccaatcatttccaatttcgttggcttgttgtgcttgataaagataatccagacagcgttgaattagctgtttgttttccagatggtcgatcgtgtaattgagccattcttttgtccaatctaaagatttgacgagatgatgttctcccaagtagattaatcggtagattaactcttccgtgtccctgtttaaataactttcttcaatccgaacgtaagccaaatattccgggaaatttttcactggattgttcagtgttacttctaaatctttaagttgctttttcaatttggcaacagtgtcttggttttgtgttttgaaaccggttttgataatatcgctaatttggtaataggcgttaatagctaatgtccactccaaatcgtacctgtcgaatccgcgttgtccgaattcatttagatgcttgagtacaaattgatattcttccgtgcaggggtgttgaatatattctgctcccagctcccatatttgtgggtttaacaaactgtcaacggggaattgtttcacgtacgcccgtttgacatcagcatatttttcgttttctccggattttagtaacaagtctagataagtcaggataaaattgtaatcccgatttccgtccagatattctttttccaatgcctgccatgtttttccgttcacaccattttggatagcctccagaatatctttggcggggaatgcccccacgatacgttgcattatggaaccgtcctggcgaattaataatagggtagggaaggcagaaatttgatctcggtatttgcgagcgaattccaatccgtttggtttttctacatcatactttacactgacgaatttcttgttgacgtagtctcccacgtcttttcgcgtgaaaacttcagtggctaattttttgcaggggccacaccagcttgtgtagcaatctacaaaaattagtttgcgttgttttttggcttttttcaccacttcttcccaaggttcattatccagaaattgaataccttttcccgcttcttgagcgtacacaacaatagtggcaaccagccatacgcttaacagtaaaatttttttcatacaattagaactattttgaatattgataaaatctttatttcttgtttcctaatttttgattggctag

SEQ ID NO: 10757 - DNA, 14722 bp, Unknown
  gut microbiota DNA sequence
acccaacttactttcgagctgatgtctttcaaatattcagcaatatcaatacaacgctttaagtgagcttcgttatttaaatttcgtgccagatactttagcatatcggcaaggaaaagatctcgatccgtgaaaccacattcaactaacacgcataatctttcgtataattgatttacatcctgctttattttgctttccgaaagcgaaagttcggcaagggatgtgggaaatccttttaccggcttttttaacaacgtccgtaggtaatcaattttttcttgtagcatggcaagtgtatcctcgctatgcgttttatttgaaacaagataaatagaatttacggcaaatcccatctcttcacttaacttgctttccagctggtagcgattcacgagtcccttgctatctaaatcgtcgatatgttcaatcacgaaacgaaattccgggctgaaaggagtctgtatcacgaatttacccacgatattccaaatatcttggttaagcaaactgtctacgggaaaacgggaggcatattctcgtgcaaccttttcatactcttttcgttcgactgcagtttccagtaaattcaaatacttttggataaaactccattcccggtttcctttatcgtactctttttttaaattgtaaatcgtgttcccttgcaaaccttcttcgatggcggcgatcaattcatctacggggcggcaacctgatactttgtgaataatttcaccttgtgcggtcaggatcagcatggtcgggaaaactttaatttccttgtcgtattgtttcccaaccgttaatccctctcctttctccacgtcgtatttggcattaacgaaacgagagttcaagtattcccccattttttcttgggggaatacttgcgtggataattgtttacaaggaccacaccagcttgtgtagcaatccacgaaaatcaatttattttcccgttgcgcccgttgcagtacctcttgccacggacgattatccatgaactgggtaccactttgggcgaaagtcatgagtgagaaaaatagaattgatacgattatatagactttcttcatattcctattttattttacatcacgcactaaacgtacacttaatccttttttcgttaacatggaaaaacgacgcacatccgaacgattgtaaatcaccattcgagtccaagcgtatccttggctctgggaatccagagtggcactccaatagatgccatctatacctgtgttacgcacgccgcttcctccggtcgtgtagtaatagccggcacatcctaggtttaaaccgcttcctgtgctgtcctgcatcattaatgttcccatctgatcgccacgccattcttctgcgttagcttcctttgctgccattcctagactttgttccaacgctttccaatcctcgtctgtcggtaagcgccattcgtcaactgctaacgttttggcggtttcaaaatcgtacaagtaaccgtattgctgtaagatatcatctgtgatttcttgggggaaacaagtaccgggagctgtttccaatttcatgttctcgcacatccaatctagtttcccgtaacgaacccagtgatatgtcaccggctcttcccctcgtgtgtccacccatgtgcctttcgcctccgggcgtactgtgggtagtgcgttatctttatcgtctgagcaagcgtaacccagcatgccaatcatcaataaaatataaatcatgtatttcataattacaccgtttttggaattaataaacctttacccccaatcgttcgaaaatctttactagggcttctttcttttgatgaactagaggatacagttctttatcgtatttctcgtcaaattcctctttggtcaatgcgaacacctccattacgtaggcaagcagatcatattttttatcatagaaactacgaacccagtcatacctaaatgtttcgagaaaacctacttccaggggagtatcctcgtagtcagggtaaattccatactgttcttgtgaatattgatagaaatcgttatactcgctatccttcacttgcgtgtaattcttggtcatgagaatagcaatcacagatctactataagcgtattgggccgcctcatccatatcataaaaatgcttgtaggcaaccaatgaggcgttatacccggcataagcactttgctcgacttccggatcgtacccgctactccatgcggaagctttactgatataaaattgatccaccataaaaaaagtgtaggggtagaatgcgggagccagtctggggagtatcttttcttttgcgaactttgctgccagttccttatccttcatatcttttaggtaagtatatcgtaataaagcatcttcacttgttccctttacctggtacttcaaatcgagaatcacgcattccggatctgatcccgaaggagtggtaatattacgataatataacgaatcattaaaaatcagatagcaacttgtggcgtcatagaaatctcttcgcaccttcatctcctcttctgaagagaaatcgggcatatcaaacatattccggtcgttattcgagggtacgacatcctcatcatttgagcagtaccaaaatgcactcgctaaaagcaaaagtaaaatataatgtttcatggtttattcgattattatttagaatcacgttcatttctcgggttatcgggcataccgtaattggactctagttctgtctgtgggattggtagcacccaagcattgtcatgcgggggtaactcaaaggtacgttgtagcgaaatcacatagtcgtatatcccgtaatcatatttgaataacacgaattgattggtcagtgtcttttcttgcgggtaaagctcgttcaccatgtagcggcgcaaatcgaaccagcgatgcccttcaaagcacaattctagtcgacgttctaaccgaatggcttccacgagatcttttcccgtcagagagcgatcctccgtgtaattggccaatcgacgttctcttatcgtgttgtatgcgtttagggcttccgtcgtgtattcgttgcctaaacaagcagctgcttccgctaaattcaaataagcttcagccgttcgtaaaacaaaattgtcggagatgtcgcgagatcctgattttttacttgcctttttatatgggtacaccccttctttgggtaaatcgaaaaatacttgtttccgcaaatcgtcttccgtgtaccactgcatcaaatcgttcgatacggtaaaagctccggaaccaaccgataggcctgctcccacgaaattaccacccatcgtgaaaacgacctccgggttggtttgagtcaagaacgtggtaccttggtaatcgttcaaatctgtcaggcttccttgttcctccaagcacgctttcgcccacttcaaggcttccgtgtaattctgcatgtagagatatacccggcttaacaagaggcatgtggccgtgtgacctgcacgggttaccgatttgcgggattgtccttttaagtgcttttcggcagtaagtaaatcttccagtacttgttcgtacgttttctccacggtcgcacgcgtgtaaactttatcctcgatatttttcgttaatttgatggggacagccaaatccgtcttagccgaggtgggtgagtagggtttcccgtataaattcgctaacacgaaataatatgctcctcgtaagaaatgggcttcccccttgatccggttcacgttttgttggtcgttctctgtttggatcgtttgattgtcaatttgacttaaaataatgttagtaatattgatatgcttgtacaaattaatccaatcttgattctcggtccagcctaccgttccctcgtgatctttgtccacatccttttgccacgtgtagaaaccgtaaaacatttttagaaaatcctctccgtagtaatcataagtgcctgtatttcgtacttctgtttcatctgccatgaaatgaacgtacgggtaatatgtctcctttgccgttgagtaatacgtgtaatcatgtgttccggtgcacttcatgtagcctgatccgataattaactcgtccaaatccgagtaggactgcacatatgcttggtcatgcgaatactcggttaggaaatcgttgcaagccacactcgtgcaacataaaaggatgatgagagaaaaaaatctatatcttttcatgtgtatattaatttaaaatgaaacatatagtccgaaagaaaatgtggggcgttcagacaactgtattgttgagaagccgccttgcgttggggtttgccctttcaatttcgaggaacagaaaataaacggattcgtcgaagaaagcgacaattccaaccgttgcaacttccattttgaaatcagctcgctggggaatgcgtaagtcaaactcatcgtggtacatttcaagtaattggcactcacgatgcggatgttgctgtaattatacatctcccatgccgatcccccgaaagatggtaataggtcgctatatttcgaccagtgtatatcataagtacgatttcccccgtttataattaccggaatatccgtgtacatctcgtcaccggggcgttgccagcgtttcaggaatgcccggttcacgttttgctccggattgaagttctggttgtcgaataatttgaataatcgggtttttgctcccagactgtaagataacgttacgtttaaccggaaattcttgtaagtaaacgtgttgttgatacctcccgatagcttcggttcgcgcgagccggatgcctctaataccgtggtgaaaatatcgtgtttgttttttccgtacaaacgttccggattctccttgtaatcgtagaacaacggccccccgtccaccgggctcaatcccttgaatcgatacgagaaaaacgtatttaccgggttccctttcgtgatcaccgtaccgtcgaggaaatgctccacgtcatattgatccgtcgagggtttcgtttctactcggttaaaagtttttgagatagaggtagaaagtgaccaacggaaatccttaaattgaacgggagtcatagtcaacgatacgttgtatccccggttcaaaatcttcccgctattcaccgtgtaagaatccattccgttcaccccggaaatcttctttgccatgaaagcatcctttgtttttttgtaatagaaatccgagcttaccattaagcgatgatccagaatagagaactcaattcccgcattcaacgaactggttcgctcccattgtaaatccggattcgggtaaatagaaacctccgacaccagctcatggtaataatcatccaacggcaactttttgataatcatttccggagactgtccttccagcatattcccttggtaaccgtaagagaatttcagctggagaaaatcaaagaatcctgttgcttggaattgttccagcggattgtatgacaaggaggctgaccacacgggcagcaacttatcattactctgcgaaccgaatcggttcgatccgtcataacgggcatttgcgttcagcgtgatccagttgcgataagaataggagatactggcgtaaaccgctattaagtttgttagattatctgttaatacaggacgatttgccaacagccaagcgtcgaagaccgggtatactccctgttcgaatgtagcgaactgtaatccccgatcgggataatatccccggttcgtgatctctgtgcccacgtattttgtggagctggcctcgaaacctaacgaggcattgatgttgtgttcctcggctaacccgaaatatttgttggcatccaattgcaaacgagcggttaccgattcgttgcgtgaactctgttgttttaattctcccccggcgggtaattcgctttcttctgcgtcaatctctcctccgaactccccacggcgcatacttgctacatggtgtgtttcagcaccccagtacgagtcgatctccgtgttggaaaccgaataagctaaaattccgtttaccctcaaccaagctagtggtttgtatagtaaattggcttgaaacgccaggcttgaaccttcttgctcgcacccgctgtttgccaattcgtttaggatattgaagttgtagtatctgccagcttggggtttttggtaatagtgtaatgttccgtcctcgttgtagagaggaattgtgcggcttgtgttataggcgtaatcgatgggagccaattcactttggtaatacttctgcgaacttttgctaccgtcgatgcccaatgaagtcgagaatttctcggagaaatgaatatccaaatttaattttgccgtgtaacggtcgttccgattcgatttcaccacatcgttatcgtctgtataaccgatagatgcgtaatagcgaatcatatccgatcctcccgttaggcttatcgtgtgctgtgaggaaaaaacatcgttacctagagcagagaaccagtctgtgttcaaagattccatttttgcgacttgctcttcgaactcttgatatgaaatttggcgggcgtacaattgttcatatagatactcgtagcctaccagactcacgttgccagagaaattataattgctattcaataaatcccgggaaaattgcactcgctcttttgaggtcatcacgtcgatatgtcggtcgctgtaacgggggcggaatttgaatgtacctgtcatattgtagctcaccatcggagccccgatatgccctcgcttggttgtgatcacgatcactccattagccgctttcgttccgtatagggctgttgctgaggcatcttttagaacatcaatacgttcgatgtcttgtgggtttaacccggaaatagcattaccgatacgattaatatagtcggggttgttcaactcctcgggggatatatttaccgggtcttgctgtacaattccgtcaattacccaaagcggttcccggtttccaatcaaagtagaggtacctcgaatacgtaatttcggagctacaccgatttctccagagttggtcatggaaatcaagtccggaatttgaccttccagcatctggtcaatcgtggtaataccggggcgcatgatgtctgccgcttttactgaagtgatggcacttgtgttttttcgtttgtctacaacttggtaacccgtgatcacaacttcctcgatggtttgggtatcctcctcaagggtgatcgtcatcgctttgttaggagtggcaacgacttctttggttttcattcccacgaaagagaatacaagtgttattttctcttgttccttcacgttcaaggtaaaattaccttgtgcgtcagtggaaactccgattgtggttcctttaatcacaacggtaacacccggtaggggagttccttgtatatcttttaccgtaccggccagttttactgttttatcctcttgttcggatgctttactgataacgaaagtaccgttgacctctttgtaaacgagtttcgtgttgttcagtaattgtgatagcacatctttaatgtctttttcaaaaaatgtggcatctgtacatttaatttgttttgtgtagtctgcatcatataacatgcggacacccgtttgattctttaattgtaagagaaccgagtaaagatccatgttcttcacttttagggtgactttctgtgaagaagcttctgcataaaagcagaatagcatgacaaataataatgtaaatttcatttgatgtaaaaattttttcaccccatgcggaggaatccgcatgctacgtggattttttttcataactttgaatattaattttatggttgaataatcaactagagtctcgtgatcggcgccaaccagcacgagacttttcgtttatttgtttaattgtcttatgcttatcttgtgtccataaatgtcgaattttatacctgttcctgtttcaaaaacttctaagaatgattttatattcgaatatttttcaatagttccggagaaatgtcgtctttttaaatcttccgattcaaaatatatatctacattgtaccatcgagacaacgtgtgcatgatattttccagagtttcatcctcgaagcagaataaattatctttccatgctgtatatacacgagtgtcgacagtggtgactgaaatactgtcgtttgtcgtgttgtaaacaagatgttgggaaggggtcaaggatacggaatccccgtttcctgccttgaattgaactttccccgtcaccagggtgacttctacaaccgaacttttgtaatcgcttgtgcagaattctgtgcccagtaccgttacttcacctttatctaatttcacgataaaaggagattctgggttccgggtaacattgaaatagacttctcctttacaatataccgttcgattgttcgtgtcgaattgggagggaaaccgcaattctgattctgaatttaaccatacctgcgtcccgtccgatagggttaaattatattcaccccctctgggaacgttcagcgtgtggtattgtgtttcttcttgtggaggagcaatcgtgttgctgtgtacgcttaatcctgacgaatctatcttaagttcgctgttttttgtctggataacctgtactgcttcccggatgtcccagcttgttccatcggataaagttagagtggctttcttgtaacccggttcgattttcgaaacgggtattacttcgggtgcttcctgaatgaagaaaatggagatagaaagcagtagtacaatactcgctgcaatactccagccagttattattttgcgacgacgatatttctggaattgtaatttttggaaagccttattggcgtcatattttaaaacttttttggattgatcggcaagtgcattccaatttttatatttgtctgtcaagcgtacgtggtcctcttgtgaagggatggcgtctgccttattctctcccaacaaaattttcttgagtaacttctcggatatattatctatttcgttccaatgcgccataatattttgaatttactacttaaacaccggaggaatgaaaacgggtaacaaaattttgggtaaaaatgaagaaaaaaagagattgggacgagaccatgagatcatggaaaatcaaaagaagaaaataagggaaacgaggatgtaaataagtgatgttttgtcctattcgtaaatctttaaattcgggaatcgcattataagcagaacgctccagcactctccgagttcttcgcgtataactgaataagccctctttttttgcattttgatcgcattctccgacacgttcaaaactttggcaatctcttttactttcatcccgtccatgctcattttcatgatttcctgttgttgaggtgaaagttgagtaatgattgttctgaacttatgcaatatctcttcttcgatggctgaattgattgccatttcttcggttaattcctctttcacggattcccatagattctggtgcaacttgttcgtgcgggcttgatcacgtatcgtgtttaatgatcgggtatagactgcttggtaaagccatcctgtgagacttctaatattttgaaatgttgcagaagagtcccatagattgatcaaactctcctgcacaatatcttctacgatcacttcatcttgaatgattcgggaagcataattgcataatgccgggtagtaattctggtataatcttttccaggcgttttctttttttgcgtttatatccgatatgaatctaagctcatcatcgtgcatggaaaatcatttaatggttaaattatttcttcgatgcgaaaaatttccgatggaaaagcaacagaataaatacacctatggtaatataagagtcagccaggttaaataccggtcggaagaacacgaaaaaatcacctccccagatgggaatccattgaggcagaaaaccttcgtaaagcgggaagtagagcatgtctaccactttcccgtgtaggaacgaggaataccctcccccgtgagggaatagggtggccacttgtgaataactgtcactgaaaatcatcccgtagaatacactatcgataatgttacccacggctccgcagaaaattaacccgaaagagagaatcactcccatgggagctttttctttgatgaggcgtcccaggtaccaagcgatacccaccacggcaattaagcggaatacacttaaaacggtttttccccacttgccacctccgagttccatcccgaaggccatcccgttgttttcaataaagtgaattttaaaccagtctccgaagacactgaattcatccccgatcatcatgtgggtcttgatccagattttaacgacttgatcaatgactaataaggcaataataaaaattataagttttttccgcgtactcatctgtgtgataaaattttaaagcgactcttaatcgtaacacgattaagagtcttgtcccattttggcatccatactcaatgttgcatgaggtacggcgcgtagtctttctttggagatcagtttaccggttacccgacagatcccgtaagttttgttttcaattcgtactaacgcagcttctaggtgagcaatgaattttgcctgcctttgagcgagccgaccagcttcctctttggaaagaacagatgctccctcttccaatactttaaaagtgggagacgtatcggcaatgtcattcccgtcgctaccggagatcgaggctttcaacacctcgtaatctctcttcgccttttcgagtttctcaagaatcaattctttgaattcctgcaactcttcatccgaatatctagttttctcggccatagttgtaaagtttttgtctaagttaataaaaaatccgctatgtaatctttcccgtggaaaaatatccacttttacttgtagtaaggggaataggttacattttttggattttaataaacgtttgtatgtcgtcgatttcgatgggttgagcaccgtcctcggctttatctattaacgtaacgttctcagctaaaacttggctggcgatgtacgccttgaagttttcgacagcttcattgatctctttatgtttcccgatataaagattaattttgtccgtcacgttgaaatcactctcttttctcaggttttggattcggttgatcaactcccgggcgatgccttcttcatgtaattctttcgtgatgttgatgtccagggcaaccgtgagacgtccctcgttggccactaaccagcccggaatatcttccgacagaatttccacgtcttccagcgtcagttccagcgtttcagttcccacttccagggaataagttccttgtttctcgaaattgtaaatatcattttgattcatttcagccacaagtgcggaaatctgtttcatgtatttaccgtatttcggtcccagggtcttgaagttgggtttgattttcttcacgaggatgcctgccgtgtcagtgatatactcgatctctttcacgttaacttctgacaggatgatgttcttcacggcatctagctgggtcgtcatctcgtcatttaggatcgggatcaacagcttacacaacggttgtcttacccggatttgaactttacgtctcagcccaagtaccatggaagatatttgttgggccatattcatcctttcctctagttgcttgtcgatcattgattcgttagccaccgggaaatctaccaaatgaacgtccgtcgtgtatcgtcccgtaaccttgttcaggtcagtgaataagcgatccatgtagaacggtgcgatgggtgaggacaagatggccacagtctccaagcaagtatataacgtttggtaagccgacagtttatcggtggtttgctcgccaccccagtaacgtttacgggaaagacgcacgtaccagttcgacaagttttcgatcacgaaatcctgtatggcccgtccggcccgtgtcggttcgtatttctcgtaagcctcggttacctctttaatcaagctgttcaatagagaaagaatccagcgatcgatttccggtctctcgttaaacggaacttcggcctctgcatacttgaaattgtcgatattagcgtacaaggcgaagaaactgtacgtgttgtacagtgtcccgaagaacttacgtttcacttcttccaccccggcaatgtcgaatttcaagttatcccacggttgtgagttcgtgatcatgtaccaacgcaaaggatcggagccttgtttttcgatcgtgtcgaatggatcaacggcattacccaagcgtttggacatcttgttccctttggcatcaagtactagtccgttggatatgatattcttgaatgccacggaatcgaacaccatagtcgcgatagcatgtaacgtgaagaaccacccccgagtctggtccaccccttcggcgataaaatcagccgggaagtgtatccggttatcgatcaactctttgttctcgaacgggtaatgtacctgtgcgtaaggcatggctcccgagtcgaaccacacgtcgatcaagtctttctcacggtacatgggttgtccggtagaagaaaccagtataatgtcatccacgtacgggcggtgcaggtcgattttttcgtaattttctttcgaatagtctcccactttgaaatctttgaagggattctccttcatgattcctgcctgtatcgctttttctgtttcttcaattaattctttgaccgagccgatgcattttttctcagttccgtcttcactaacccatatcggtaggggggtaccccagtagcgggaacgtgataggttccagtctaccaaattctccagccattttccgaaacggccttcacctgtgctggcgggtttccagttaatagttttgttcagctcgatcatgcgatcccgaacggctgtcgttttaatgaaccaagaatctaacggatagtaaagcaccggcttatcggttctccagcaatgcgggtaattatgctcgtgtttctcgaccttgaatgctttgttctcccgttttaggaggatgctcaaatcaatatcaagggtcgggtcattttcagttaaattcggatcataagcgttcttcacgaatcgtccggcgaactcgcagtacaagtctgtgttaacgttatttttcaaatattctgggtcaatgtcttcgatctggaataagcgtccccgtttgtccaccatgggttgtttacaaccttctttgtcaattaattgcaagggggctattccggccattttggccacccggtcgtcatcggctccgaaagtcggggcgatatgcacgatcccggtaccgtcttccgtggtaacataatctcctaggatcacgcggaaggcgtcacccataggttgcatccagggaagaagttgctcgtaacgaattccttccagctccgggcctttatattcagccacgatttgataagggattagtttatctccttccttgtagtcttctaaagcaagaccttctgcttttttgttgaagtaggcactgaaacgatctttcgccatgataatagttaccgggcggaaggtataggggttatacgttttcacctccaagtacgtgatgttcggtcccacggccaatgctgtgttggaaggtaacgtccaaggagtggttgtccatgcggtgaaatgtacttcatcactgaaagcaaatagtttttccgatttttcgtcccggatcactttgaattgagccacgcatgtcgtgtccttcacgtcccggtagcatcccggttggtttaattcgtgcgtacttaatcctgttccggctgcaggggaatagggttgtatcgtgtaccctttgtatagaaaccctttctcgtataattgttttaacaagtaccataaggtttcaatataacggttgtcataggtgatgtatgggttactcatgtctacccagtagcccatcttgttcgttagatcttcccattcgcgggtgaatttcatgacgtcggaacggcattctttgttatagtcggccacggaaatggtcttcccgatgttttctttcgtgatgccgagtttcttttcaacacccagttcaacgggtaacccgtgcgtgtcccacccggcttttcgctcaacgagaaatccttgtaaagttttgtatctgcaaataatatctttaattgtcctagccattacgtggtgaatacctggcatcccgtttgccgaagggggaccttcgaaaaagacaaacgaggggtgcccctctctattcttcaagctttgctcgaaggtattgtttgattcccactctttcaagacatccttgtttacctgagagagatccaaacctttgtactcttggaattttttgtccatcgtgactcctgattttaagatattacttatttgcacatttaaaaaatcaagttgcaaatataccatttatttgtgaatctggaaatcctctcctttttttcatgcgttcattcttttagagggatataaatgatatagggaaagagtagtcctgatgatgcccttttctttcgttatttcaggataactaatgtatcaatacaggattacttccgtatataaaatttttaataagcttataaaatcttattaaaacgctattctaagcatagcgttttaatagggttttaatagcgttctaatagcgttttacatggaaatgatccgctattaatcagtgtcttatcctaaaaaagttgacttgttcaacaagtaaacttatgtcagtagcaacaaaatccagtggtt

SEQ ID NO: 10758 - DNA, 12677 bp, Unknown
  gut microbiota DNA sequence
gatctacaaaagtaataaaataaaattccttttcctagcctacatacataatgtatgcaaagaagcccaaaataatttatgatttaatggttaaaattcttgtcccaacacgaagtggaattgtgaaccaccagcaccactacgtcccggcacatcatcaaatccatacccccagtcaattccaagcaaaccaaacattggcaggaaaacacgcaaaccaaccccggcagaacgatacagattaaacggttcgaaatccttcaactcgtaccaagagttacctgcttccaagaagcctaaagcataaatcgttgctgattgtgccaaagaaatcgggtaacgcaactccatcgtgaacttggaatacaagctcgcgtctgaggatttcggagcaataaaagatgaaccggcattggtcaacgatccgttttcataaccgcgtaatcccacgtactctctaccatacaagctatatccagacattccgtcaccacccatttcgaatccttcgaacggagactttttgttcttatcatagtaacccaagtagccgtattgtgccgaagcatacaacactaacggacgtttttcactacgagtcaacggcatgaaaatctttccgctgaatttccacttatgatactcgatccatctatacttcacttgatccttctctgcctcgaaatgacgatttgagaacaaggaatacggcggggtcaatgtcaatgaaaatgtgaattcactacccattcttgtaaatagcgggttgtcaatagaacttctcttgataaccgttgcgatagacaagttattggaattaccatcactgaaaatataataaggccaattcttcaactgatagcgttggaatgaaatctcgttatacatcgtaaaccagttatccggccaattaatgcgtcgtcctaaccccacactaagaccataagtcaacatcaactgacgagaatcatacatctgggaagtattactcatataataagagttccggtaactactggaatatcccgtttgacgagagaaatacaatgatacactcaatgaattcggctttcttccacctaaccaaggttcacggaaagacaaactgaaagaagtatagtatttaccgttcgtttgagccttcaaactaaacgtctgaccatcaccctgcggcagaggacggtaagaatcccaattaaatatattacgaatagagaaattcgtgaaagtcaatcccacagaaccgatgatcataccggctccccatcctccggaaagctcgattttatcattcgctttttctactaaactaaatacaacatctgctgttcctgcttctgcattcacatttgccaaatcaggctggatttgctccggatcaaaatgccccatatttgctaactctcgggcacttcgtataatatcctcacgactgaataattccccgggataaacatacaactcccgacgaatcacatgctcgtgcgtacggttgtttcctttgatgattactttattaatcgtcgcttggggaccttcaaccacccggacttccaagttaatggagtcttctcctgatatggtctctaccggtaccaaccgggaaaacaaataaccattgttctgatatagattagaaacagcatcatcatctgacgtcatgcgctctccaagatatttactattataaacatcgcctttcttgatattcaacacatcactcaaaacatctgaagagtaaatggtattacccacccaagtaatattattgaaatagtatttatttccttcctgtacgtcgatataaatctttactcgtttcggtgaaatctgcaccacactatccgaaaggatcaccgcatcccggaaacctttctcgttatatttatctacaagaaggaacttatcttcatcgtaatttttttctatataattagccgacttgaagaaattacgcagagatttctctttcgtcttcttcatagctcctttcagacggccatctttcattaacttgtttccggtaatgataatctcgtcaattttgatcttgttatgtttctccacgatagcatccaagatcacgaaattactatgttccggatcatcacgttgaataattctgatatttgtgttataatatcctttttctttcagatatttttcaatctgcatctttagattcgacttcatcaagtctgtcacttgagaacccggtaacaaattcatcttttccttgattttattctcctccgcttttttcaacccaacataattaatcttggaaagtttatgacgttcctttatatataaagccaaataaactttatctccttcgatcttatctatggcaatagatacatctgaaaagattccatgcccatacaatctcttgattgcacgagtaattgtttctccgggaatctgtactgccattccaattgacaatccagccatctgtgccagataatcctcatcataattctcccctcccccaacagctcgtactccagctagttcataagttttaggtgaagaataaaaaatatcatattgttgtgtcgtatctgcgacttgggcttttgccccataaacacacagtataaagattaataaaagcgttatttttcctgtcatctgagtcacttttttagttgctctccggttaacccgaatcgtctttctcttttttgaaaattacgaatggccaaatataagtcttctttttcaaaatcgggccaaaatttatcaagaaaatatagttcagtatacgctaattgccataaaaggaaattactaagtctacattcaccacttgttcggatcaataaatcgggatcaggaattcccgacgtcgtcaggtaggtagaaaaatctacgtctgtaaatgcctcaacatcttctattttgccatcccgcacatcttgagctattcgcttggccgcagtcaaaatctcccatcttgctccataacttaatgccaacactagagttaacccggtattagatgccgttctcgttattaatccctgtaatttgttatatacctcttccggcaaatctgacaaattcccgatagccttcacccggacttgttttctcatcaaattatcagtttcagccaaaatagcgtccaccatcaaccccatcaacacgtctatctctttcttcggacgattccaattctctatcgaaaaagcatataacgtcaaatatttcaccccgatctccccggcagcctccattgctgttcttaccgcatctactccttttttatgaccttcccatctctccaaaccgtgacttttggcccaccttccgtttccatccataataattgccacgtgttccggtatattctctttatccataattaattgaaaattgaaaattgaaaattgaaaattacttttcactctccaataaaattaaccacattatttaaaatcgtttcaacttttagtttttaacttttatctttcttgtttctcttgtcctctccccaattcaatttattacgtaacgtttcgtaataactatgatcaggcattttcacaacattcattttaaaatcgcccgaagatataaataattcatgattatccgacattctttgcatacgagaatcagcactcaacatgaagtctcctgaacgactctccacttttagacggatttgcacgttaccgggcaaaatcaacggacgcatattcaaattatgtggacttaccggagttatgatcaagttatcgcacccaaaagccacgatcggccctccgcaacttaacgagtaggctgtagacccagtaggcgtggccacgatcacaccatcagcccagtatgtcgtgagatattcttccccgatataagcatgaaccttcaacaatgaggaacgttctgtctttaatatacttatctcattcaatgcataattaaattcagcaaaggggttatcttccatctcgaatttcaccaacgcacgctgttccacgtcaaactctccggcacacaaccaatgaatagcctgcggaatctcctcttgagctatattagccaaaaaacccaaccgcccactattgatgcccaacacgggaataccataattttttactcgcattgcggaatcaagaaatgtaccgtcccctcccacgctgaacaaaacatccgtatcctgatcaacatcatcctcataaaacgcttgaaaaacatcagaaatgccacatttttccttcaaaaaatcatagaaaggtttataacaagtcaaacaaacctctcgctcattcagatcacgcaacatttgtttgaaataaggataaaactcttcatgaatcacccgtccgtaaatcgcaactttacttatttttgaacacatctatctattttagattcaattgatttaaaacttcttacatttccataaacttcaacaactgcccgtaacgatctctcatctcttcattcatctcttcaccggaaacaaaagtatttttgatcacataacgataacgaataaaagtatccagaatcggttcgatccgggccgtattcactttaagagtaatctccactttattagaatccggcatacacgtaacatagcaactcaacaccttcgcctcgttatattccacgatttgggcaacctcggccaaagaataatcaattttatttacttccaacacgataatcccgccaggatcgtctatacacaaaagtttatcaatattatgcaagatgtctgttaacaaaatagctccctgatatacctctttccggttcaaaaccggtaccaccgataaaagccgtgaagaggcaaccccaataacatcatacatatgtacatcctcgtaaacgaaagtcatctccctaggtatatccaacttaccgatcgaatcatgaatactcccgtgcgcatacataacttcatcagacaacaaccccacgtacgtttctccatccaagacaggcaaatgagacacccgaaacaagtccatccatcccaatgcctggacacaagtatcttccttcttcaataccggtacaacatttgatagtaaacttgatgcgatcatatttatttcatttctcgccctaaagatacattattttccccaagaaattccactcttaaaataattttcaaatttcaacatcaccgttttcaattatttctatatttgccacgtaaatttaaaaacagtgaacatcatgttaccaaaatttcttattgcagacaattcccaagaagcaccagaactagtatatgttgtgcacacggaaaagcctcaatgtattattcaatgtgacatggatggtttctacagcaaccagaaaatttactggattgacgaagagcctctctgcacagacgacattgaatctctcatggaagaagcggaagaatttttcgaaactgaattagagaatcaagaagaattatatgacgaagaagaagacaattaattgtcttcttcttcgtataaattacaagctaacaaattacaagtttacgacaagcgcctgtaactttcaggggcagaaactctcccggcagtctataacgtaaaagacaaattttgctttctgcacaataattcgtaacttgcaaaactatttacgtacttacaaacctgaaattatgtacacgaaaagtgatctcaaacaatttaaacgcaggggaataaaacccgagcaaattgaaaaccaacttgaaaacttcaagcaggggtttgactttgtacagattcgggatgcggcaacaataaacaacggaatccacggtttgaatgacgaacaagccaatgaattcatccgcatcttcgaggacagaatgaattcgttgaaaatcgtgaaaatggttccggcctccggctccgcctcacgtatgttcaaaacactgaacacgtttttcaacacatacaccggtagcgatgaagactatttgaaattccggcaggacaaagaacccggaagcattttctccttcttcgagaaattaaaggaatttccattctacccacacctaaaagaggccctttataaagatcgccttgatttggacaaactactttggaagaaccagctcttggaaatcctggaatacatccttacccccaaaggcctcaattacaatgccacgcccaagggattaattgacttccacatctacagcgaccacatccgtactgctgccgaagaacacctggtagaagcggcactttacgccaacgacggtaaagaagctcatatacatttcactgtatcagaagaacatataggcaaattcaaggccctcatgaaatctgttctcaaaaattaccagaaagaattcaacttgaaatacgacatcacgtattctgttcaatcgcctgcaacagacacagtgagtcttgacatggaaggtaatctcgtgagagacaacgagggtaacatcgtgtttcgtcccggaggtcatggtgcattgattcacaatctcaatgacctgaaagaagacttgattttcatcaaaaacattgacaacgtggcccctgaccgtagtaaagctgacacggtaaaattcaagaaaatccttgccggagttttattgaaaacacagaaccagattttcaattacatgaaagttttgagcaagaaaagcagtattacagacgaaaatctaaatgaaatcgagcaatatatctacgatcaccttggttataaacccaaagagggattagttcatactgatcgcaaggaaagagtagcttatttaaaacaattactcgatcgaccattacgtgtatgtggaatggtgaaaaatgaaggtgaaccgggtggaggaccgttctgggttgaagacaacgagcatgcaacacgcttgatgatcgtggagagcgctcaagtcaacctgaaagatcgaaatcagaaaaaaatattcacccaatcaactcactttaatcccgtggacatcgtatgtagtacctataactataaaggtaagaaatatgacttgaccaaatacatcgataacacacagggattcatcaccagcaaatcactaggcgggaaagatattaaagttcaagaactacccggattgtggaatggtgccatggccaactggaacaccatattcgtggaagtcccgctatccacctttaccccagtaaaaacagtctttgacttgttacgttttgaacaccgtaatgtatttaaagtagaataaacgaatcaaaaatgttgattcgtgaaaggaaacctaaaacctaaaatttaaaatcaagaaattaatttattgttcatggagaagaaaaagaactacttactattagtacttagaggatgtgccatgggtgccgcagacgtgatcccgggtgtttcaggaggtactattgcatttatcacgggtatctatgaagagttgatcgagtcgattcggtcaataaacctgaaagcattacgtttgctgggaactttccagttaaaagaattttggaaacacattaacggaaactttttgatttctgtcgttgcaggtatcgccatatccatattttcactggcaaaattgatgaaatacttgctagaaacccacccgttatacatttggtcctttttctttggtctcatcgttatttctgccctcatggtgtcaagagaaataaaaaaatgggatatactaaccatcacctcgttaatcgttggtgccatcatcgcgtacacgatcacagtactcaccccgaccagcactccggatgactggtggtttatccttctttctggagcgatcgctatttgtgccatgatcttaccgggaatatccggagcattcatattgttgcttctaggaaaatatgaatacatcattactgccgtcagcgaatttaatattcccgttctactcaccttcttagttggtgccgttgcaggtattgtagctttctcacacttactatcttggttattgaaaaactatcacggcatgaccgttgccctactgacaggcttcatggtcggatcgctaaataaaatctggccttggaaaattacagacacagaactagttaacggggtcgcttttgatgtcgagcaaaacgttcttcccagcaccttcgagcaagttaacgggagtgatcctttagtatggcaggcaatcctcatgtgtatcattggtattttgctcatctggggtattgaaaagctagccgtagtagtaaaaaaatagtttataaactttataattcccatgccacttttcggattactcggtttccctttgggacattcattttcaaagacttactttacagagaagttcaaggcagaaaaaatagatgcggaatttgtgaatttcgaatctgccaatattggacagacattacaagtcattaaaacaaccccctcgctaaaaggatttgccgttacaatcccgtataaagaaaagatcattccttacctagattatatcagcgaggaggcccaaaagatcggtgccgttaattcagtgaaagtggagtataccattgccggtcccatcctgaccggctacaacaccgacatcctaggtttcaaagaatctctattacaatttatccagacatcccctacacaagctttacttttaggtactggcggtgcagccaaagccgtccggcacgcactcgcctccttgggaatagaagtacttacagtgagccgtactcctcattccccttctgaaattgcctacgatcaagtcgcccatttccttccgaatacccctttaattattaacgccaccccagtgggaatgtggcctaatgtaaccgattgtccggatattccttaccaccttctcacccccaatcactaccttttcgaccttatttataatccagaaataaccgaattcatgtaccgtgggaaacaacaaggtgcacaaattaaaaacggcttacagatgcttcatctgcaagccgattattcatgggagctctggaatactagataatcctgaatattatttcaagaagtaagctacttgttttgcctgagtcccctcacatactttgacaggagtcatcggtacgtcattgtaaggaatgaattccatgacttgtaacaaagcatattgttcatcttcactacaataagcctccaagcttaaattagattgtccggaacgggtcaatgattgtaaatcatcatacctgttttgctccaaaatatcatacaatcgtgaagactgattggcagccacatacactttatgtttcttcaatacctttcccgttggtttataaacgtaacactctttctttaccaagaatgccacgatcccccatgcagcaacacctaaaccgatcataataacaacagaagaaagtgtgtcactctgagccgtattaatataattcgcaccataccaaaggattgcagcacccaagatcaacaatgctaaaggcttgatgggagattttttctttttttctattttatctttatctacgttcaagagaacatcatcgatatattcaaatttactatcactcatgactttataatttttgtataattaaatagtttattttttctacatattcacgcatatgtccatgttcccgaatacaattcggtcaagacacaactctacccgctaataattaacgagtaacgtttttacaaataaaccaaaaaaatcatacaatgatttcgcgtaatgcaaagacataatatcctccgtcctgctttaacgcgaaagagtcgagataatcgttttcaatatacctaaaataaggagtaaaaactcttttatattcttctaaataaaccgaaatattatttttttgcaaataacgaaaagttggttgcacgtttgtcacatactgaacagtattgaccggtaatgcatttccgttcactgcagtcagcatggctaaccgttcaaaatcatccttttcatgtgaaataagtcgctcttgccttgttgcctttgctaaataacgggtagaatctatcccttgtccaagatagattactgccaccaaaagcaacacgcaatatttcacaaaaactttcattcgatatacctacaataatacatgacaaaggtaaatattttttcgaatatatactagttttattcattctttccctgcatcaacatcctcaatgaactcacagggatagtcagtttcacattcatctgcaagtaataaggcggttgctgagaataatatattgcccgtatgcaagacaccatcgccaccatattcccccggtcatccatgataggcccgccacttgatcccttggcaaaatccgccgtcatttccatccggttggcaaaaggatccaccggattcaacgtgatcgtccgagacacaactccttgcgtgtaagcgtacgggtatccctccgggttactcaacagatgcacgtttgcccctaccggcagatcacgtcccaaaggcatcgggaccaacacatcgtcacgagtgtcaatcttgaaaaaagccatgtctgccgcccggttaaaactcaaaacttccgtgatcgggtacacccggccgctttccgtggccacgaacataatactatcccgcggattcaacttcacctttgcatccagcaattcccagaacacgtggtaattcgtcacgcaaattccatcctcggacaacacgacagccgtggcccaaccggtaaccatttccggccctgccatagcccgcaaatatttattcaccgtcaacacgctttcccgtctccgcttaataatttcttccggcgccatcttccgtctttcctcccgtcgaggtttaacatttacgggagtactctctttcacccccaatacctgtttcttcaattcgtttatccctttaaacaacgacatcacaccctcccgtttcaacgaatcaagtaaagccgcctcctgacgagtataatcccggtacaccacaacctctttgctttgcgcctgagactttcctcccccaagtaaaataacaaacaacacgatacacaataatttgcaatagtatgtcatcatcttttccttttaattataatttatatatacatgacacgtcaaacggacaaaagaggtatacctttacaaaaaatacaatttttcctacatcgacttgatataaggcaagaaacttttcagggcattaaccgcccgactcaaatcatcacgttcgagaagtttatcacaaagtgtgataagtctttgtcgctgatctttcgtacccttcgtggccactgccatccccagactaaagaaacgctggtttacttccgcatcactccatacgggagcaagattctcaagcaaagtgattatcttctcgtaatctttttccagactcacatttgccagcgtgacatacgcctcaagatatttatacttttcatccggaagatcactatcgataatagcctgcctgattaatttaacatcatttatcgtggcattcttctttctaccgatataaatattctccaagcttttgccaaacacgtcgataatcttcttatctaccgattcgttacccacatttttatagaattgctttttatgatcgagtatatatttaaaattatcactcccatcaaaagtcaaggccggactctcgtatataaaccagtaatcttttcccgtcttttcattatcgggaagcgaaccgaaccaagtactcgcgacctcattcgcttttataaaattccccacattcatcagggcattaatatacttcaataccaaatctttactacaatttccggccttatacttactttccagtaatcccaccgccacatcatcaagcatcccttcagacaatttgccgacaaactcttctcccgttttagttccacccgtgaatttgtgtcgcaacgaaccgtccggttctatcaacatgtaagtcggataagcactaatcatgtatttacgtaccgcctccggcccttcgcctttctccgcattcatcttgatactgacaaaattcttatttacgtaatcacacactttctcttcacgcaacacggtttgattcattagcttgcacggtccacaccaatcggtataagcatccaaaaaaaccagcttattttcggcggcagctttatcaagtgcttctttcaaagacaaatcaagaaaattaatttcagaaacctttaccatcggccgaacaagaatttcatgcaagcgtttttccgtcgctttatccgatggaccggtcatattatcatcaataattgtcatatcaggccctagtaagatatatcgaggtatggaagtaaccttcaacaaatcaataaaaccatccgccgcactaatcatccattgcggttcctccagtttattttgagttatcacattcgtccacaattcatgagcgtcagcacgtttatcattacaaatactcaagaaaacaacatccttacctttaaacgtttcccgaagtttcttcaaataggggatctccgccatacacctcgattccgactcggcccacacgttaatataaacatactgtcccctgaactcttccagtgaaacaagattgtaatcccggtctataaataccagatcaggacatttatccccggttttaagaatcttactttgcgcacgcaccactactaccgctaccaacagtaacgtcatcaaaatcaacttcaatttcattatattctttttatattaaaaa

SEQ ID NO: 10759 - DNA, 114782 bp, Unknown
  gut microbiota DNA sequence
cccccttggcgcttggccgatccccgaccgttgagtcaaaaatgaagatgacacagtttaatttacacccccacgtgaactattcttacgataatcgttattatatagattttaatgttcgaacagatggttcttctcaattcggttcttctaaacgttttgctcctttctactctgttggattgggttggaatattcataatgaaaacttctttttagataatccttatgtgaatagattgaaattacgggcttcttatggaatgtccggtagtcaacaatttagttcttaccaagctatggagacttattcctattacacgggtgatcgttataatatttggatgggtgcttaccaaatggctttgggaaataagaatttggaatggcaaactacggataaatataatattggagttgaaggagaatttttcaatagccgtgtgagtgttactatggatgtgtatttggagaaaacgtctagtttgttgtcttcgttggagttaccttattctaatggttttgatagttacacagagaatataggagctgttgaaaacaagggatttgaattggctgccagcctttggctgttgcgggacacggagagaagagtgatgtggtctgttactggaaatttatcttataataaagataagattacgaagttatcagatgcgatgaaagcagctaacgagaagttagcaaaaaacggaggttctaatcctaaccgaattttacgggaaggtgattctcagaatgtaatttatgctgtaccttctttaggtatagacccaagttcgggagaagaaatattcttgaaaaagaatggagaagtaaccaaattatgggactctgccgatcgggtgaattgtggaatttccgaaccgaagtatagaggaaatttaagtacgatggtgcgttataaagatttgacattcaatatgtctttcggttaccgttggggaggacaactgtataatcaaactttgattgaccgcgtggaaaatgctgataaacgctataatgtggacgaacgggtgttcaatgatcgttggcaaaagccgggggataagaccttctttaagggaataaacgtgacaacgacttccaattattcctctcgtttcgtacaggatgagacttctttttggtgtcagaatatgaatttgacgtatgagttgagggatcaaaaatggatgcgttgtttaggtgtatcggtaattaatgcgacaatcgggaccggggaattgttttattggtcgacaattaaacgagagaggggaatttcttatccgttctctagacagtatactatgtctttgtctgttatgttttaaaaggaagaaattatgaaaaagatatttgcaataataatagcattgataggatttatcttttcggcttgtaatgattggttggatgtgaatcctcgtacgcaagtcaaaaaagatgttttactggaaacacagaaaggatttcgggatgtgttgacaggggcttatatccgtttaaaaaatgataatctttacgggggggaaatgatgtggggtacaattgagtatttagctcagcattgggtagttgcaaccggaacaaccaatgcttatttacaggcatataattatacggacggttctgtaaaagatcgattttcggctatttttaagacgtattatcaaacgatagccgatgtaaatggtctgcttgaagtgattgataagaaaaaggatattttcacgaaaggaaattatgaattgattaaaggggaagctttaggtattcgtgctctttgtcacttggatgtattgcgtctttggggaccggttccctctggagaaatttcagataataaaatattgccttatgtgaagagtgtaactaatgaaatacacgattattctacatatgagcaatttgtaaaattgttgttggaagatttggatgaggctgagcgtctattgaaaggggtagatccgatattggaatactcgatagcaaatttgcaggatgaaacgacgtgtgacgtggaggatgatttttggattgatcgtcaggtacgtatgaattattacagtgttttggcgttgaaagcgagattgtatttttggacacaagatatgcctaatgccgctctttacgcgaagaaagtaattgatgctaaagatccgtcaggaaaaaagatgtggacactggcaacaggggtaacgatggagagtggggatttggcttgtgcttcagaaagtattttcgggttgagtgtttatgatttagggaaaaaggcaagtagtagttttgatttgacagggaatggtatacacgagcagtctttcattatggattattatgcattccccacgggagagcgtactacagatgtacgttttgataaacaatggacttctttgtctaaaaatggacagtctatttacatttgtcggaaatttcatcaattgagtgataatccgatgaatgaacttcctttaattcgtttggcagagatgtactttatcgtgatggaggcaacttcttcaaccacggaggctaacggtttgttttccgaatatgcctcttcaagagggattgctaccgcagacttatcatctaataagttgagaacgttaacaaaagaatttaataaagagttctatgccgaagggcaaatgtttttcttttacaagcgggtaaatgcgacgggatcaattaattatattcccttgaatgccgaacgttatgtagcacctctaccggagagagaaatagtatataataataaataataaggatggatcatgagaaatatatatttatttgtagtactgcttttatcgatgataagttgtaacgaggctgatttaatgcaatatagtgacatccctcgggtatatttgggcggttatactcgtgcagcttctcagacgttcttttacgatgcggaagatgtagtgcgggatacgatttacgtgtacgtggaaacgatgggggggccgagagattacgatcgtttggtatcctttcgacaaatgacagtatatgatgtagaatatgttgtggaaaatggtgtaaatgtggattctactgttacagaaaatccttataatgctgttgccgataaacattttgtggcttttgacagtgaggaggcaaaaaaattgatggttgttcctgccaatgaggtaagtgctaatatcccgattattcttttaagggatccttcattgaaagcaaatgagtactatctaacgttacagttggtcgaaaatgacgagtttaaaatcggtggagtacagaaagacgtagaatacgctattacatttgcggataaattagtggaacccaatttctggggaacgaatccttatgctggcggatggtggttgtttggagattatagtactcggaaacatgagtttatgattgaagtttcgggagaaagaatcgatgacgaatggtacaacacgaaagtgaatggagtgagtggagcttcgaattattaccaagcaaaattcaaaacagcattggataaattcaataatgatcccgtgaatatagagagtggagttgctcctatgagagaaattgaaggggacttgacaagtaaattggtaacgtttaaataggcgataaaacaatgaaacagataaatagaatgatttggttattccttgtaagcttgcttccgatagcttgttttgaggatgataacaaatacgaatatgtgaagttagatgagattgtaattgaaggtatagagagatcttatgtacgtaaatctcatcaagatattttgtctattacaccgacggtaacgacggatgctgatgtggaatatgcttgggaactttggacttcagtccggacagatggaattatttacaagccggatacgattgggcgggagaaaaatttgaactatgaagtgatggaagatcctggtacctattatttggtatttaatgtgaaagataagaaaacaggagtgacaaccgtgtgtcgtagtactttgaatgtagagactcttaattcaaccggttggtatctgctgaaggacgaagaggtggctggagagatgtacacggactatgattttatctatgacgggggacgaattgataattggattgctttttacaataacgggaaaaaattgaaaggtgaagcagtaaaaagtatattttcttctaattattcagatcaactttccggtggagggtataattacataaacgttttgatgccggtgtccaaagaggaagtttctgttttggaagttagtaatggcatagtccgtttgccttttgaatctttgttctttgaatctcttgaagtgaagaattttcaagatatttctattcaaaatgatggaacgaatgttggtttggtaaatgatcatcggttttataatatgtctacacagaatgcaacctctttttatgcttcatacggagattacaacgtggctagtggtattatgagaggattaaacggaccaactttttttgatagtgtaacagaatcatttgtttacgtgtcttatggtaatataaccagatttccagcagtttcaggtgatttgacttgtaataacatgaatgccgatttattatggagtagtgttattaattttagagtacagggtacaaagtggtatgcttacgctttgatgaagaaacatacaggggaaaatccttatatgttgataaaatttagactaaattggggtgatacagaaaatcgtgtagagcaagtttacattcttccgtctacgcttaatttggtaactgcagagaggtgggctgtaaatgcaaactatggaattatttatttcgtgaaagatcaaaaattgtatagatatagtatagatagtggtaatgaagaggtaattttaaatattcccgcaggagaagaggtaacttgtatgcagcatattatttatcctaatctgatgtctgctgatgattatggctctgtcatagatcaatttgcagtagcaacttatgctaacggaaaatacaaagtgtggttgtatgaatttgatgccggaaatttgaaaccgttaagtaaacctacgtttgaagggaacgggcgtgttgcttgtataaattatgtttccggtaatagttctaatttcttattctaaattaatttaagaatttttagtgttgtgtagagatgatttaaaggtacttgaggtatactctagtacctttaaattgatctctgggattttcatgtatatatatcattgtaaaaaaaagaattatgaattgtaaatcgattattttattgatcgtagtattacttttttggggaaatgcagaggcgagaaagaaaaaagggaaaaaagttgaggaagtacaaacagagagtgcttaccggaaattttttaaaggtaaagcgtgtgagacggctaaagggatgataactcttcataaaatggacgggagagtttattttgaaattccattagcattgatgggacgggagatgttgatgggatctactatttcggaaattacaaataacggttttggtagtgttggagaaaagccgaaaggattgttatatattagttttgtacgttgtgattccgtgattagtttgaaacagttgacggcacaatatgatacaaacgaggaaaatttgaagcaacgtataaaagaaagtactattcctgcaaccataaagaacttcaagattactacttataatgaggatagtacggcggttgtaattgatatgacagattacttggtgagtgctgatgaggcgattgaccctttttctccgtgggctcctattctagccgggggagaacgtgtgatggagaaagaattcagacgagaaaactcacaagtcgttagtatcaaggcatttgaagacaatgtaagtgtaaaatcttctttgacatatggtttgagtctgaaaaataaggtaatgtatatttttcagcgtgaacctttcacggtggtaatgactcgtagttttatattgttaccggaacattccatgcgtccacgattggcagatccgcgtattgcgattttttctcaaggggtgtccgcgtttaatggggatagtagaggggcgcaagctcgttattatgcacaacgttggaatctggaaccgaaagatatggaacaataccggaaaggtgttttgacggaacccaagaaaccgatcgtgttttatgttgataatacgtttcctgagaattggaaaaaatatattaaagaaggtgtagaagtgtggcagatggcatttgagaaaatcggttttaagaatgcgattgtagctagagattttccggtggatgacgttacttttgatccggataatttgaaatattcttgtgtacgttattcgccttcttgggtagctaatgcaatgggaccttcttggacggatccgagaacgggagagattattaatgcttctgtatatttgtatcataacttggtgaagatggtacagaattggaggtttattcaaaccggtccggcagatgcgaatgtgagaaaaatagtatttgatgaggagacgttgggcgagtgtatccggtatgttgtatcacatgaaattgggcattgtttaggatttatgcataatatggcggcttcatcggcaattccggtggattcgttacgttctccttcttttactcaaaaatacgggactacttattcaattatggattatgcacgtaataattatgtggctcaaccgggagataaagagaaaggagtaaaattgactcctccggatttgggtttgtatgatttgtttactgttgcttggtcatataccccactgccggaagcaaaaacatccgaggaagaggttccagttttagaccgttggatcacggaaaagtcaggtgatcctatttatcggtatggtaagcaacaaatgtatatgcgacttgatccgagttctttcgaggaagacttgggtgatgatccggtgaaagctgcaggttatgggattcagaatttgaaatatgtgcttgcgcatttgagcgaatgggtaaaagatacggataaagactatacatttcgacaaggaatttacaacgagattgtttaccaatatgtgcgctatttaaatcatgtgactttcaacattggaggagtttatttaaatgagcgatacgatggagacgctcgtcccggttatcaagttgtatctaatgaaaaacaagaacgtgcattacaatttttattagagcaagtgaaagatttaacttggttgaacgccagggagttgagaaaaactatgccgttaatgggagatgttaccggatttttggaagatgagatttttaaaatactgacgaatcggttgaatgccgtggcaattaacgtgcaacaggctactgaaaaagatctgttgactcctgaggtttgtattcataagatgtatgatttcatttttgctcccacgaaacaaggtaaatctctttctgctgttgagaaaaaattgcaaataaaatttgtagcccaattaatctcaaattccggtgttgttgcaaaagatatgggtggacaaccttttactttggcaacagaacgtcagatggttgctatacctgaagcggtgaaagcaaaaagtcgggaaatgtacggggaaatacccgtgcaatatgtcgggatatttacaaatatcagtttacccgattataataatgtcaagaaggactggggtaatgttgagagacaaggatttgattttttgcaaccgattgcgatttatccggttcaaatgtcttctctttatttcaatatgttgaaacgtactcaagttttgttgagaagcaaacaaactcaaggaaatgatgatacgagaatgcattataagttgttattatacaagatagagcaagcgttgaaatagatttaggatgatttgtaaaatgataaaaatgaaaatcaaaagaataatatatctttttcttttcctatgtgtatttgtggggggaagaaatgacgtgtggggaaaagaacagaaaggaagcacggcttatcagcagctttttaatgggaaacgagtggttactagagaggggttaatgactttgcatcaagtggatggaaaagttttggttgaatttcctttaaatctgttgaacaaggagatgatgtttacttcggtgattcgctcaatcagcgataacggtgaaggtgttgtgggacagttttcgggtaatggcactgtttttacatttatgcggatagattccgttatacaagctagggtgaaagttcctagtttaggaagcatgaaaaatatttcgggagagcgggcagttgatcaagctttggaacaatccaataaaccgggaatttataagacatttcgtattttggcttctaccccggacgaaaaggctgtagtggtggatatgacctctttttttctagagcatacctcttatacttctcctttcccgaattatgcgggaaactctatgtttggtttggtgttccggaatcataaagtccaaccggatcgtacgatattatgtgggattaaagctttttccaataatattgtggttactgccgagcaaggatatgacgtagaccaattattcatgggatctatgcttgttaaaaaagatgaaaaagtatctgttgtttctgataagattttgatgttattaccggaagatgttatgcgtgttcgtaaagctgattctcgagtaggagtcgggtttgtgaaacaggcaacttttgccggtggaggggataagttgcagacgagttattggactacccgttggagaattgagcctgtggatatcgaagattatcggaatggcaagttggttgaaccgaaaaaaccgatagttttttatttggatagcgtgatgccatcggtttgggtaaaatatattcgtgagggagtagaagaatggaacaaggcatttcaggagattggttttaaggatgttgtgcgagttatacctttcccgaaaggagatacgctttttgacgcaacgaatattaattattctgtgatcagatatgctccccagtggttgtctactttacaaagtgccgtgtatacagacccgcggagtggggaaatcctgaatgcatcaatttatatccatgataatatggttgctaatgttacccaggacagaatgtttaatacgatgacggctgattcatctgtgcgtcgtcgtgaactttccgatcaacaattaggtgagggtattaaaatgatggtagcccgtgaagcagggttgtgtttggggttcgtgtataacgtgagtgcttcatccgtgatcccggtagactctttacgttcggcatctttcacgcaacaatacgggttgagttcttcggtgatggattttctaacatgcaattatattgctcagccgaaggatgtgtgtgcgggagtacgtttgacacaagagaatttgggtgtatatgattattgtctggtgaaatggtcatatcagcctatttacgaggagaacgaggatacggtgttaaatgcttgggttaagagtttccgcgaaaaaccgtactgtcgtttccgtagaaatccttctgtgtttgaatatgatcctgatttggattattacgatttgggggatgatccgataaaagctttgaattatcggataaaaaacatgaaggttgcaatacgaaatttgtatgagtggtatcgggaagaggataaagattatagttggaggaaggctcttgtggcaagaattcaatatgctttcactaatcagggtgtaaaaaatgttgcaagatatattggtggtattcgggttgatgaagtacatgctgatgaagggaaacctaattatgttcctgtacctaaagttaaacagaaagaggttttacgttatttggttggattgatgaaagatttgtcgtggttggataaccgagaaatgatgtcggaaacggagattaatagtcctgttgagaacagtgcttgtaatactattataaatgtgttgtttgcgagaatgccacaattggctttatgtgcatcaaattccgatgatccttatactccagaagagtatgtgaatgatttgtatcggatggtttgggaaaagactctaaagaatacgatgttaacggatagggatatgaatttacaattattgtttttagggaaagttatggcatcgtcgacagttgctgccgggagtggaattttggaacctgtaaggcaacaggggttctatttagcggaaccgggagccgagaggtatagtatctatgaaatacaaaaagtagtagaagtttgtcagtttatgggatggataggtatagagcccgaattggtacaaggattcggctctcaaccgaatattcttgctacgacatactcgacctcacatctttatttacaaatgttgctggagatagaacagttggtgaagagcagagttgaacatgcaacgggtaaaacaaaattgcattacgagtatattttgcataaaattaatagggcgaaaatgaaagaataagaggtttgctgtataagaaaatttaatacatgttaggtagaattccgggttacttattaattttcaagtgtaagtaacccggaatttattttaaattttattcttaaggtatattagaagttaatattttatcttttatatttgcattaaagaatgaatgtacatggttgtggattattcagaagatagggaattgttaacgttattaaggcgtggtgagatttctgcatttgtagatatatacactgcatattatgatgcgttgctgaattatgccgatcgtttgctgaatgatatggaggcagctcgagatgtggtgcaacaagtgtactataagatgtgggaaaaccgggatacattgaatatctctctttctgttaaagcttatctttttaaatcggtttatcatggtagtctaaacacgcttgctcatcaaaagaatattcagaagtatgagcgcgagcagttgaccgatttctatttttctaccgtgatacaatctcccgaagcggaagaggccttgtggaagtcggatatagaacaggctatacaggaggccattgctattttacctgaaaagtgtcgggaggttttcgtgttgagcaagattgaaggtttgaagaatcgggaaattgctgaaaaattaaatatttcagagaaaacagttgaacgtcatatgtcaatagcgttaagcaagttacgagaagaattagattggctattgcaaattattttatttttttctttttctcattgggggtaaaattctcttcggctgtctttagtgtataaaagcacgagaagatggatgacaaaaatatcaatatagaagaattaatagttcgagtactggagaatcgggctgattcggaagatatacgatatttctcgaaatgggtagaggagataagaaatcgggaatattttgagaagcttaagaaaatatggaatctttccgcgggagggcatgcgaattcggaaatattggaaataggagtaagagatttccgtctatttatggaaaaatctttgaagccgaaaaagcgtgtggtattgatgtggaggatgggttcggttgctgccgtgttattgatgatcctgtcttcggttttgtggctgcggagagatgtttcaaagatttcttcgggcgaaggatattccgtttcttcgggacggggagttgttttgaaattggctgataacaaagagatcatacttggtgattctttgaatctgacaggtgtggtaggggagtgggtctgtgttaataaggtggatcgtcggggaattgtatataagataaaagattcaacggaaatcgaagaagaggaattgtgttataaccaaattatagttccggcaggagaacgttttctggtacagttgtctgatggtactaaagtgtggattaattcggaaagttctttacgttatccggcttattttggtaagagtattcgggaagtcgaagcccgggggaacgtgtattttgaagtagccaaggattcgacccgtccgtttttagttgtttccagagagttgaccacggaagtactgggaactcgttttgaagtgaacacctatggggatcgggacgaagtgagcgcgacactggtggaaggaagtgtacgtgtaaacgtggggagtcgttttgttgttatcaagcctgatcagcaatttacgtttaacacgaagaatgggactattgaagtgaacaaggtcgatgctgcaaggaaggtgatgtggaaggatggcgtactggtgattgataacgaggcttttcgagatgtgatctggaaactggaacgttggtatggagtatcaattgtaaacgagacgggacttgtgtttgctcaatcttttagcggagagtttgaccgggaagatattcatgtggcgatagagtcgttgtgcgcaaacttgaatattacttacacgatggataaagatcgaattattctgaaaaggtaacaaaaaagagcatccgtgcgaccaacactatcgatgctctttgcgctaagccttatttattaataaacttaacatgacaaaattatgaaaaaaaacaagtattcgttgtctttgtcattaaaatttctctgtagagtcgttttaatgactgttttagggacaagtttcttatgcttttctgtaaaaggagacccggtggaacctcggcgggtgactttaaatctaaaagaggtttctctttccacgctgtttcaggaaataaagaaacagacgtcgtataaatttttttataacgacacgcaggaaaaacagatgggaaaaatttctatctctgtaagcaatgagacggtggaaaaggtgttggagaaggtgttttccggaaaggaatatacgtgtaagatctcgggagaacaaattattgtggttaaacgtccagagacaaaaaagtcggcacaggaggttgtgatagaggggctcgttctggaaagagattcgatgcctattattggagccacggtcttgttacagggaacgactaccggcgtggctactgatgtgaacggaaagtttcgatttgtagtgccgatgagcaacgagatttatatcgaggtttctttcttgggaatgaaaaaacaagttcacaaggttttgggattgcctaaccctaaaccaatgcgtatcgtgatgttaccggaaaccatgggtgtggatgaggtgatcgtgactggttatgccaatatccggaaagagagtttcacgggagctgccacgacggttacgaaagaggagattttaaggatttctccgagaaatgtgattgacgtgttgcaggtgttcgatccttctttgcgtatggtgaagaataacgagatgggatctgatccgaacacgttgccggaattttatattcgcggacgtaccggaatggatggtgttacccagttggataaattagaagctcaacaaggaggcgatatgtctaaattttcattgacgacaaatccgaatttgccagttttcattttggacggttacgaggtggaagtccagaaaatctatgatatggatccgaaccggattgccagtatcacgattttaaaagatgctgcagccacggctatgtacggatcgcgagcttcgaacggggtgattgttgtcgagacggtgactccggaactggggaaattgcaagtggcttattctttcaatgcgtctttgacggttcccgatctttccgattacaatttgatgaatgcggaggagaagttgcaggccgaattgttgtccgggttatatgatctttccacggctaacgggatgacagcttatgtcatgaagaagaattacattacgaaaggtgttgataccgattggatgtcccaacctttgcagaatcaattcaatcattcacatagtttgtatatatccggcggtacggagggatttcgtttcgggacagatttgagttataaccatgagggaggtgttatgaaaaagtcttatcgtaaccggatgagtgtggggatatatgtcgattaccgggtcggtaagttacaaatacggaataatgtatcgtatgatttggctaggtcgtcagattccccatacggttcattcagcgattacacgaagcaacaaccttattacccgatttatgacgataatggcaagctccttcagatgttagctatcggtataccaaatccgctctatgaagcgacattaggtaattttagccggggagagtcttcgaacttgacgaataacttgagcttttattggtttatcaatgatcatttgcaattacaaagtcaattctctgttacgaagaatgattctgaagacaaagattttacagatccgttgtcaacgaagtacggttcttctgacaatccttttactcggggaagtttgagcgtgtcaagtacgaataatttcaattggaacttgaatgcatttttggcttataacaattcgatcgggaaaaattatttgaatttatcttttggtatcaatgctcaagaatcacaaacaagtaattcttctgctcaatacaaaggattcccgtctgcggctctgcacacggttgggcatgcaaaagaaatcgtgagtaaaccttccggagcagacaataaaacccgattgatgggaatttttcttagtggaaactattcttgggataacatttttttgggggatgtgtctattcggtttgacggttcttctgaatttggttccgaatcacgatgggggtctttctggtctttaggtgccggggtgaacgtgcataattttgaattcatgcaatcgcttccgtggattaaccagtttaagattcgtggaacttacggtgccacaggtaaggtgaattatcctccttatgcggctcgggatatgtataatattttgtttgacgattggtattccacgggtattggggccacgttacagggagtcgggaatgaaaatttggtgtgggaaaaaacaaatacgacgaatcttggtttcgatctcagttttttcaaaagcaagtataaccttactttctcgtggtataatcgtcaaacggtagatatgatcacggatgtgacgattccctcttctgctggatttacatcttataaagataatatgggagaaactcggaatcgcggatatgaaatcagcctgaatgctatgattgtaaatcacaaagattttggggtgaatgtgtttgcgaattttgctcataacgagggaaaattaatgaaaatatccgaatcgttgaaagcgtataatgagcgggtagatgcttatctgactcctacttatgcttggtatcgaccgacggcagaacaatctttgcctttcttgaaatatgaggaaggtggttcgttaacagctatttacggtatgaaatctttaggaataaatcctcaagatggaaatgaattatttgttgatcgttcggggaatgtcgtgggagaatggatggcttctcaacaacaaattataggaaacacggaacctaagggacaaggttcgtttggtattaatatccgttggaaaagattaaccttgtatacgagttttatgtatgaatttggaggacagcaatataattccacgttgttgaataaggtggaatgtgttgatttgtcttcgtccaatgcagataaacgagtattgactcaacgttggcaaaaacctggggacgttacgccgttgaaaaatatcgctgatcggaatcgaacgactcagtctacttcccgtttcgtgcaggataacaatgaattttccatcaattcgctttcgttgtcttatgatttcaacccggaatgggtaaggcgtatcggattggatgttgttcggattcaggcaagtacgaacgacttggcaacattttcatccattaaacaagaacgaggtttggactatccgtttgcccggacgtttaattttggtttaagtgttagtttttaaaatcattcgcttatgaaaacatgtaaaaatatattattatccgctttggtccttttttctttttcctcttgttccgattggttcgaggttcaaccagaaaatgagattgctaaagaggatttgtttgcatcctatgacggttataggacagcgttgaacggcatttaccggaatctttccgatgcatcgctttacgggaataatctttcctttggttttatcagtttactgggacagaattatgatgttccggcatatatactcccgtatgatgtttccggtaatattgtaaattacgagtatgataatgcgaatgtaaaaagtatcactcaagctgtttgggagaaagcttttaacacggtagctaattgtaatttgttgattcagaatgcagaacagcgagaagctaatttctttgatgagggagaaaatgaaaggaatgtaattatcggagaggctaaagggttgagagcattcgttcattttgatttgttgagacttttcgccccggcacctgttacgggagatgatgcgagctacatcccatacgtgtcatcatacttgacttctcatccggttcatttgccgacttcagtggttttggatagtattatcaacgacttgcaggaagcacagagattgttggctgataatgatactttggttaacgtaaaaatgatgcaaagcgtaaattatcgttttgaaggcaattataatggagggggtttttttgcttatcggggaacccgaatgaactacgtggcagtgaatgctttattggcgagagtttatttgtacaagggggataaggctacggcttataaatatgcccgagaagcgtatcgtttttatagtgaaaaaaaatggtatagttttactagtgaaagtaatttgagcaatacgaacgtggaatatcgtagatgtaaattgtatgaggatattttgttagctttttacaacacgaacatatatgatatttatgaaagttggttaacaacccatttttattgggctaccaatcatttaccaataaagaatagaaccgatttgtttgaaggtgacgaaacggattttagatatcgttacatgctgcattccggcggttattctttgaaatgggtgcgtgtatcagatgctaatgccttgtggtatatcacggatcaatatcctcttttacctgttatcaggatgagtgaggtattctatatcatgtgtgaatatttggcagataataatttaacggaagcgattactttattgaatacattgaggatagctagaggtgcgtcccagttgagtatgagtctgacaaaagatgaatttctaacgtgtttatataatgatgccacacgtgagtttattgcagagggacaaacattctacctgtataaacgtttgaataagagcatgtataatggagcgtatcctattgaaatgactggtaaatatgttgttccccttccagatagtgaaactattactcaataaataagagaaaccatgaaaaatagaatatttgtcatattagcttttgtattcgtgtggatgggatgtgatgaaagagagatccctgtatatgatactggaaagttttatatcgagtttgaaaatgagacggttgattcgacaattttcacgtttatatattatccgcataacgaatattatgatttacccgtagcaatgaaaatagctggagaaactgcaaaacgggatttaacgtataagatttccgtggatgaagaactttctacggtggaggacaaacattattctttgccggaaacaacggtgtttagtaaaggtgtgtatcatgatacttgttacgttcgtttgaacaaaacagccgatttgtctaatcgggcggtgagacttgtacttcgattggaagcgacttcggatatggaggttggtaagttggacaatgcggtggctattattcaaatttccaatacggtagcccgaccatcatggtgggattctaacatagaacaatattatctgggagcttattctcaaaagaagtttgttctctttcttgaagtaacaggggcggatttgacggatgcgaatgatagtgaaaaacgggcttatgctttggaattcaaacaatatttgattgatcatcgcggagagcaagaaacgatagatgaaaacggacagcctatgacggttcctgtgttaggattggaataatattaatagtttgctaaatgagtatgaaaacgataaactatattttagggtgttgtatagcgatgacattgctatacgcctgtattgatgacgagggaaattacgattactcggaattgaaaaccgtgaatattacgaatgtatatagcaactggtccgtgcctttgggggaggaatatgttataaccccgacaatagattatggggatacggacccgtctgaatttgtttatacatgggtgagtgaaattcaagaggaatggagtgatacgatttcacgtgataaggagttgcgttacacatttaaggaaatagctaggtatatgacgactttcgtggtggagcatgtgcctacgggggcattaacatccaaacaaatagatttaaatacggtatcccgttattccacaggatggaccattttgtcggagcaaaacaacaaatctgtattgagttatatccgggccgagcagtcgggagagaatagtataatctacaatttttttaaggatatttacactacacttcgtggagatgatttgggaacaggacctatccgaatgggaagacatttttccagttcgagtgatgaaatcctagttattcaggagagtggtgcggtagaaattgacggtcaagatttttcgaaagcaattgccactcatgaggaatttgtgggaggggcatatcctgccaatttcgttccaaaacaagctgaatatggagctaggttggaggctattttaggtacagatggaaacgtgtacacgcgtgtaaatccgaatggaagttttcaaatttgtcaatacaatacgcatccagcctttagcaatgcccgaattgagaagatgtattattgtgcttatttaggctatatttatatgtatgatgaattgaatcatcgaatgattgctttgtatgatgaacctcaggcttatacgggtatggtgatttatccgtccatgcatccggatagtacgcacgtggataactttactccggttgatgatatgggagagggaacacaattggtatttattgggtcgtacaatgtggaaggagctacaggacgggattttgtacaaattattaagaaaggaacgaattattatttccaaacttacaaagcctatttgcatagtggttcatcaaacttgtatatttttgacgagaaggaagaattgtttgtgggaaatgattatgtgaatgagaattcaaaatattgtatagacggatcttcatatctttattttacagcagataatgttctctattgttggaaccgaatcaatcaggttgaagtgttttatacgttctcgagcaagattactgatattgaacgttatactaatggtagtgatcgagaagagattgctgtcgggcttgaaaatggggagttttatattattgatgcttcttacgagtctataagtggtcagaaagagaaagttttgttcaagactgaaggtttggggcgtgttgtggatgtgcaatacaagtacggaaattcttcgaattttaataaagaatcgagattataatttttgtggggatgtgtcagaaaattaaattttgacacatcctctagtgaaaatattatagaatttagggatggtaagaacaatctctaagggagtgttgtgtataaaaaataagtcattgtaaaaagaaatttatggaagaaccaattgtaagagtagaacatttatcccatcgttatagtgtacagtgggcaattcgggatataaattttgagataaaccaaaagggaattcttgggcttttaggttctaacggtgcggggaaatcgaccacgatgaatattatctgtggggttttgaaccaaacggagggaactgtatacattaatggaatagatacccgtaaaaatcctgtagaagccaaaaaatatatcggttttttaccccaaaagccacctttgtatacggatcataacgtggatgaatatctaacatattgtgcccatctcaggttgatggatgataaggaggtaaaagcagccgtagggttggcaaaagagcgttgtggaattgctcatttcagcaaacgtttggtaaagaatctttcgggaggttatcagcaacgtttaggtatagcgcaagcgattgtacacaatccgaaacttgtagtgttggatgaacccacgaatggattggatccgaatcagatattggagattcgggaattaattcgggaaattgcacaggatcatgctgtactgctttccacgcatatattgtccgaggtggaagctatttgtcatacgattaaaatgatcgaacacggtaatctgatattctccggatcaatagatgaatttcataatagtgttaaatccaacaattgtattgttcggttggaaaatgctccggcagaagaggagttgaagaatattccgggtgttaccaaagtaaagaaattggatgaacatactttccgtatacaatttgaacgggaaggagaggaagaggcgaaacgtgtggcagaaatttgtgtgaaccggggatggcggttgagcgaaattcaaatggaaaaagtgtcgatggatgagatttttgcccagctatcgggaaagcgagtggttgaaaaattttaatgttatagtgtatgaaaacaatatatagaatagcgaaatcagaattaaactctttgttttgttcgccgatagcttggttggtattggtgatattcacgtttcagatgagtatggtttttacagacaggattatatgggaattgagagactttgtgatcaataaccgggaaaaagacgggttgacagtctattttttgctgtccggtttcggaacgccattgtttcctggtgtactttcttatttatatctttatttcccgttgttaacaatggggttgatgagtcgggaatttagtagcggttcgattaaattattgtattcttctccgattaccagtacccaaattgtgttgggtaaatatctttccatgatgttttacgggttgattatgctggctatcgttacgatttacgtggtcttctacatatttgttttaaaggattttgactatcccgtggctataaccggtttaatagggatttacttgatcatgtgtctctattctgcagtcggattgtttgtttcttgtttgacctcttatcaggttgttgcggccattggtacttttgctgcattaactattttacaggtgattggtggtgtattgcaaggagttgatttctggagggatataacttattggatttgtagcggtcctcatgggccaatagccggtttgataaacagcggtgatgttttgtattatatcttgatgcccgctttgtttatcggcatgtctattatgaaattacagtttgcaaggcagagtaaaccatggtatatgaaagtggtgaaatatttggctttggttattgtgattgtgggtattggttatgcgacttctcgtcgatcgacagtatgtatcacggatctctcgcgtgatgaacaattaacactgactcccaaaagtcgtgaaatattaaaacgttatgatggacaggaactgacgttgacaacttatgtcaatatcatggatgaacacatggcggctaaattattcccgagaagtcggatcggtgatatgtccgtgttcagtaagtactatcgtttcaaaccggacatgaagtttaaatatatctattattatgaccacgtgttgaacggacattcttgttgtgccccgggggaagatttggaggaagcagcacgtaaacaagctaaagtaaatgggttggattttgatgatgtgctctctcccgaagagatgcgggaaattcatgatttgagcggagagaataatcaagttgtccgtatacttgaagatagtgagggaaactggacgtatttacgtatgttcaatgatttgaatccttatccgagtgaacaggagatttcagttgctttattaagaatgaaagagggggctgtgaaaatgggtgctctttatggacatggagaacgtgaaatgaacaagagtggtgatcgggaattgggatggctttttaccaacggttctggtcggggttcattgatcaaccaaggatttgatccggtaagtattccgctcacggaggattggggaattcctgatgatgtgcagatacttttaattatagatcccaaagaagccttttcgaaagtagaactagagaagataagggattatgtggcaagtggtcgccatttgattatagctacggatgttaatcgttctgctgtgatgagtgagttactttcggactttggtgtacaagcattaccgggtatgttggttttacctcgtaaggatgaagatcctacaaatataaatgctgtttttaccccgcaaagtggaatgattaatccaacttttgcacactggggaaataggaattacccgttaagtatgacgggagcggtagctttgaattatgtaacggataaaggatataatgttgtaccactggttgcttctcctgtgggttcatggacagaactggaaacgacggattttgcgggggaaaccccgtcgtttaatccgaaagcgggggaaatcaatcagcaattacccgtggtgttagcattaactcgccaagtgaatggtaaagaacaacgaatcatgatttttggtgatgcggactggatgacgatgggtgaattcagcaaacggagggtttacggtgtggcgaacgggcaattgacaacactgatgtgtagctggatgaccgattatcgatatccaacttattttcctcgtccggctcaacctgataatcatataaaattgtcgtatcaatcaagaggaaccttaaaattggtatttgttgttatcttcccagccgtgatactgttgttgtattttggggtgtggtttaagagaaggggtaaatagtaattatttaaacaagaaaatatggaatctattgtaaaagtagaacacttgtcccatcgttatacggtggattgggcaattcaagatataaatttcgaggtgaatcgtaaaggtatattaggtttattgggatccaatggtgcaggaaaatcgactacaatgaatattatttgcggtgtattgaatcagacggatggaactgtatatataaacggtattgatacccgtaaaaattcagtggaagcaaaaaagaatattggttttctccctcaaaaaccacctttgtattctgatcatacggtggatgaattccttatttttgccgcggaaatgagactcgtggatcccaaaaagatcaaacaagctgttgaaatggccaaagagcgttgcggtattgctcatttcagcaaacgacttattcgtaatctttcggggggatatcagcaacgtttggggatagcgcaagctattgtgcatagtccgaagtttgtagtgttggatgagccgacgaatggtttggatccgaatcagattttggaaatacgtaagcttgttaaggagattgcggtagatcacgctgtcttgctttccacgcatattttatcggaagttcaagcaatgtgtgatgatattaaaatgattgagcatgggcatcttgttttctccggtaccttggaagagtttgataattacgtgaaaccggatacttttatcgtaaaactcgataatcctcctgaggatgaagagattctagctatccccggggtggttcgtctcaaacatctggacaaaaatactttaagagttcgatttgacaagagggaagatataacagaaatcgtggcaagtgcttgtgttaataacggttggggattgtgcgagattactttggaaagaatctctttggaagagatctttgctcaattgtcaggaaaaagattgatagataaattttaataagtgttatgagagcaatatataaaatagcaaaatcggagttaggtacactcttttattctccgattgcctggttgatattagtgatattcgtatttcagatttttagttgttttgcgaatttgttggagtattctgtgaatatgaagactctagatcaagtacagggatatcaaagttatatgctttttgtcataggaggttttgctccttatatgacaatacaatctactctctatctctatatcccgttgttgaccatgggattgatgagtcgggagtacagtagcggttctataaaattacttttttcttcccccatcagtagtttacaaatcattttaggaaaatatctttccatgttaatttatggtttaatcatgatgggtagtgtattggtattggttattgtcggttatttttcgatcaaagattttgacctttcacttgtgctttccggttggttagggctttatttgttgatggcaacttatgcggcgatcgggctttttatgtccactctgacttcttaccagattgtggcagctttgggaacgttgactcttattagttttcttaactttattggcagtctgtggcaacatatagaaggagttcgcgaggtcatgtattggttttcgcttaagggacgtgcggatgagcctattcggggacttatttgtagtgaagatatactttattttattcttgtgtctggaatgtttctaggtttttcagtcttgaaattgcaatttgcccgtcagagttgttctatgagtgtgaaagttggtaagtacgtgggattagtagcttgtgtggctttgttcggttatatttccacgatccctcaacttaagtgtttttatgatgccacggccaataaggatcgcacgattactccgaatagtcaagagatattgaaacaggtggatggtggcctgactattacctcttatgttaatcttcttgacaagtttggttatcttggtatgccttctaactggtttaatacccggaatattttcgagacatttactcgttttaagccagagactaagttgaagagttattattattacgataatgcagccggagcaaatgcctcgcgtgaagagatggataaggcgattgagcgacttgtgttgacttctgatattaattctaaaagtatacttacacctgaacagatgcgagaaaaaatagatctttctgccgaagagtatcgttacgtgtttcttttagaacgtgaaaatggccaaaaagcttttttacgtatgtatgacgatcagggaaaatatccttccgaagcggaaatttcagctgtgttgaaaacgatgatttccaaaagtccccggatagcttttttaggaggacatggagagcgtagtatacatgaccggtctggagtaaactatacctctttcacaacagttcttgattctcgtggtgctcttatcaatcaaggatatactccgtgtacacttacactttcagccggaggagatatccctgccgatatagatgtattggttattgccgatttacggaaggctttaacggatgatgaactgattcaagtaaaacgttacatagaacgtggcggtaacttggtggtgctgggcgaaccgcgtcgtccggaatatatagctccggttttggagcaattagggcttgcgtttgttccgggagtgttggtacaacctcatgaaggatatgcggccgattatctttgggtaaccttcacgccagagggggccgagttagagccaatttttgctcgtatggtagagttgaataacgtgctaacaatgccatctgctacggctatttatgaaacagaaaatgtcggatttgaagcgatccctgtatttacaacgggaacgatgaagtgttggaatgaattggaaactaaaaacttctctcttgaagatcccacattaaatgaggcaataggtgaaaaagagaatgcttatgtgacgggctatgctttgcggcgtgatgtgaaaggaaaagaacagcgtgtctttgttctcggtgatgcggattgtatcagtaatgcagaacttggagttgatagagaattccgtcgttctaattatgctctaatagatgggatgttccggtggttggtgtatgatgaatatcccattgatatcagtcgtccggcagctaaagataatgatgtatatttgactccggcaggatatgcttgggttaagattttccttcgttgggtttgtccggcaatacttgtattgcttggttgtctgatttggttctctcggcggatgaaataggtatttagaaaagaaaacatctttctgaaagatcgtgtctgaatttttaatgtccggcacggtctttcttttttatttactagtatctttttcttttttgaaagatgttgtttctcggattaagcgttaaatttgccagaatggatattgaaatttggagtacatgcaattatcagaagatcaaattataaaattggccccggatgctgcatccgtgaaagcagggaaaggattagcttcggtggcaaagtgggtgttgcggggagcaagtgatcgagcgttatggggacattgtcaaggaagcgggaagaatccttatcagacgcaggtcgatttgcagaatatcgctttcaaatgttcgtgccctagccataagtttccttgtaaacacagtttgggacttttatttttacatgcttctcggccggatttattcatgattggggaagaacccgactgggtgaaggaatggttggagaaacgggcagggaaagcagcggagaagaaggaaaaagcggataaacccgtggatgccgaggcgcaagcgaagaggcaggaggctcgccacaagaaagtgttgaatggggtagatgatttacaagggtggttaaaggatcttgtgcgaagtggtttattgaatgtgccagagagggcgcaatctttgtttgccggaatttcaaagcgtatgattgatgctcaagctcctggtttagcggggatgatgcgacagttgcaggagattcattatttcggagaggattggaagtacgagctgacagcaggagtgagtcgggcgtatcttgtgtcggaaagttataagcacctcgataggttgcccttggaatggcaggatgaaattcgtacccttgtggggtatcctcagactaaagaggatgtattggctaacggggaacaggtctccgatgaatggttggtggttgcctcggaaagtcaacaacaagatcggttgacggtggagtataattggttgtacggcaggttgtccggtcgttatgcacttttcttgcaatttctagtgccgggggctttggcggaaatggctttgttgcctggtagtgttgtcgtggcagacgtggtatactataagggcgtggcttcgactagagtattgttccgtgaacaaaaaggtacgggcgaaccctttatcccgttggggaaaggatgctgtacggggattgcgggggccatgcagatctatcgggagtctgtgacccgtaatcctttcacgtatgaagtgcctgtattagtaagtggggtgcgttttgtaatacatgagaagcaggtttggattacagatagagacgaatatttggttccactaaccgtgggcgagggttgcaaattgaaaggttttgcagtgaccgggggacgagaattcacgggattcttccttgccggggagcggtcatggagagtgttatcgttatggatagaggataaatattacacgttaagtaatgagtataacggataatgtcataaatatagccttattgggaacggctaatcgggaaatgacttccggcgagttaccggaagaccttgttgggatattggaacggttgaaagaaaatgcggcagatggggaagaggttttctacaaaggggcggcggcttttttcgcttactatcgttcagggttggaacctttgaagttgaaagaccctgttccgatttcggaggcggggccggaaacgagaccttatgtcgggcagaaagcggctgcgatattgagtattctgctaggagaaaaatacgttaatatgttgcttttttggtaccgaaaagcggtagaacgggagcaattgatcccgccggaatatctaccgcaagtgttggcaagagtgtttcaaccggggagccaaacagcgaaacgagaacggcaattactgatctctttggttggtaaccggggacgttggttactaccgatcatgggatatgcaacattgcaggaagaggctgatgatacatgggaaacggctactcatgtcgacaggaaactgattctttcacgagtacgtcgagagaatcccgtccggggaatcgagatgttacgggcagaatggaaaaacgaatcagcccagcatcgtgcggaattgttgacgtgtctggagattagcttgtctgtggcagatgaggattttttggaggaagtacggggtggtgaccgaagttctaccgtgcgggatgaggccttgcgcttgttgcgcatgattcctgaatcccggattttgcgtttgtttgccgagacgttaaagaaacatttacattatcgtcgtttgcttggttgggctgtggatccgattgcctattcggaagaattcaaaaaattaggaatcaacgaggtgagtagtaataaaggcgagagtgatagtgattatattttgcggcaaatggcacaattcatgcctctgtccttttggtgcgagtttttcgattgtgatccagagacagctgcccagcggatgcgtaaatcaccccctttctcaaaacatatttacttgacagatacgattttgggctataaagaccgagattgggcctaccacgtgctgaaagatgaacgggtactccagtcgccagacttgatgcaattggtacccctgttatccgtggaacaacgggaacaactgaatttgagcggaaaagtcgatcggaatttttatattagtcaatggtttggtgaggatgacagtgagtggggtgagagattttctcaaggtgtgttgaagatgatttatggtatggactactgttattatgaccgcccgacttgcgaggcgttggctttacgccttccggcttcgatgtatgattatgttgtcgctttgggggcatcacgggagagtagtgccagtcactgggagtttacagttcgtctgcaacaattgttattaatgaaaaaggatataatacaagcgttctgattttaaattttagatgccagccgtatggggcgggtgctttttctgggatcctccagtttaaaatcataaatctaaaattaacaagagtttattagagacaaatattaaaaagtaaaaatatgggtttattattaagacaacatgcggaacagcaattcgaggaagagttgtacgagttgaagaagaacgagacaaataaagtgccggaaaactggcaactatccccgcaatcggtggttacctacttgatgggtgggaaactggcaaacggtttcgaggtgaccccgaagtatatcgggcatcgtcgtctgattgagattgcggtggccacgttggtcacggatcgggcattattgttgtacggtctaccgggaacagccaagagctgggtaagcgagcatctggcggcggctatatccggtgattctaccctaattgtgcagggaacggcaggaacgggcgaggaagccatccgttacgggtggaactatgccaagttattagccgaaggtcctagcgagggggcgcttgtgcaaactcctgtcatgcgtgcaatgaaggatggtaaactggcccgcatcgaggagttgacccgtgtcggttcggacgttcaggatacgctaatcacgattctttccgagaaaacgttgcctattcccgaactggatcgtgaaatacaggctatccggggctttaacgtgatcgctactgccaataaccgggacaagggggtaaatgacttgtcaagtgctttaaaacgccgttttaacacggtaattttgcctttgcccgacacgatcgacgaagaaatcgacatcgtacgtcgccgggtggagagcttcgaggctgttatggaccttccggcagagaagcctgcgttggaagagattcgccgggtggttaccattttccgggaattgcgtcagggagcaaccgaagatggtaagaccaagttgaaaacacccagtggtacgctgagtacggctgaggccatttcagttgttaataacggtttggccatgtccgggtatttcggtgacggtcggttaaacgccacggaccttgtatcgggaattatcggggcggttgtgaaggatcccgtgcaggatcaggtgatatggcaggagtacctagaaacggttgtgaagggacgcgatggctggaaggacatctaccgggcatctcgggagatgttataatgactatgtaatatacacaatggtggatggaatacattttttaggcatacgacatcatggtccaggatctgccaagaacgtgaaagcatatttggaggaactggagcctgatattattttattagagggctccccggaggcagaaccgcttttggcgagagtgtttcatgagcagatgaaaccgcctgtggctttgttggcgtatcagcccgacgaacctcgacgggccgtgttttatccttttgccgagttctcaccggagtggcagtccatgtgttatgctgttagaagagaagtgccattgcgcttttttgatttacctctggtacatcatctggccttttggaaagaacgggaggaacaatctgtgaacgaaaaatccggcgaagagggggtgtgcgatgagataccaggggagacatccgaagcgaagatctcgggaaaagcagtggtgtcagccgtgtcggaattattacctgttgatccttttgctcatctggcgaaagcggccggatacgatgatccggaattatggtgggaagtgaactttgagaatcgtcagcataacgaggaggtgtttgctgccgtgaaagaggctgtttcggtgttacgggagtattttcccaagaccgatcgggagactttgttgcgggaagcgtggatgcgtaaaatgatccgggcggcccaaaaagagggtttcaaacgtatagccgtggtgtgcggggcttggcacgtgccgggtctggagaagatgcccacgcagaaagaagacaacgagttattgaagggattaccgaaagtgaaggtggagtgtacttggattccgtggacctacgatcggttgtctttccggagcggttacggggcgggaatcgtttccccggggtggtacgatcatttgtggcattatccggatgacgacggaacccgttggatgagtaaggtggctgcccttttccggacgaaaggtatggatatttccgtggcacacgtgattgaaaccgtacgtttggcacaagttgcagcggcgttacgtggtttgccccgtccttctttggaggaatacaatgatgctgtgaccacggtcatgggattcggtgacccaatcttgttgcaggtgatccgggaagctttggtgatcagtgatcgtatggggagcgtaccggatgatgtacctaaagttccgcttcttgtagatgttgaaaaattattgaagcgtttgcgtttaccgcttacaactgaggtgaaggaatttcaactggacttgcggaaaccgatggatttggaacggagtatcttttttcatcggttaaatttgcttggtataaaaatggcccatccgttgcgggttgacggaaagggaacttttaaggaggcgtggtctgtttattatgagccggagcagacccttgccgtgatcgagaaagccgtatggggaaatgccttgacagaggctgttgtcgcctataatacccatttatcgaaagatatcacatctatatccgacttggtggacttgttggaacaggtgattcctgctgatctaccagctcttgtggaagaaatgacttcccgcttggacacacttgctgcttcgacaaccgacgtgttggagatgatgaagactattcccggtatggtgaatgtggttcgttatgggagtgtgcggaacttggattacaggaaagtcaacgatatgctgaatgctatgatggcccgcgtgctggccggaggagtgctggtttgtactaatgtggatgaagataccgctgcggagatcatggagtgtctggtagcggtggattatgccattgccacggcgaaccagccggaattgacggagatgtggattgaattggtgaacaagatccgggaggggcaaggctctcatcccttgttgtccggttatagtactcgtttgttgcgggataaaaatatccttggatacgaggaaacagcccagacattgagttattacacgtctcccggtaacacggcatctgatacggcattttggtttgaaggattccttaagtcttcgggtactatcttgttgctggacgatcagttatgggatctcgtaaatagctggttggctagtttgaacgatgatagtttcatggaattactgcctatactccgtcggacttttagcgaatatagtctgccggaacgtcgtaagctcggcgagaaggccaaaggctcttcttccgtaaaacgtgtaagtattaagagtggggtgtttaacaaagaagatgctaggaaggtgataccgttaatggaacagttgttgggaattgatggattttgtgaaatctgaaatctaaaatttaaaatctaaaatggaagaagctcttttaaagcgatggcgattaatattaggaggagacgaggcggatggaacgggggtttccctttctgcagaggagagtcgtgtggatagtgccttgaatgctttgtacgatagtgaccgtaaaggaggattgaatggttcggctcccaaggtgagtcgttggttgggagacatccgggaatttttcccgcagacagttgtacaagtaattcaaaaggatgcaatcaagcgattgaatctgacttcgttactgaccgaaaaagagatgcttgaatcggtggtgccggacgtgcatttagtagcaacattgatgtctttgagccgggtgataccggagaagaataaggagattgctcgagaagtggtgcgtaaagtggtggatgaattgatgaaaaagctatcgtcacccatgcaacaagctgttaccggagcgttgaaccgttctagtaggcggagaaatccacgttataatgagatcgattggaggacgacgatcgagaagaatttgcggaactatcaaccggagtacaagacgattattccggaggtgcgtattggtttcggtcgaaaacgccgggcgttgaaggacattgtgttgtgtcttgaccagagtggttcgatgggagcgtccgtggtttattcgggcatattcggttccgtgttggcctcaatcccggccgtacagactcgcatggtggtatttgatacttcggtagttgatctgaccgatgatttacaagatcccgtggacttgcttttcggtgtgcagctgggaggtggtacggatattgacagggccttaggatattgtcagacagtgattacccgtcccacggataccgtattggttcttgtgaccgacttgtgtgagggggggaacgagcgggagatgcgtaagaagatgatttctcttgtgcagagcggagtacagttgattgtgttgctagctttgaatgatgatggggctcctttctacgataaggaaaatgctcagtttttggcggaactgggtgttcctgtgtttgcctgtaccccggacaagtttccggacttgatggcggtggccttggcaaagcaagatgttggaatgtggttatcaaaaaatatacagtgaaagaaaagagaaatagaacggaaatcgtggaacgatgcgtggaattgtgggaagcttcagtgcgggctactcatgatttcctcgttgaaggagatattgatttttacaggccttttgtgcgtgagaattgcgagaagttaccattactacttcattatgaaggggacgatattgtggcttttttaggttatgatatgacatccattgagatgcttttcgtggatccggattatcgaggacgaggtattgggcgtgacctcatagagtgggccattgaggatgttcatgcggagagagttgccgtgaacgagcaaaacgtacaggccgtgggcttttatgcccgaatgggctttgaggtagaacaccgtacggaaacggatggttgtgggaaaccttacccgattttgtacttgcgtttgaaatattctccacagcgaatggtaaaggtgacgggggacaagaagacctatcttcctcttctattggatgcagacccttgtgaggcgatgatcgaccgttatctggaagaaagcgatatgttcgttttggaaaaagatgggaaggtgattggggaagcggtggttgatgggaagggggaaatcaagaatcttgcggtgttgccggaatatcagggaaaattgtacgggatgtatattatttcttctttggtcgattattataaaaatcatttttcccgtttgtgggtgggaacaagtgaaagtggtgtgggatattacgaacgttatggtttcgtgcgggatcatgtggtgaagaatttcttcacgaataattacccagaaccgattattgataacggaataccttgcgtggacatgacttatctgtatttggagattcgttaaaatggagtgaaacgtgtaaggtttgtttgtaattttttgtatttttggtccggaaatcatttaataagacgatattatgggattctttaataaaatattcggaggcgggggaaatgaagggaagaaggagacttcagcagatcgtatgctgaggattatcaaggaaaaaacaatgacagagtgtgtgacgctgatcccggaaaagggaacgactaaaccttgggagagcaagatcgggggcgtgccttacatgcccaaggggtttgactatccttacgaggaggtcggaagtacggttgtcacggaaggacaggctcccgtgatggctgcgaacgtcgcagccgggccatttgccggattagatgggagtactgctgctgctatgccttctgcggcttcgggagagactgttgagcaggtggaggaacggaaattgttacccttgcgttttttagcgcaggtaaatttcagcgagatgcctccgttagaaggtttcccgacaaagggaattctccagttttatattgcgggggaaaatgtccatgggttgaatttcgagaacccggaagagcagaaagggtttcgggtaatctatcatgaggtggttgtagaagatgaatccgccttgcttgcggttttaccgacggatggtgtggaatatccggatggattcccggtagatagcgaattgaagctgaattttgagaagtcctctatgccgatggggggcggtgattatcgtttcgataagctattacttgatgcatataatgaggcgaatcccgatgctcgggtatcctctttagatcgtgccccggaagatgatttggataaggtttatgatcaactggatatgggaggacaccgcatcggtgggtatcccttcttcacgcaacttgatccgcgggaatatcatcaagagttaaaggaaaattcaatcttgttattccagttggattcggaagagaccgatgattataagatcatgtggggagattctggcgtgtgcaacttctttattcgtcccgaaaacttggctaaacgggactttagccgggtgttgtatcattgggattgctattagaaagataaaagttggaggccgtgaatgacttccaacttttagttttcagttttcctgcatccactccatgtttgtcggatattggaatactttcagtttgaagagtgggagaatggcgaacaaatggtcaaagatgtcagcttgcacccgttcgtaaatcacccattctttgcgtgcagagaaacagtagatttctagcgggattcctgttggagtgggttgtagttgtcgcaccatgtgggtcatatcgaggttgatattggggttggcggcaagccatgcttccagatattccctgaaagtcccgatgttagtcaggcggcgtttgtcaagcgggttctccacgttggcattgtactcgttcaactctttcattttgccttctatgtagctttttagtagagcagattgttttaagttttcaaggtcttcatttgtgaggtaatgtacggaatagatgtcaatattgacggaacgtttaatgcgtcgtcctccggattcctgcatccctcgccagtttgtgaatgattctgagacgagcttgtaagttgggatggtggagatggttttatcccagttttgcactttcacggtggtgaggttgatctcgattacatcaccgtcggcattgctgctgggcatgacgatccagtcaccgatgtttaccatgcggttggagattaactgtatacctgccacgaatccgagaatggaatctttgaataccagcatgaggacagctgagatggctcccagtccggcaagtagtgcaacggggtctttatcgatcaatatgctgatcacgatgatgatggcggcacagtagaaaaatatcttgatcacttggatgaataccttgatagggcggtccttggccatcgggtaactgtcgtatatccggttgataccgtctagtatgctcgacacgatgagcaggaaggagagggtgatccaaacattgatcagtttcatgaggaaggtaaattgagtccactcgaattccttgaatacgatttgtatcacgatgggggcgatcagcagtcccagccggttaaagaatcgttgatcgagcatgagatcgtcccagttcgttgccgtccgtttggtcagttttagtacgatacgtgccagccattggcgggtaagcacgtggataatccagttgatgataccgataatcacaagcagggccatgaagtagatgatgtcggaaatactttccgagtaaacacctagatgctgtaaaccggcttgaatgtaattttcaatcgtcatgtttcaaatattttaattgttttaacgcacgacaaaattaataattttaacctgatatatagaatttacagcctaatacgtaactaccgatgtctgtttctttccgtccatccacacggtcagcggggccttgaatcgcacgtggcgggagtatttaaattcctcgatgacatcctgttgccggagaatgtcaaagttgatggaggcgtcggcagactggaaggggatagcgaagtaacccactttcatggaagtgacgttgtggaagaaatgcgagtcgagggaggcatccagcgggaagtcgggaagtccctgttccacgatgactttggcattggcaatgtcagaccattgcacgggtatcccggtgagcgggtcacgtgtgccccagcggcctggtccgatgagtaggtacttgtcgccttcccgggcgatctgcgagttatggcgcttgatttcctcggcgatttcttcggttcgtaatcggtcgaacttgtcgggatcgacgtacacgatgttccggatgtattgtaatttcccgtttcccatacccttgtcggctttcagtaacacgtgggtcgggtcgatggacaggtcgtcgatgtctatgttatactcgtttttgattagcggtttgatctgcaagaggtagaagacgggtgtgttgttttcgaaattaatggaaaactctatctcgacgggagatcccatggcttgcgagaagatgttcagcaggatttgcagggtaggtgccagtgggaaataatcgtattggagtattttagagaaatccacgatacggggacctttgatagagaagtcatagatgatttggtcattcatgaagtcgtaaacggaagcggtgtattccaatgtgccgtcacgctcggcttctgagatgtcgtatgctttgatggcagcgttttccccgtcttttccccgtcccggtagaggtcgtaatcctgtgcaagcatattcacgccgtagaagtaacgttgtgatgctttgattttgtcctgcgtggaggctagttgtagtttgggataggtaggactgaaactatgtgtcttttccccacccacgacgtaggcctccaacccgatggcggtgacggcaaacccgtcttccggctgaatgtaggagaagggataaaagttgtaggactgggccacgccgctgatttcggggtagtaccgtccgttgtgttcgttaccgataacttcctgtatgatgactgccattttctcttcctcgattaatcaatgacgttgaaatatgcccgtgattccggcgagtagatggaagcaaaaacgagtttgatggcgttctcgacatcctctagccgacgttcgatgtccgggtggttgttggggagtaggtaagtggaatacactccggcaaacggttggttgagcgagtcctcgaaaagtccggaggaacgcacggccagcggtttggtcatgacttggagatactttcgcaggttgtttcgcagttgctcggagaggcgtgccgtgcggaaggcttccaaaacatgattgtattccttgtcctcgaatatgacgtcgtatagattgttgttttctaggaagttgtcgaactcattcacgccaataacggccgtcttggggatggccacgtggaggtcggggatgagtttcttgaggtaaacattctcgatgaagttggagaggaacgccagtcctctccccttaccgccgagcgacccgtcaccgagcagagtgatgtagcggttggagtttacgagtttggggttgaacttaatgatgcgtccccgtagttttttgagtttcgatgcttcgaagacgttcgctatgaaacggcgtatctcgtccgggcttttgaagtagctgaaactgtaacggtgtagttttttcgccaggttgatttcagcccttgccatgaaccaggtggaaatcccgttgcgaatagcatgatattccaacgactcatcggggatggtcatgagtttctgacgaaattcctcgatattgggtgcccggtcgatgaccttcccgttgcggtcccggaagatgaaatcaagttgctgcacgtattttatgagactgactccggcatcctcgtctttcacgccgttgtgagcgtagcggacgtcggagataacaccgataatgttgttgcgatatttattgatgatgcccacggcatcatcgaagttactgacaaggatcagtttcgggcgcacccgcattcggaggattacatccatttcgtcgttggaggattcctctgcgatgatggcctgtgtctggctcatgatcttggtgtagagaaggggcaagtagcgggaataatacttaacagagtcctcgacgacgaggattacccgcacgtccccgagcttggtatcggcttctaggttgattttgtcttccaggtatttggccatggcgaggaacactttcgtggagccgttccacacgaatacccgctcgatggattcactgatctctttttccgagcgcagcaagtaggagagattggcgttgttgttgaccagcatgagctggcagatgtcgggataaagctcttttatgtgatggctggtgaggataggagtttccttgtccagtcctgccatgataatattaaatcgaagtggcgttttttcagttcgtgcaaggctccttcctcgtttgccacggaggtgaaacggggagcggcgaaaaggtttagttggagatattcaccgaatatctttccggagaattgtccttctcgttcgatggtgtaggagtcgtagtagttggcgatgagtaggatttcttttaccttgaagggcatgagttcctgaaaaatgtcgcggtcactctttttccgcttgtatattttgttcaagtctctttttccatgatgttttgttttgtacaaagctaaagatttgttggcggaatggcaagagaaagataaaagttaaaagctaaaaaactagaagatttttattaacttgcgacgttttctaataacggtaacatttgatatgaacaaacgtgccatgcgatccggtctgatgttgtgcttttcccgttggaacaggaaaggatacgccatttttgcctcgttgggccgaaatgtccggatcgggagattggctattcatatttgtgagatgtcgttgcggaaatcgtcgaggaagggcgtgatagtggaactgacggaagtgttcgaacgactggagaggttgttcaatgagtacgaggagaaggtgaaacgagtggggtgcgagttgttaccggttcgtgccggaatagaagatgcattcagtaattcttatcatagtttgaattgaaggtattcctgtcttcgggcagggtaccttttttgttttttaataaagagctggaaatgaaagaagaaaatattatagaggaattgaagcgaaaggtcgaggaaggaggacaagtcacccgggaggaggcactggccttgtcacgagtggaagacaggaaagccttgtacgaggcagccggagcgattcgggatcgttttgcggggcggtatttcgatacttgctcgattgtgaatgcccgttcgggacgttgttctgagaattgcaagtggtgtgcgcagtcggccgtgttcaaaacgcacgtgcaggagtacgaattaattgacgaggagagttgcatggagctggcgcggttgaacgccaaatacggggtgaacaagttctcgtttgtcacgagtggacgctccttgtcgaacaagaatatcgacaagttgtgcgagtatgccgtgaagatcaaacaggagatgaagataaacctttgtgcttccatgggtttgctgacgaaagagcagttgcaaagattgaaagaggcaggtataactcgctaccattgtaacttggaaacgtctcgccgttatttctcaaccctttgtacgtcccacacgacggacgagaagatcgagacaattcgccatgcgcttgagctgggaatggaggtttgttccgggggtatcatcggcatgggcgagacaatggaggatcgcgtggacttagcgctgaccgtccgggagctgggtgtgaaatctattccgatgaacgtgttgaacccaattccgggaaccccgttggaaggagcggcgccacttgcggacgaggaggtactgacaacggtggctgttttccgtttcatcaatcccgatgccttcctgcgctttgccgggggacgggcactgatcgcgcatattgaggaagatgctatccgggccgggattaactcggctattgtgggtgatcttctgaccacgatcggctcgaaggtaatggaggacatggagaaggtgaaaagattaggctttacgatagaagataatctttaacttttagtttttaacttataacttttaactttataaagtgaacacggcagaattattaaaatttgacagggtgcatttatggcatccttacacgtcaacggtcaatccactcccggtttacccggtaaagagggcagaaggtgtgtatattgaactggaggacgggacccgtttgattgacgggatgtcctcgtggtggtgcgtggtacacgggtataatcacccggctattaacgctgctattgaagagcaattaaagaatatgtcgcacgttatgtttggcgggctgacacaccgtccagcggtggaactggcggagaagctggtggaaatggcccccgatgggattgacaaggtgttctattgtgattccgggtctgtggccgtggaggtagcgatgaagatggccttgcaatattggtacgctgccgggagagatgataagcgccatttcttgacgatcacgaagggataccacggggacacgtggaatgccatgtctgtgtgtgatcccgtgacgggaatgcataatatattccggggatcgttgcccatgcaatattttatccaccgaccggaagcccgctacggtgaatcttgcctgccggaacatatcgaggaattgaagcaaagtctgcggaataaccataaccgtattgctgccgtgatactggaacctatcgtgcagggtgccgggggaatgtggttctactcggcggattatttgcggcaggtacgggagttatgtaacgattacgacgtgttgctgatctgtgacgagattgccactgggttcgggcgtacgggtaagatgtggggagtggatcatgcgggtatcgtgccggacatcatgtgtgtcgggaaagcgatcacgggcggctacatgagtttcgccgccacgatggcgacggagaaagtagctacccagatctgtacgaaagatcccggtgtgtttatgcacggcccgacgttcatgggtaatcccttggcctgtactgcggcgaatgcttcgctggatttgatcagaagttacgatttgacaaccatgatcgggcggattcaggaccagctggaaagagaacttgccccggcccgggaatttccgaatgtgacagacgtacgggtgttgggtgctattggtgtggtggagatgaaggaacccgtgaatatgggattaattcaagccgctttcgtcaaagaaggcgtgtgggtgcgcccgttcggtaagctggtgtatgtcatgccacctttcatcatccgagactgggaattacaaaggctgacatccgccttattgcacgtgatctcgtacttgaagtaattgaagatgcaaggacttgtaacttgctaacctgtaactttgccgaaggcaaaaacactatgaataaagaacgatatattaataaactgaacaagataaaggaatcggggaattatcggatgttgcgagacgtgcagcataacggtttcttgatacattataacgaacgggaaatgctgaatctctcgtcgaatgattacctggggttggcatcaaacccggtgttgtacgaggatttccggaaggaaacggacgtgaagttgctgtcgtatagtgccgtgtcgtcgcgtttgttatcggggaatcacgagtattatagcttgttggaaaatgatttgagtgatttatacgggaaggaggccgccttggtgctgaattccggttatcatgcgaatatcgggatattgcctgcgctggcagggaaacgggacttgatcgtggcggataagttggtgcacgccagtattatcgacggcttgcggttgagtgaggccgagatgttacgctttcgtcacttagattacgaacatttgcgggaaattctgtttaatcatcgggaggaatacgataatgtatttatcgtgacggaatccatattcagcatggatggtgacgtggcagacttgcaggagttgtgtgatctgaagagggagtacgacacgttcctgtacgtggacgaggcgcacgctgtcggagttcggggaacgaacgggctgggatgttgcgaagaacaagggtgcattgatgatattgattttatcgtgggtacttttggaaaggcttttgcatcctacggggctttcgtggtttgtgacgagatgttccgggatttcctggtgaacacgcagcgcagtttaattttcaccacggcgttgcccccggtgaatgtggcatggactcgttttattcttaaccgaatgccggatttttactcttaccgtatgaaactgtcaggtatcgccgagcaactacgtacgacgttggcgaaccgaggattcgagactcggggagattctcatatcgtacctttcttgtgtgggagtaacgagaatagcgtttatatgtccgagttgttccaagacaatggttttttcgtgttgcccgtgagatacccgaccgtaccgaagaacgaggcgcgcatccgtttctcgctgaatgcggctataccggaggaagattacgattgtttgatggaatttatagaaatcagtctttaataattttagatttcatgattttagattttaaattccagccgcataaatcagattcccaacttgaaacttgtaactctcccaaggtgaattccatgcgaagagaatggattactaaagagggaagccggatgctcacgttatttttttgcggttggggtatggatgagcgtgccgtgcaacacgtgaaggggaagggggatttgcttttgttctatgattaccgggatatttccggggaggaagcaccggaggtcgaggggtacgagagtgtgcgtgtcgtggcttggtcgatgggggtgtgggcggcatcggtgttgttgagtcgttggaatattccagtctcctaccgggtagcaatcaatggaacagaacgtccggtagatgagcattacgggattcatcctaagatatatttgctgaccgagcggggtatgaccgagcaagggagagacaagttctttgcccgtatgctctcggggaaggaggagatcgaacgtttcgaggaaaataagccttgcagggatattgatgagcaacgggacgagttgcggcttatccgggagcagtcggtgcgggaaatgtccgaaatgcattgggaccgggtttatatttccgagggagatgttatcttcccggtggaaaatcaacggaactggtggagggatcgtgttgagatcattaccctatcgggagggcattacccgttttacgtgctagataattgggaaaagatatggaaataaataaagaagaggtagaacagcgtttcaggcggagtcgaatcagttataatgacaatgcacgggtgcagaaaatggtggttaaccggatgattcccatgatcttgtcatccgtgaagcgtgtgccggagaagatattggagattggttgcggtacaggtttgttgacttcacaactgcaacgcactttctcgagtgacgggttgtacttgaacgatttggtggaagagttgtgttatcatgcggcgactgttaaccgtgtgtcgctgacgcattgtttcccgggggatgtggagaagttatttctgccccttagttttgatctgattgcttcggcgtccaccttccagtggtttacgactccagaagagacgttcaagaaattatctaagcgattggaacaaaatggtgtgctggtgtttagtacctttgggaagtttaatttacgggagatacgattgaccacgggcggcgggcttgattaccggagtaaggaagagctggaaaagatgctggaactttactttaaaattgaattgatagaggaagagttttatatgcttgaatttgacagccctttagcggtacttcagcatttgaaaaagacaggggtgaatgtttcgggtgattcgacaatctggacgaaaggacgggtggatgcctttattaaggactataacgcccgctttgccattgatggaaaggttactctaacttaccatccgctttattttgtgtgtaggaagagataattgaaaattgaaagttgataattgaaaatgaactccactgtctgtttcgcggccacctcctctgtttatagagggagtaccccgaaggggggggagggagttcaatctaaaatcataaatttaaaatctaaaatcaataaggtggtatattttgtaagcggaatagatacggatgccggaaagtcggtggtgaccggattactggctcgctctttgagaaagagaggggtaaacgtgattacccaaaagtttatacagacagggtgggtcggaatatcggaggatattctgaagcaccgggagattatggggattgaaccgcagcccgtggataaggacgggacgacgtgtccttacgtgatgacatatcccgcctcgcctcatttggcagcggagatcgacaaggtgacgttggatatggagcgaattgcggcttctacccgcaagttggatgccttgtatgacatggtgttattggagggagccggggggctatacgtgcctgttacccgggattacttcacgattgactatattcaagagcatgggcatcccttgattcttgtggcttcttcgaagctggggagtattaatcacacgctgatgagtctggaactttgccgtatgcggggaattgaagtggcttgtctcgtgtacaaccgtttcccgaacgacagcgaatggatcacgaatgattcgatcacgatatttaaacattatctggaacaatattttccatcgacagcgttgatcgagatacctgtggtacacggaaacgattacccggacgtggatgtcagcgtgttggagggcgggaaatgagaagagtggagctactttccccggcaaagaatgttgacgtggcgattgctgctatcaataacggtgcggatgccgtgtatataggtggtccggcttttggagcccggaaagccgtaggaaacagtttggaggacatcgagaaggcggtacggtatgcacatcggttttattgccgggtgtttgtcacgttgaacacgattctctacgacgaggagttaccggaggtggaacgtttgattcatggcctgtacaagataggagtggatgctattatcgtgcaggatccggctgtactgaagcttgatttacccccgatagcactacatgccagcacgcagatgcataattatgacttggagcgaatcaagtttttggatcgactaggattccaacgtgtcgtgttggcacgggagttgtcgttggcgcagttgcgggagattcgccaggaagtgaaggccgagttggaatactttgtccatggggctttgtgtgttagtttaagtgggcaatgctatatgtcgcattacttgacgaatcggtcggctaaccggggcgaatgtgcccaagcctgccggatgcggtggacggtggaggatgatgcgggaaaggtggtgctaaaggataaatacgtgctttcactgaaggatttgaacttgtcggctcacttgtcggaattggtggaagcgggtattgattctttcaagatcgagggacggttgaaggaagcggattacgtggcaaatgttacgaattactactccggtcgtctggatgaaatcgtggcttgcaacgaggatttgacacgagtgggtgccgggtacgtgaaggctggttttgaggccgatcccgaacggagttttaaccgggggtacacggactattttttcgtgcagaggaaaccggatatggtgaacatgaattccccgaagtcgatggggaagaaggtggccgtggtgaagcaggtgaagggaaaccggatgtgggtggaactactggaacccgtgcataacgctgacgggttgtgttattttgacggtagggaattacgaggcgtgaaggtgaacacggccgaaggaaatcaattgacgtgtaacgagagactgaacgtgaagccgggaatgttgttgtaccggaattatgaccatgaattcgtaacacgccttgctaaagggacttccgtgagaaaaattaaagtgaagattgacgtgtatgtggaagatgcccggctggtgctggtggctatggacgagaatggtatttccgtgaccgttcggagtgacgagacattcgaggtagccacgaatcctgcacaggtggaacgtgttgtcgggcaactgcggaagagtggggatacggagtacgattgttatgaggtggagtatcacgatgaaatggtgctttttataccttcttccgtggtgaatggttatcgtcggcaattattggatgctttgagccgggaacgggaagagcagcgggagagatgggtgcaggagcctttgaaccaagacgtgaaatatacggggagtgccgattggcgattgaacgtggtgaatcgtctcgcaacggagttctaccgggagcatggtgtggagacggtagaaccgggattcgagaccggaaacaaggtgagaggtagggaagtgatgaccacccgctattgcctgttattcgagttaggtatgtgccgtaagacggggaaggataaagcgctgaagtttccgttatatctttccaacaatttgggacggtttcgacttgaattcgattgtaaacattgtttcatgaaggtattgtctatttaataggtaatctatttatggtgtttataatactaggtttgcaacgaaatgtattttgggcaattctaatataggtttactctggctaactgtaaacttttttagggtaatacagggtgtttacccgttgaatacaggggggacttagggattaaagacgtatcaatttcgaatcaacttcggtacaaagacgttcacgagcgtgtttgtaccgaagttgataggtttttgttctgggattatctggtgattaccttaagtattcatccttctttcattttttgtttagtgaacgagtttcagcccgaccactcccgtcaggattagaaacacgaaaaggagacggtataaattcgtggagtcgtggaaaaagaaaattcccaatagaacggtaccgacggcaccgatctcggtccagatcacgtatgccgtgccgataggaatgctcttttgtgccaagtagagcaggaatccgcttaatcccatggagacgacggaaagggcgatgaagtggtagaagtatttctcgtgtagtccggcaagtttaaagccgaggggccagccgatttccagtagcccggcgcatattagtaaaatccattgcataggtgtatttattaagtgttatggggtaaagttaggatggcgggaatggaaaatacttgatatttatcaagaagttggtatatttgcttttgtaataataatacgttgtatgattgatgaaaacgtcttggaacgattgaagccttacctgacggaagtgagttacccgaaagggtatgttttgttcaacagtgagaagctggagaggaatatttactttatcaagcgggggatggctagggcgttcgttgaggcggatggccgggatatcacgatctggttcgggcaagagggtgacgtgattatatctgccagagggtacgtgtacggggagaaggggtacgagacgatggcgcttctggaggattcggaattgtaccgggtgaacgggatggatttacaggatttgtatcgtaacgatattgtggtttgtaattgggcaagacgattgattgaatgggagttcgtgaggacggaacatcatttgatagccaatctttcagaacctgctgccgacaggtatatgcagttgttacgggaaaaaccagagattctgcggcgggtgcagttgcagcatatcgcatcttttttggggatctcctcggaacatctgagccggattcgggcgatcactaaaaacagaacgaagtaacgaaaagtttcacgaactgaaactgtcccgttttttccgtgtatgattttgtcaaccatgaaagaaaggcttgataaaatggaaatatatcggtgttttttactaccttgcacaagtttatatgattattataaggaagttatgcgagttattcaatatataggagtgcttcttttctttttcctcgtgtcctgcgagaaaaatgacgtggagccacagaagacaaggacgttgatggtttatttggcgggagataataatctttcgggacacatgcagaagaatatcagttccatgatgtccgcttggaaggagagttataatgcaaatatcgtgatctattttgatgctcccaatgcagcaccggagctttacacgttccgatttaaaggaaaagaggtggagaaacaagtactaaaaacgtatgaggagatggattctgcggatccagaagttctgaaaaagatattgaatgagatgcaggatttatacccgtcagattcgtatggtttaattcttggttcacatgcttcagggtggattccctctggggcatctggtcggagtaatcggatgttacatgccgagcccgtgttgacccgtagttttggtaaggattataccgggtcaaacgagatggatacacgggatatggcaaaagcaattccttttaataaggagaatctggagtttatcttgttcgatgcttgtctgatgtcctctattgaagtgctttatgatttgcgggacaaggctaaatacgtgattgcatccccggctgaactgccagcaccgggtttcccttatgcccgggtgatgccttatttctggggaaaggggaaggatttggagaaggatttggtgaaagtgtgtgatgaattttgggattattataacacgtataatgcaactaatcgttttggtacgattgctttaattaagatggacgagatggagcatttatttgatcttactcgggaagttttgcaagggcaaaaagagaatgtagccacgataaaacaaaatgccgtttactgttatcctatggtggaatacaccaagcatgatcgcttttttgacttgggagagtatatgaagtatatgaccgaggacagagaaggactttataaagagtatcgggacttcttggataacgaggttgtgatctataaaaaagcaacgaacccattttattatacagaaataccggaggaaaaatttagcggtatcgcaacttatattcctctaagtattaaagtatggcgtgttgaaacagaggcttattggaacttcccttggtcgagagtttatgatgcggtgacggaataagtgatgtatccataatcctcctcgttattgcgagtaacttgcaggggtgttgtgccgtactctccttggtatctcagttgtatttcaaagagagattaatcaaaaaagtacggttcgtgtagttaacctatcgttgacctatcgttaacctatcgttaacctactaacgagactacggcacaagtatagagagacataccaatattatagtcattgatttgcttcagcgatcgtgtaaaacagggttgctcccgtttcaatcacttcatctgggaaatcgtattgtggggagtggagtggggggcagttttccccggaacccagaccgaacatggctcctttatattgctgtgtgaataagccgaagtcttcgccccagctgaatggtgtctgtaattctaggtatggtaaattgttgcgaatggtcgcacttttaataagactcacggactgcggatcgttttcattggcagagaacggttccaaccattccatctcgtgttgcaagccgggggtacgttcgcactcggtggttaccagatttttcagttgtctggcgtgctggtgtagcagtttgtcggttttggcccggagcgtggctcggatcagaccgtttcctgccgatacaccgtatgcctcttttccgacgtgtatttctactatggtagagagaaagtagtcgtcggattgcatatcggtgttattccagcgtgataactcgtcaactatcttgagtatggcgggaataggactgatacccttctgtggttcagcggcgtgggaggtttttcccgtgagcgtgatcgaaacgcttaccacggcacacgtgaaacaaccttccttgcagagaacggcgtgtaacgggtagcccggtatgttgtgcagggcaaatgccttatctatctggtaatagtccagcactttcgtgtctagcacggcttttgagccgctaccgttctcttctgccggttggaaaaggagcagtatgcgtccttttgttaacgggtgttctgacaacattcgagcaaaccggagtaatatggtcgtgtgtccgtcatggccgcatttatgtgccactcccggggtttgtgaatggtggggtatatcgtccggttcctgtacagcgacggcatccatatctgcccggaacaggacggtggggccgtcttccgagaagaagtattcaacgagcagcccgtggccgcccacgtggcgaatgactttggtagggtggaacgcctgtaatttatcctcgacaaaacgggccgttcgtgcttcgtggcccgagagttcggggtgttgatgcagttctcggcgtatctggtaaaaagtatctttttgcatagcttttcaatttacaccgcaaaggtaaaataattaattgttcgtgtggttacatttattttctatctttacgccgaattataaaagcaagtaggcatgaagttaaataagtcgcaaggggatttgttgaaacgggtgatcgagcgatgggaggcggacggcacgattgacgtgagtacggcggatcggttgaagggaagttacactgtgcgttctttcgagtggaaggagttggcgaagtactcgttttggattgccatcgtgtgcggggtgatcgctgtggtgtcggtgttggcggatcatttgatcatggatttgcttgaaagattgtttctttcttcttattctttggccagcggcgtgtttgccatgggagcggccttggtgtattactggggggggcgacgacggaaacggatgccttacaaggttttcagtaacgagacaattctttttttgggcgtgttgctgacggccgtttcggtcggttacttgggggcagccctggataatgggagcgggcatttttccttgctttttctgctagcggcggtgatttatgccgtgttgggcttttacttttcgtcggtgcaggtgtgggtatttgccttgttgtcgctgggagcgtggtacggggccgagacagggtatctgagtgactggggcaatcattttctgggactgaattacccgcaacgttacgtggctttcgggggattgctggtagcgtgtcgtttcctgctggtcggaaagaagtggttcacgacttttgattactctacatacgtggtgggaatgctttatttgtttatctcgttgtggttcctttccatattcgggaattcggaaagctggattcgctggtattccacgaaacaagtggagttatgggcttggaatctgctgattcttctaggttcggtagtggcaatatttataggtttgaaacgggatgatgctgttgcccgtgggttcgggatcactttttttctgttgggtatttacacgttgtatttctccctgttgtgggatgtcatacatgccgggttgttcttttttatactggctgtatctttctggttgctggggcgtaaagcagagaggatatggcacttggaatttctgcgtgatccgaagaaaccgaatgatgatatgaattaagttatggatacactggtaagtttagggtattgggggttgtttatcggttcttttctggcgtcgacggtgatcccgatgagtgccgatgtgttgttggtaggcgtgttgacgttaggagggaacgtgtggagatgcttggcgatagccacggtgggtaactggctgggagggttgacctcgtactggatcgggtggctgggacgctgggactggattgaacgctggttcaaggtgaaacgggaaaagctggagcaacagaaaggacacgtggatcgttacggcgtttggcttgctcttttcacgtggttgccgatcgtgggagatctgtttgccattgccctcggattttatcgtgtccgtccgaaaatgtctgctttctatatgttcgtggggcgtttcgtccgctttctggtgtgggtgttgttgtatatcaggtacgctgatcgttttatcgagtggatcagttgatccggtgatcgttaccagctaccactggaaccaccaccaccgaatgaaccaccgccgaatccaccaaatgacccgccaccgctgctgaatccaccgaatccgccgctactgccaccgcccatggggaagatgaagaacccgccgctaccggaggtgtgaccgggtgagtaaccaccgccgccccgtttccggaatatgagtgacaggatgatcacgaaaacaatgaatccaatcacgatgtcaaagggactgccttcattttttttcttgtattcgtctgcggtgtattcaccttttgacaagtcgatcagcacgtcagtggctttgtcaatacctttgtagtagttgtctgcttgaaaagcgggaatgatttcattacggatgatgcgggaggccgtcacgtccggaacgacaccttccaacccgtaaccgacggaaatggccacttctcctttttctcttccggatttgggtttaatcagaatgacaataccgttgtcttttcccttttgtccgataccccatttttccccgagacgggcagcgtagtcgttgatgtcgtgcccgttgagtgaaggtacggtgaccacggcgatttgggtggaggagttattgttgaagtttactagttttttttctagcgctgcccgttcttgggtgctgaataatcccgtgaaatcattcacgatgcgtttcggggtcatgggttccggaatatcctgagcatgaacggagagcagggttcctgcgatgacggtgaataatatgaagagtttttttatcattttgctataagttacaaattagagaacaggttgttcatacaaacctgtggtattcctttactgaaaggaaatttcgtcgggaagttcgttcacgtcgtcagcctggtagggaaagtacactttcagttgttccccagcagagatgacagcttcacagatgccttccgtgatcttgccttccttgaattttgcaatcatgtttttcatgattgaatcccagaagcctgcgggtactttggcgttaatcccagcatctcccaggattgcggatttatggtcaagtagggccacgtagatcaggaccccgtttctttgtaccgttttgtgcatatttaagtgggcaaaaacatcggcagcccgatcaagcacgtctattttactatgattttcgatatgtacccggatttccccggacgtgtctttttccgcctgcttgatagcggttaccatggcatctttttgttgttgggtaaaggctttttcgggagacataaaaatattttggattttagattttagattccgggcgcacaaggccctgctgattttagattttaaattttagattgaatgatccgcaaggatatataatttaaaatttaaaatctaaaatggataaatggttaaaatttaacttccggagctttttccgcaccggcagtagcctcgaagtaaggtttcgggaggaaaccgaacatcccggcgatgatgtttttggggaatgaacggatgtaggcgttataacctttcacttcctcgttaaacttgcgtctttcaacggcaatacgattttctgttccttccagttgggcttgtaagtcacggaagttctcgttagctttcaagtccgggtattgttcggagatcgccatcaaacgagagagggcagaggaaagttcgccttgcatattattgaacttctggatggtttgctcgtccagttgatcaaagtttacccgcatttgcgtggcttttgcacgggcctccacgacttgggtcaatgtgttctgttcatgctcggcgtaacctttcaccgtgttcacaaggttcgggatcaggtccagacgacgttggtattgattttccacattcgaccattgggaggatacattctcactccgggttaccatttgattgtaacttcctttgaaccacatgaagattccaatcacgatgacgataattactcctattacaatataactctttttcatgttttgcttttattttagtgttacgagtacaaatataatgctttattgattagccattgcagaatgaggatgttaaggttttagattttaaacttttttcctttagtttttatcttttagttttatttatcacccggtcgtagatgtagagcagcaaagtggtacctagtccgatagccagtattaccatccatatgtcggagggggaatactcgttccatagtaggttggttaactcatgaggggtgaggttgacctgttgggctacatgatcgaaataggcgttatttgacaaaccgttcggtagttggaggcctttttcggcaacaaactgacgagtgatcatcactttatccgccatgttttgatagactacaccggagatgattccggcaaagacgttaccgatgaaaacggggataaaggagtatcccatgtagagggcctttttatcgtgtggggcgattcgaccgatatattctgtgattttcggtgatccggccatttcgcccaacgagaagatcagtatcgcaactagcgtgaacagcacgttttgcgagaacagggtgagagccattcctatggaacagactaaaaatcccgaaatcatggatttaagaggtttcatgcgcatcacgatacttgacacgataatttggaagataatgatgtatagggcatcgaagtttgtcacgaattcggcatccataactcccggagccggactgtagttggtgctgatgaaagggatatacttttcaaaaaaatggtacaacacgctcgtgtctatccattgcgagataaagacgggtagggtgaagaagagttggttgtacatggtccagaatccggccacgatgagcaggaataccacgaatttcaagtctttcacgatactgaacatattccggaatatacccccgaaggtgcgagtgagagaagtctgttgcacgactccccggtggggttccttgtaaaaaagaagtagcacgaagttcagtgcgataataccagccgatacatagaacacgaggttggacgatcctttgaacaaaagggtgaccatcggtccgaaaaaggcgcctatgttaaccatcatgtagtagatgccgaacccaatggaggctgtttcatccgttgtggtcttggcaatcgtggcagagatgatcggtttgaacagggcggcacccagagccaagtaaaggtacatgaggaatactcccgtgaacgtggagaacatgggtaagaggatgaaggcggacgtgtagatcacgaaagcgagagccagtacttttttgtaaccgtagcggtcagcgatggccccggtcaagacgggcagaaagtagagtattcccgttcccacacccatcaggattcctttttgactttgcgtgaattccagaccacccatatcggatgatcccgtgaggtaattggcaaaaagcatgaagaaaccataccatgcccagcgttcaaataattcaatagtattagctacccaaaaggtgcggggaaatttacgaaacacgcccatcttttacgtttttaatgattaattggcaaatataacgaattcgacagatgaaaggaagtaaacgttcttttttctgagaaataagctgttaagacaaggttttttgcaattattccaagaaatatggtgtaaactgaattatattaactatctttgtaccgtgaaacattgtgagttcattttgatctttatcttctttgtattttccggacatattccgttcggctctttccatcgttgaattgacctttgtaagctttctttgttcagacagtttctttgcccgagtaggtttatatgtacgaaccgaaaatggctggaggcaattttaaacgtaacaattatttattatgacatttagagaattagaaattgcagagcctattttaaaggctatctgtgaaaaaggatatgaaaagcccaccccgatacaagagaagggtatacctgtggctcttggtggtggcgatatgctgggaattgcccagaccggaaccggtaagacagcgacattcgctataccgatcctgcaacatttactggccgatcgttcggaggaaaatcgttcggaaacacgagggaataaaggacgtctcgtgaaaagacggtctattaaggctttaatcctgacgccaacccgtgaattggctatccagatcggagagaatatcacggattacgggaagtacacggggattaggcatgcgattatattcggcggagtgaaacaaggaccgcagacggatctgttacaggcaggagtagatattcttgttgccacaccgggacgtttgctcgatttgatccggcagggatatgtgaatctttcatcgatcacgcattttgttctggatgaggccgacaggatgctggatatgggatttattgcggatatacgacgtttgttacccatgctgccgacaaagcgccagacgctgttcttctcggcaacgatgcctaaagatatagtgaatttatcgagaagtattctttcaaccccgacaagggtggaggtaaccccggtttcttctgccgtcgatacggtggaacaatgtgtctatttcgtggagaaaacggaaaagaagaaacttcttgtttccttgttgaaacaagagaaaaagtcggtgcttgttttttcacgtaccaagcatggggcggataatatatcacgtttgttgaagaaatccggaatcaagagtgaggcaattcacggggataaatcacaaggacaacgccagcgagctttgtcgaattttaaggcaggagctatccgggtgatggtggccactgacattgcagctcgaggaattgatattcaggagttggagattgtcataaattatgatctgcctgatgtggctgaaacatacgtacatcgtatcgggcgcaccgggcgtgcgggacatctcggtacggcggtgacgttttgttcggaagaggaacagtctaagattcgggaaatccaagttctaactggcaagaaaatcaatcggttgtcttttcaagcatgatgactgaacgtatataaaaaaagaacgatctgtgatgcagatcgttctttttctatatagaaataatagcttatttcactagattcatggtgtccgtcgcgataaccaattcttcgtccgtggtgatgctcattacaattaccttggaatcagtggtagacaatactttgtcttgtccgcgaacacctttattggcggcaacatcaaagtgaacacccatgtattccatgttggtacatacttgttcacgtacttcactgtcattttccccgatacccccggtgaagacgattaaatccgctccgtttagggcggcagcatagctacctacgtatttcttcacgtcgtaagctagaatatcaagggcgaggcgagccttgtcgtttccggattcagctgcagcctgtaagtcacgacaatcggaagaaacttcagacactccttgcaatcctgatttcttatttactaggtcgtttgcctgtgctgcgtttaaaccttctttctcgcagatatacaataatgctcccaagtcaaggtctcccgtacgggttcccatgatcacaccggcattgggagtgaaacccatggaggtgtcaacggatttacctttgttgatggcggttatggatgaaccgttacccaagtggcaagtgatgatttttttctcctcaatattccatcccagtattttacatgctttttctgccacgaacttgtgagaggtgccgtggaatccgtaacgacggatgcggtaattttcgtagtatttgtacgggatcccatagatatatgcttccttgggaagagtttggtggaatgacgtgtcaaatactgctacttggggtatacccggtaacagtttttccatggtctcgattcctttcaagtttgcgggattgtgaagtggagccaattcgcagcaagcagcgatctttttcttggcatcctcgtcaacacgggcgctcttggcgaagaattcacctccatgagctacgcggtgtcccacggcattaatgtccgtcaaggccttgattaccccatgtttcgggtcaaccaaagctttcaagatcaagtcgatcccggctgtatggtctgcaataggttcttctaccacgtatttatcttttccttccggtttgtgggtgaaacttcccacgggtaaaccgatcttttccaccaatcctttagcgagtaacgtcggttctcctgccatgtcaagcaattgatatttaatagaggagctaccgcagtttaaaactaatacgttcattataatttaatttgaaaatggtaatacttgttgagtctataaaagtctattttgccgctgcctgatttaccgtgatggcaacaagattcacgatgtcgctcacagaacaacctcttgacaggtcgttaatcgggactgccattccttggaggacgggacccaccgcttcaattccggcaatacgttgcacgagtttataactaatgtttccaacttcaagactcggaaatatcaatacgttagctttaccggccacgggactgcccggggctttgctggcacctaccgatgccacgagggctgcgtcagcttgcatttcaccgtcgatcatcacgtcgggagccatttgtttagcgagttcagttgcttttactactttgtcaaccaattcgtttttagctgatcctttggtggagaaacttaacatggcaactctcggttcgattttagcgatcgctctggctgttccggcagtagccacggcgatttgggccaattcttctgcggtcggattaggcaatacggcacagtcggcacacacgattaggccgttttctccatattccggtttgttggttaataacaagaatgctccagatacaacagacatacccggtaaggttttcacgatctgtaatgcgggacgtaatacgtctccggtggcattttttgccccggcaacttcaccgtcggcatccccgctcttgatcatcaaagtggcaaggtatagcgggtcaagaacgagtttcaaagcttgttcttttgtcattcctttactcttgcgaagttcaaccaaaaggtctgcatacgcttctttcttctcgtgattttcgggatcgatgattgtggctttaccgatgtttttcaactcgaatttctcggccaacgctttaatttcagccggattaccgatcaagatgatttgagcaataccttcagctatcaagatatcggctgctttcaacgtacgttcttctgttccttccggaagtacaatccgtttgttgcacttcttcgcattttctttgatttgttcaaggagattcatgatatttttattttaaataatagttactcgcaatcgttagcgcgaaagtagaaataaataatcaatttgtaatgcagacattacaaaaaagttcatttccggagaaaagtttattatttactcttgtttcattttccgagcttgaaacgaatacgcaatactccatcattgaaatcaaatgagatgatgcgaaaagtgccgatctcggccgtgttggtgacatgaagtccgatgcaggcgcattgatcataatctccgatacgaattactcgtacagtcttgattcccggttcaggaaggcgggtaaggttgatgcctgccggaacctgatcgatcgggtagaaaatttcttccacgttaatgttttgttgtataatgtcgtttaccgcttgctccacggtggcaatgtcttcggcagaaggtgtcgttttgaagtggtaatcacatttagatttttttttctcgatatgggcagagaaggaacgttcacaatggaagtatttgaccatctgagaatttagtaggtgttccaccgtatgcatcggtggatattcttgtttgttgtgttcgttgagttgaatttcttgttccatatattaattattttgattgattaaattcacgacgaccttaaccataatatctttttcttccgtatggctttctgcaatcattaaagtaagagctacgagggtattatccgcaatccttttttctccattaggggaatagagaataccgttattttccatgaaccaaaggaataacatggctgcgattcgtttattgccatcgctaaaagaatggttcttggttaccagataaagtaacatggcagctttttcttcaatgctgggataaagttctatgccatcgaaagtttggtaaatagttgcaatagaacttttaaatgattggtctttttcatgtgcaaataatttgctttctccaaatttcccttttaggcttcgaatggcttccatggcgttttcgtacgtagcatggaatctgtcgccttttgttgtattttcaatgaagagttgttgataatcgtatttatctaaggtatcaagggcataaacataatcggttacgacggctaataaccctttggattggtcggatgttaattgttcttggtttttgagtgtattaccgagaatatgaaccatgtcttttagttcttgataccgttcaagttttattttttggttgatagcatatcctttgataaggtagtcttttaatattttgtttgcccaaatacggaattgggtaccgcgtttggaattaacccgatagccgacagatattatcatatctaaattgtaataaggaatatatcgggttacatttctttttccctctgttcgaacttgtgcaatttttgcacaagttgactctgactccaattcttgacttttataaatattgtttatatggcgcaaaatggctgtgcggtctgtttggaacaaatcactcatttgcgcttgtgttagccaaacagtttctttgtccatctttacatctagcttgatttctccatcttctgtttgatagataataatatcattcaaagtaggattaaaatcagtcgtgcatgttggtagacattcttgtttgttgagttgaatttcttgttccatattttactattcttagtaatctaatatatcaataaatgttccaaacgtttcgttttctttttttgtcattacaaatattatgaagctgtcatgattaattaagcttgtgccatgccctttgttcgtgtttgtcaaaagtgagttcgtattttcttaatcttcgtttggatttgaatgtccatttttccggcttccagtaagtgaattccacgagagtggtattagcatagatatgctggatccattttccccagaattgaaggtcgttttcttcaaacctgtaatcgtccggtttatagtatttactacataattcagctccttcttccagtactattttggagtgtgggtacacgacatgagtggtgtcatttagacgagagtccatgttttctccggtttgccagcttccatataaccggagcgtgtcgtaattcacgatgatctggagcgtgtcgtccgtgttgttgagcacgtggtattcgtcttgacaccagtaatcgcatcctgtaaatagaattgccaacgagaagagtaacatttttagccgttttttatttttcatgtcgtattgttgttggtttgcggtaatataaatagtcttgtaattacaagtgtaatgctttttaggaaaataaacaattatttctcgatgtaatgctttatatggctgtaattggtttgcttttgggaagaggttcatgctttcaaagtgaaaataatttcctgttttcaattaattaactaactttgtcgcttgatcgggtgggattttcccgccgcgggatcacttgacaagtggttccggtttaaatttaggtttaaataaaactgtaattatgaagttattagaaggaaagaccgccattatcacgggggcatcacgaggaatcggaaaggctgtggcattggaatttgcccgtcaaggagcgaacatcgctttcaccgatttaagatatgatgaaatagctcaggaaaccgaaaaagaaattgccgctttgggtgtgaaagctaaaatgtttgcttccaatgctgctgatttcgcggctacgaatgctaccgtggatgagattgttaaagaattcggacgtgtagatatacttgtaaataatgctggtatcacgaaagacaccttgttaatgcgtatgagtgaagaacaatgggatgccgtgatcaacgtgaatttgaagtctgtgtttaatttcacgaaagccgtgtctgccattatgttacgtcagaaatcaggttccattatcagcatgagttccgtggtaggagtgagtggtaatgccggacaagcaaactacgctgcatctaaagccgggattatcggattcacgaagagcgtggccaaagaactcggctctcgtaatattcgtgctaacgctgttgctccgggatttatcattacagatatgaccgcacaattgtctgaggatgtgcgtaaggagtgggctgctaaaattccattgaagagaggtggtactccggaggacattgcgaaggtatgcgtattcttggcttctgacttgtctgcttacgtgacaggtcagacaatccacgtttgtgggggaatgaatatgtaagatccgcctaaaagtttggttataattgtcgcagatgcgagacgataggggtattgaatttcaataccccattctttttatcggatgttgaatcgtgaaatgggagccttttccaatttcggaggttaccgtgatcgtcccttttaaatgttctacgattgtatggctgattgccaagcctaggcctgttccttgaacaaaattgtcgcccttatagaaacgttcgaaaatacggtttattttatcttcgtcaattccggtacccgtgtctttcacgaaaatggaaacctgatcgttattctgcctgtaaccgagtgtgattgctcctttggaggtaaacttaattgcattgttgattaagttattgatgacttgttttaagcgtaaaggatcggttgtgatgattgtgtcggttgcaggaaggtccagaagtaattctacctcttgcgggacgtttatttgttgggctcgtaagatgttttgtaataaaggtgtaagcggttgttccgttatgttgaaaaccatcgtgtttgattctatttttgagagatcgagtatgtcggatataagtgccagtaactgttcgcaattcaggttgatcagtgataagaattctttgacttcctctttcttgaaggccatatccccatcaactagtaaattggaaaagcctacaatggcatttaatggtgtccggatttcatgactcatgttggcgaggaatacacttttaagtttatcgctttgttgtgccttgtcacgggcaatgattaattcttcttcaattttcttgtgttcctgtgtactcatacaaacaccgacaagtcgaaaaggaatccgggttccttgtccgaggtaggtagattgtgcttcgaaccattcccattttccatccccccggtgaagacggtagctcacgggatcttcgataaaatttccttgggcttggagtgtgagggctttgagtactccggctatgtcatcgggatgtaccagttgggcgaattgttcgtttgtcagcgtacaatccccggccggaatgccaagatgttcgaaataacgtggatcaatagtcatcagattacatttcgtgtcatatgaccaaggaaatatcttcgtgcgacgtaaagccatgtttaacacgtattcttgggtaagttccgtcacgacgttgcgaaacgtgaataggatataatttgagtttttttctacggtaacatttttgaaataacctttcgctagaaaagagatcgtattgatggtcccgtaaatgaacgtgtcaggtgggagtgtaacttcctgctcgtctttttgcaggcgtcccaagagttcgtccaaaatattgatattctcatggaaaattgaaaatacttcccgaatgtttttattctttatgtcttgtttctgaacccctagttcggcactggcctgacgatttacttgtttgatgtttccattcggagttaatagtataaatcctgccggcacggaatcaagaagttctcgagcgaacttttgttgcgtgtctaattgctttttctttaccagtctttcgtgtttccgctttcgtgctatcaaatagaaaacgagggagagaatgacgatagcggccaataggataatgtttaatattatactgtatcgaatagatgcgccgccagtgaataagtttatctggtcaatcatgatgttttgcgtgttgtgttgtttaattgattgttcctgtattcccgtggagacattttcatgatgcgtttaaagaatttcgtgaaggcggatggagaggaaaaattcagactataaccgatttcttgtatggttttggtacttgaaacaagtagggattttgccagtgcaatcacataatagtcgatccattccccggcaaattttccacttgtagcatgaatgactgatgataggtatttaggagtcaggtataatttgttcgcatagaaaataatgtcacgttctttgagatgatattcttcaacgagcgtgatgaaacggttgaatatgctattgggatgtgataactcgaaatttttatcttgcatatagcggtaaacgaaattgtagagatcataaaataaagcatgtgctagtttatgtacagctagttcagaaaaatgaggattcagtttatctgttttcctggatagcaatgaataatatgattccaatagtttaatttcatcctcgttgagtccgactaccggatgatattgcattttaaaccgcaagggaatcatttcttggcacttctctttaaaatagtctgacgaaatgaaaataatcctcgcctcgtaatccggtgttgtatgaatcggtttgataacttgcttgggtaacatgataatcaaatgattctttttaatacgatagttttgagtgttgatcataatttccgcttcaccccgggtgcaaagcgagaaagaacaagtttcggtcacgatgattccctgtttcctgatttcttctccaatgaatgctttttcattggtcacgtggttataaatgattagactttccgaggtgtaatccgggggtacccgccgggcgagtaccttgatgttgatagtcgtggattctttcattttccatctaaatagttgagcaaaggaatgaataatctactatatatccaacggtgttccgacgtttagtttatttataccgtcctaaaggaaactaataatttattgacaattcatgcgctttatctaggaagttgttttttctcgatgaccgtttggttatttcccggaatatttctacttttaaaacatcgtatttgaatggttgccgaaaagtcaggccgtgattgtggctcactttttgtaaactcaaaataaaacaaacaagtaatttcatggaaaggtatataaaatataaggtgaaggccgggctaaagatagtcggggcgttcttgttcgtgggctttttagcttcatgtagtagttacaaagtgctgaatattgacgtgttgcatccgggagagttgaatgtcggaaacaagaatgcgcagattttgtttattgaccggaagctggtgcatgagtcggattctctctccgcataccagttgtttgctagtttgcggttacggagagacgaggttgtcaatcatttctataatggggtgcgtgacgggttacgtaacggggtacaacctattttgttggttaaagggttgggattgaacacgggatatattccggacgggtatacccctgcgccgatttcaccggaaggtattgccgcattggaaaagatttccggacaaacatacgttctctcggtggaatattgtaagttcgggctggatggtgcgagtcggttgatgcttgatactaatctcttcgtgcgtttatatgacccggatggtgttgtggtggattccgcaactactcataaattggatgatgtggacgagacgctattcgagggaaataattatgatataatttgtaatttcttttacaataacggggtgaagtatgcggaacgtttggtgccgacatggaaacctgaacagcgtaggatttacacgaataaccgtctgttgaatctcggttactatcattttgagaatgagaatgacgaggaggcacaacggatatggaatgcggccttgaacttgaaaccgaaggtggcagctcgtgccgcggtgaacttggcatggttctatgaaaaagatggtaacttttcgtcagcgaaagctttattggaggcggctttgaaaacattacaagcaaataacatcaatgacaacttgtccgtatatattacggattacataaagcgtttggagaaacgtatccaggatgaaaccaaaattatggaacagttataaacgattttaaagcatgagaaatttcgattattacaatcccgtgaaaattcttttcgggaaaggaaaaattgccgagatcgcaaaatggattccgaaagggatgaaagttatgatgacctacggtggtggaagcatcaagaaaaacggtgtctacgaacaagtgatggatgcgttgcaagggtttgatattgtagagttcggggggatcgagccaaatccgaaatacgagactttgatgcgagccgtggaattggcaaaacaggaaaacgtgggatttcttttggctgtaggaggaggttccgtgattgacgggacgaaatttattgctgctgtaacttgtttcgaggggaatgaaccttgggatatcgtggcaaaaggtgcacgggtgaatgcggcacttccgttgggagccgtactgacccttccggctacaggatcggaaatgaatagtggcggggtgatcactcgccagtccactttggaaaaactggcattcaattctcgtcacgtgttcccgaaattttctgtactagacccgatggtgacttattcattacctatgaaacaagtggctaacggggtggtcgacactttcgtgcatgttatggaacaatattatactttcccggaacaagcagagatacaagatcgtttttctgaatcaatcttgaagactttgattgagttgggaccgaagttgattcatgccgagaaaccgaattatgaagatcgtgccaacttcatgtgggcggccacgatggggttgaacggtttgattgcctgcggggtatcgcaagactggtcaactcaccatatcggtcatgaattgactgctttcaacgggttggatcatggaatcacgctggcgattgttttaccgggagtgatgaatgccacgaaaattaaacgtcgagagaaattgttgcaatatgccgcacgtgtgtggaatattgacacagatcaacccgatgctgccgatcaagcgattgcccgtacggaacaatttttcaatgaattgggcgtgaagacccgcctgtctgattatggcgtgggtattgatacgatcgaccgtattgaaaagcgtttccgtgaacggggggattttgccctaggcggtatcgatgatgtgaacgtggataatgtgagagcgatattaacttcaagactttaataattgagaatggagaattgaaaatggaaaatggcaaaagtgtcttttttcaaattcaattctccattttcaattttcaattttcaattgcctatgttgcgtgtatatcgggcttctgccggtgcggggaagacgtttgctttaacgatggaatatttcaagatcgttttcaatgtttcttctgagtataaaaatgtgcttgccgtgacctttacgaataaggccacggaagagatgaaattccgtatcgtgcgggaattgaacaagctggcggaaggccagaagagcgattaccgggaggaacttaaacgaacgctgaaattgacagacgagcaggtgagggaacgggccggagtgttgcgtactttgattctgcacgattacgggcggttatccgtgacgacgatagatcgtttttttcaacgggtaatcaaagcgtttacccgtgaactggggatatttcccggttataatgtcgagttggatagtgactacgtgttacagcgagccgtggaccaggtgatgcaacgcatgaataaggataaggaattaagggcgtggattaccgagttgatgagtgacagcgtggaggatgccaaatcgtggagcgtgaagagtaagatcgcagagttggggaaggaattgtttggtgagagttatatgcttttcaacaaggaggtgagggataagtttaacgatcgaggattcctgaaaagttataagatgttcttgcaaggtgtgatctcccgtttcgaggatcgcatggagatgttcgggctgtctgcttgccggtatatcgaggagaatggattgcatgcggaagattttaaaggagggaaacgaagttttataaattatttttacaaactgcgggataaaagtctggataagattcccgattctgttcggaaagcaatagataacctggatgaatgggtgacgaaaaagcatgattcgtcgatccggatgttgattgagcatatctacccggaactgaacacgaacttgcgggaaagtgttgagtattatgacgagaatcttcgggattacgtgtctgcagttttgctctcgaagaatctttaccaattgggaattttgaatgacttgtacggggaggtgagagattattgtgatgaaaaaggactcatgttactgagtgacaccacccgtttacttaatatgttgattgccgggaatgatacttctttcttgttcgagaaaacagggaatttctacaagcatatcatgattgacgagtttcaagacacctcgaccatgcaatggggaaattttctgccgcttgttgtaaacacgctttccgagggaggaagagctatgatcgtgggggacgtgaaacaaagcatctatcgatggcgtaacggggactggcgtttgttggcagaaggggtagagcatgatttggctactttcggcacggataacgtgattctagagcataattggcggagttacaaggaggtggtggaattcaataaccggttctttatcttggctgcacggcaattgaaggagttgtatgatagtgaatgtggggaagagaatgtttattctcgttcaatcacggaagcctattcccggccggagcaacttgtaagtcgttcgggaagtgggtacgtggagattcgtttttgtggggaaaaacaagaagaggggagtgatgaggagatcatggactctgtcgtggatgtagtcaatgacacgatgtaccggggtggagagctgaaagactgcgtgattcttgtgcgtaacggtaaggaaggcgctttcgttgccgattacttgatagaatataacaagcgggagaatattccttttccgataccttttatatctaatgattcgctatatgtttcctcgtcgccttacgtggaattaattattaacgtgctacgttatatggtggaaccgtatgatgcggtgaatcgaacggtgttgctttataattaccgaacttttgtccggggtgaaaatactttacgggaagatgttcttttcaaagccggtagtacggacgagagttttcttgacacgatcgacttgccgtttttacgggagccggagaaactgacatttagttccttgttcgagatcacggagacgattatagaggcttttggtttgcgggccaggacggaagaattgccttacttgatcgctttccaagatattctttttgattacgagaaaaataacacgaatagtattcctattttccttgagtggtgggagaaggaaaaggataaaaaagtgttatccacctcggaagaagtggatgccgtgcgaattctcacgatacataaatccaaagggttggaatttaaaacggttattattcctttctgtgcctgggatcttgatgatacccgtcacgggcgccggatatggtgccagaaccgggaggagggttttagggatttggagtatgcaccattgaactattcctctaaactggcagatagtcatttccgggaggattacctcagtgaacacgtgaaggcttatgttgacaacttgaatctgctttacgtggcattcacgcgggcggaacgggagttgtatgttctgccttacgcgcccaagataacgaaagaagggaaaccgtcagatattggtgcttttctctttcaagttttggagacaagcgggatgccggaatggaattccgagaattcgtgcttgatcatcggggagaaacagttgataaccggtaaggaaaaaatagaagacgataatacattaagtctggcggaatatccgatttatgaattgaacgagcgggtgagtgttcggtataaatatgaagattacacggatccggagacaacagagatttctgccgttgacgaggggaagatgttgcatgagatattccgtcgtatcgagacggtggatgatatcgatcgggcggtaaatgatatgtattattccggtttacttactttggtggaaagggaaaattaccgggagcaggtagtgtcttatttgaatgaccctgtctattcggcatggtttgatggtcgatataaggttattaatgaacgggatatacttttctgtaattcgggaaaagctcgtccggaccgggttatggttgatgggaaaaaagccattgttgtggattataaattcggtctgaaagaagagaaatcgtatatccggcaagttggtttttattgtaaaacattacggcagatgggttatactgatgtggcgggttatatttggtacgttcccttgaggaaagtagtgtccgtgtgaggacataaaaaatgggaagtttcaaatgcaaacttcccattttttatattcggagatttattatctacgataatctagtctctttttgccaagaggaacactaacacctaagtaggcatttacccggttggcatcacctgctgatttggtcattaaatagtcggaaccgatgaaaacagggcctaattttaagcctattcccagtgtttcgaagtcactatgtaagaaagagtaacttaatgttgccccgaaccagtttctcggacggtagtttgctgaaagtgtcaattctgagtaagctttaggctgagtgaattgagtagaggacaatagaccgaatccgagtttgttattcaaaagggtgtattctgctccgaggttcaaggttgaacgaagactggtactccggcttttggttttctcttccgtttggaattggatcaagtcaaagtcgaacacgtctccagcctcataagtttcataattatctggatcgaaattagtgaaatcaccgtaatcatgttcgctgtcagttgtggcaatcgtggtggatgattttgtccagctaatgaatcccaagtcgagaatggcagctgatacattaatacaaccaagaaaattataacttgcccctaagtcgatgccgaatccataaccggatacaccgggcgagtcgaaatcaatatcatcaatatatccaccatctgaactatacccaaattctaatcctttcatggaagtttccaaacgtcctttggtttttactttccacgattgatagcttgaaatatcgctggtatttacatttgcgtagatttggtcaattttagcgtctagattacctagtccaactaaaactttcacacgtcccccgacagtcaaatcctttgttaccggacgtgaatatcccaatcctatttcagtgaaaatatctgcgtggagttctatatcccgaatgtcgtattgtgtgttaagctcttcgaatgaatctggatcaatattagcgtagcgggcaaattcgaacatcttctttgggatagatgcgctaatgatggagcgggctcccaagtttacggtccaaaatcctttcccgctgtaaaaaccgaaagaaataatgtctaccgtcaagtcgatattcatcgtgttcttgttgtccagacgactgatgaacttatcgctattcaaaaagtcattctcgttttcgataatgtcgataaaatcatcgatactcaatttgtttgaagaagcagataatccgatggcaccgatagccgggatattaaaatatcctctggcgggttgcaaggcagggttcattttaagtctggccggaacgttgtccatgaaataagaagttctaagtccttgtgcaagaccctcagaaatccacatgatagacaagagtacagccacacagctaactttcaaaaaggtaaaactttttttcataaatagtgtcgtttataaatctgattggatatttattatgctgcaaaattgtcattttattttagaatagacaaggattattattaattatttgtttcattttaatgtaatgaaggcataatttatcatctgatatttggaaatgtaaaatagatactctatctttgcactcgcaaaacgaaagaagttctgcttgtattgcgggatggagcagttggtagctcgttgggctcataacccaaaggtcgtctgttcgagtcaggctcccgctacgaaatgaggatcgatgaaagtcgatcctttcttttttttatttagcatacgaaacgatctatccacttaatttttcacgtgagatgatggataggcgttgtatttgctatgtagttgtgttttggaatatataaaatacgctattttctttgttgtgtggattaatagtcatacctttgtaaaaataaataattctttgtgtatgaaaaaggtggtgtatattttgagttgtatttcattgtttttatcatgtagtgataaagacgtgtataaagctccggaaacggatctgaatctgttgaaaccatacgaggatatggaggtcgtcgttccggaggggtatgcctcgattgtcaagttatatgatgataccttggcaatttgttcttattcaacaacaatttcgatccctactttccgggcgtctaaattgggtcgggcatctgaaaatagtccgatcacgattgaaaatgtaaagaatgagaataattattatcaaggtgtgttaaatacttggcaggttgtggcttttgaggatagtcgggaaggagattatgactataatgatttgatcatacacgtgaactggagtattcgggaaaataattacacgatatccgttcagccagttgctttaggatcttccaaaaaaattaagctgggattcgagaaaatggatggtaatatttcgagtgtgaacgaggtgatcgtggccgaagattgtcggaaagaattgtttgaggggagagaggggtttatcaatactttttccggcaaaggaaaggtgattattaataatggtaaatataaataccagaaagagttggcgaaacagagtaatgatcttagatgtgccgtgaattggttcattgaagtagatggcgggacaagattatatgctattacgaataatccgatatgtcttaatcaggaaggaagaccttacggattgatattcactagaatctatgatgagtatacttattgtaacgagaaaggggagcgttgtggagttgactggtttctatatccccaagagcttgtgaatatatctgatatttatgatttcgacgactatatgaaaacaggagatatttctattttccgaactcccaaagaaggtttttatgacgccatagggaaaggagaaccgatgggaaaagaggggctggtatattgtccgaattcgttgtataacgtgaaactataatagtagtttaaaacggggagttttccccgtttttttattccttttctcgttatttttcagtgcattttgtttggtgggttgatatttatttgtacttttgcgcccgtgttataaaaacataatgtctaatttattaggagataagcatttattatttattatggcagaagaacaaaaagaaatgcaagtagagcttgcacaagaagaaaccaagaaagttgctcctgtagcaacaacaagcgctgaggctgacgagaattttgactgggaagcttatgcaaatgatgatgtaatccccgcatcagaaaaagaagaattggttaacagatatgccgagactctttcatctgtagtagagaaagaagttgttgaaggtactgttatctcaatgaacaagagagaagtcgttgtaaacatcggttacaagtcagacggtatcatttcattgaacgaattccgttacgatccggaattgaaagtgggagataaagtagaagtttacgttgagactcaagaagacaaaaaaggtcaattaactctttctcacaagaaagcaagagctttacgtagctgggatcgtgttaacgcagcgttggagaacgacgaaattatcaagggttacgttaaatgtcgcacgaagggcggtatgatcgttgatgtattcggtatcgaggcattcttaccgggttctcaaatcgatgttaagccgattcgtgattatgatatctatgttggcaagaccatggaattcaaagtggttaaaatcaaccaagaattcaagaacgttgttgtatctcacaaagctcttatcgaggctgagttggaacaacagaagaaagatatcatttctaaactggaaaaaggacaagtacttgaaggtactgttaaaaatatcacctcttacggagtattcattgacttgggtggcgtagacggattgattcacatcacagacctttcttggggtcgcgtaaatcacccgaacgaaatcgttgagttggatcagaagttgaacgttgttattcttgacttcgatgacgagaagaaacgtatagctcttggtttgaaacaattgactccgcatccgtgggatgctttgagcgcagacttgaaagtgggtgaccgtgtgaaaggtaaagtagtggttatggctgattacggtgctttcgttgagatcgctccgggtgtagaaggcttgatccacgtatccgaaatgtcatggtctcaacacctacgttctgctcaagacttcatgaaagtgggagacgaggtagaggctgttgttcttaccttggatcgcgacgaaagaaagatgtctttgggtatcaaacaactgaaaaacgacccgtggcaaaatatcgaggagaaatatgctgttggtacgaaacacaaagctatcgtgcgtaacttcacgaacttcggtgtattcgtagagatcgaagaaggagttgacggattgatccatatctctgacttgtcttggacgaagaaagtaaaacatccggcagaattcactcaaattggtgctgaaatcgatgttgtagttcttgaaatcgacaaggataacagaagattgagcttgggtcacaaacagttggaagagaatccttgggacgtattcgaaacgatctttaccgttgattctatccacgaaggaacgatcactgaaatctttgacaagggtgctgttattgcgttaccttacggtgtagaaggatttgcaactcctcgtcacttggtaaaagaagacggaactcaggctaaggttgacgagaaattaccattcaaggtgatcgagttcaacaagggtgccaagagaattattctttctcactctcgtattttcgaagatgagcaaaaggctgccgacaatgccaagaagaaagatgaagctagcgctactaaaaaagcagtaaagaaagtaaaagagaaactggaaaaaacaactttaggtgatatcaccgagttggctgctttgaaagaccaaatggaagctaaagaagaggaagaaaagaacaattaatttgtgaaattcgaattgactatattagggtgcggttctgccgtacccacgcttcaaagaaatgctgccgctcaggtactcaatgtacttgagcggtactttcttattgattgtggtgaaggtactcaacaacagttgcgacgtttccgggtgccgtacaataagattaatcatatttttatttctcacctgcacggggatcatttcttcgggttgatcggtttgctttccagtttctcgctacaaaaccgacgtgccgagttgcatatctattccgataagcgtttacaggagatcattgaattccaattgaaggtgatgaattcccgtttgaattatcctttgatttttcaccatctggatcgtgaacccggtttgatctacgaggatcgtatgatgacggttcatgcttttccattgaagcatcgttacgaggccccggtgacgggttttctgtttgccgagaaagagaaggagagaaatattaaaagggagatgaccgatgcttttcaagtgcccgtggcttttatgcaccgattgaagaagggggaggattttgttactcctgatggcgagattatcgcgaatggccgtttgacaacggcaccacctgcaccccgttcgtatgcttacatgaccgacacgcttttccgggagtcttttgccgaatacgtgaaaggggtcgatttactttatcacgaatccacttacgggaacgagtttgccgatttggccaaagagacatttcacagtaccgcgggacaagcggcgcgaatggccgtgcttgctggggtgaagcacctcctgctaggacatttttcatcccgttatcccgatccggctcctttgctagagcaagcccgagaggttttcccgaacacggatttgtgttacgatggggcaatattcgaactacctgccgtgaagagggggtgagttttacttcaacagcttcctgttcccgtcatcttccaatacacgcatttgctgaatggcaatccgatttagctttatgagtcgttccccttggggaataccttggtcgatgaacacggcatttaggttttccatgttagaaaggcaaatcagttcgttgatggaggcataatcacggatattgccttttaattcggaatgctgttcacgccacattttagcagtcataccaaacatggctacgttaagtacgtcggcctcttctgcatagatgatacttgcctgtgccggagtgacctctgtcgggataagattctgtttgatggcatcggtgtgtatgcggtagttaatctttgatagctcacgtttggcggtccaaccgagtaatcgttgctcttcgtttttcagtcgctgaaattctttgattatataaactttaaattcagggcttatccacatcgcaaactcaaaagcaatgtccttatgcgcataggtaccgccatacctgccggccttggcttgcaggctcatggcattagtatgtgccacaaactctttgacgcttatcttgaaactgttaagtcccgactggtttctaattatggcgaattcgccataattaaaatcaggattgtacaccttctcccaaattccgataaattcaagcgtgtttcggttacgtaaccagtctgtaataaagaaatcaccgtctttggcccgtaacatatctgttaggcaaatatagtcctcgtcattgactttgataacattcactttggtgtcttttactgtaatttttgccattagtgatagagactttgaatttcagtcgtaaaggtatccataatcaatgagattattgaattatttacgaagataaagaagattttctaataaacggatcgtggaaactgtggtgttggtcaagggctggttcttggttaagctattttttcttatcttgatgtaaatatcctatttgtagttcattatcatcatgaagcattcatcttgcattcacgaagcattcatcctcgataaaattgatatttgaatgggttttgtttggaggtagggtgtgttttgtcgtatattagctacttgacggagtatgcttgaatactgggggatgtgggcgttacgatagcgtaaggtgggagaatatgttttgggacaagtgaaatataatgggtgtcgtgaactattatgaacttgtttggtgttggtttgtcctgtatttttgtgtggaaaaatgaaatcatatttaaaatagcggttatgaaaatagaatcttggttgcacattttagtttttcttttgctgtgtggatgttcgggaggaggaggtgaagaggaggtgacgcctccgacagagccggagactccgaaagtacaaatagctttaaattgcggtattgcttcccgggccacggaaacgagtttcgagtcgggggataaggtcggtttgttcgtggtgaattataacggttcttctgccgaaacgttgcaaaatacgggaaatcatgcggataatgtgaagtttacttattcttccgcgtggaccccggagcgggagatttactggaaggacgagacgacgaaggctgatttctattgttattatccgtatgcgaccataacggatgtcgcggagtacaagttttccgtgaatgcggatcaagcgacggaagcaaagtacaaggcatccgatttcttgttgggaaaaacgggtggcgtgtctccgtcgagtgatgcggttgatattactttgaagcatgttttcagttgtatgcagatcaatgtggctgccggtaaagggtacacggaggaggaattgaatgaggttgtcgagagcgtgaccgtgcatggtgtcagtaccggggcttcgattaacctgtcaacgggagcggtgaaggcggaaggcggggagaagatgatcaccccttggaaggatggcgagtattacaaggcattgatcgtgccgcaatctgtcgcggaggttggtttgattgtcgttcttattaacaagaaagagtacacgttaaagaaggctttcacgtttgaaacgaataaacggtacaagtttacagttacagtcgacaagacgaatgaagggataaatgtcggcattgggaactgggaagaggatggtgttgaccatggtggggtggcagaatagttaaaatttgtagctatggaaaaaagatattgtgttttggttgcatgcatgatggcgtttttatgcttgctttttgcctgccagaaagatgatggagtgatgggaggcgaggatactagacttccgattgatttatccggggaaattgatcaggtgatgttgtcgcgggtgaatgacgggggattttgtgataaggacgtgattggggtttatatcgtggactacgaagggggaaaacccggagaattgaaattggaaggaaatcgggcttcgaatgtgcagtttacttacaatgaagccaataataaatggagtggggcgtatgatatttactggaaggattcgaaaactccgatagatgtgtacgggtattatccttggaattctcaggagagtataggtgagtacgctttcgaggtacagaaggatcagtcgaaagcgggggagaatgggaatctgggaggttacgaggcgagtgattttctttggggaaaagcagaggaggtggctccttcgacaaaagtgatccgcttggcattccggcataaaatgagtacggcacgggtgacgcttgtggaaggagaggggtttgccgaaggagagtggacgggattggagaaacaggtgttggtgacgaataccaaacgaaaggcgttgattgatttgaagacgggaaacgtgacggctacgggaacggttgctatcacgggaacgataccttatcagaaagacggggaattccgggccattgtcgtgccgcaggaaataagtaccgggacggagttgtttaagatcacggtagatggtgtggtgtatgcttttaaaaagaacgaggcgtttacttacgtgtcttcgaagatgcataatttcacgataaaggtgaataagaaggagaataccggggcatacgagtttgtgctggtgagcgagtcgatcacggcatgggaagttgatatgataacgcatgatgcgacggcaaaggagtatatcgtgattgaatccgaggctgggaaattaaaagaggcgattaaggctgcgaataaggatttccgggagttgcagaatttgaagattacgggagagattaatgcggatgacttttattttatgcgggattcgatggggcggttgcaggcgttgaatttgaaggaagtgagaattgtaaagtttggagaggacggttatttcaaggatgatatgattcctaatcaagcgtttcaggataagacttctcttcaatttattgttttgccagatcaattaaaagtaataggggagtctgcattttttcgttgtcaagctttatctggttctttgataatcccggaaggtgtagttgagattaaaaatagtgctttttcagaatgttctgggatgcgaggaacgctggtgttaccttcgacattagaatacattggatttgatgcgtttgataaatgtggttttattggggagttaaaattaccagaaaaattgaaatatattggagaacaagccttttgttggtgtccaaattttgtcgggactttaatactaccggaaaatttgcaatatcttggagcaagtgcgtttgcttggacgggtggttttacaggaagtttaaaaataccacaaggaatagtggaaattccaatacaagcattttcgtcagctggttttgatggaactttgatattgcatgatgggattacgatgatagggcagagagcttttgaatcctgtaaatttaaaggggaattgaatctccctaaaaaattgttgatacttgagaatgatgtttttgtgagttgcaatttttccggagaattaaagtttccacctaatttacgagatataggggtacgtgcttttgcgtataatataagattaagtggagtattagatttacctcagactgtaaaaagtattggaggaagtgcatttcaatcatgcagaatagaagaaattatctttccagaaaatttagaatatataggttcttctaatgctgaatggggaggagctttctctgagtgcaataatgttggtcgtatcgtttgtaaaggtatgattcctgctgatgtcattgcgggagcgtttaacggtgttccgaaagataatttcacattggaggtgccggaggctgttgttgaacagtatcgtgcagctccgggatggagggattttaaacgaattgcggcacatcgggaattggtgtgtcgtccctccgtggtgaaggctttgaatgggaaatcaaaacgacaattggttttggatgcagaagggaaatgggaagttgtgagtaaacctgattggtgtacgttatctgctatgagtggagagaaaaagactgaattgacacttacgattgatgccggaagtgagaacagggaaggggagattgtgtttaagttggatgaatatgattatacgacgacttgccgtgttgcgcaatatttttacgaacatgaagaggatgaggaaattattttacaaactcatagtaggggtaaagggattaatctggtgttcttaggtgacgggtttaatgcggaaaatatctccaatggggattatttgcgggtgatgaatgagcagatggagcgtttctttgatattgagccttatcgtacttatcgggattatttcaatgtttcaacagcaatagctgtttctcaggaaagcgggattggtacggtgaatactattcggcgtacgaagtttgaaacgacatttgcgggaggagtcggattacggggagattatagtgcgatttttgattatgcgatgaaagtgtcctcggtagatgagagtaatctgaatcaatcactaattattgtaacgccgaatacgattgattacggtggtatcactgaaatgtgggaggatggtagtgctattgctttctgcccgttaagcgaggatacttatccttacgatgctcgggggatcattcagcacgaggccggaggacatggattcggaaagttaggggatgaatacatctatcataatgggtttattgaattttgttgtcctttggattttgctacgttgaattatggaaagtcattgggttggtatgaaaacttgtcccttaccggaaagatgcatgaggtgccttggtctcatttgattttcgatgaccgatatagtgacgtggtggatatttacgagggaggattcaagcatgcacgcggggttttccgttcggaacagaatagctgtatgaataataatatatcctatttcagtgcgatcagccgggaagcgatcgtgaaacgaatcatggaatatgccggagaatcttactcgttcgagaagttcgtggagaatgacaagcgagatgctgttaattcattgtctcgttctgcggagcgtctgggtgttacggtgcggggtaatcaatatgcaccccggattcataaggggaaaccggatattttgaaataagggttgaatgtaaaaacaagtaagctatgaattgcatgaaaataatatacagaatcgggatactctatttcctgtgcctctcggctggttgctctaattctgaaaaggaaatagagcccgataatctgtttgtctcttttgacgtggtacatcctgctcttgcccgggcgacttcgacaaattttgagacgggtgaccggatgggggtattcttgacagagaaagatgtccctctggaagtctccgggaattacgtgaataacgaattgttgacgtattccggttcgaaatgggaatctgcaagaaagatttattggaatgacggaacgtatgacgtgttcggttattacccgtacgtgtccccgttgacaagcgtggatgatctgccgtttgaggtagcgttggatcagactacggcaagggatggaaattcgttgggaggttacgaggttagtgattttttgtgggcaagttcgaaaaatgtgaccgcgggggatggagcggtgaagttaacgtttgctcaccggatgagtaaattgaatgtccggttggtaaggggagaggattatgacggggaactgccagaggaggccgaagtgtatgtgcataacacggtaccctcggccacgatagatttgagtgcagggttcgtgacaaagaatccttacggtacgacggagacgatacgggcgatgaagacgggggtttaccagtattcggccatactggtgcctcagcgcattgataatagcaagccgttggtggaggtggtgatgaaaggggttgcctatctggtagagagtcgattcgtttttaaaccggggatacagcacacgataaccgtggtgatttcgaagaatccggagcaggtgaaaattgagattgggggagaaattgaagattgggataaatagaaagaaatgtgtatttttgctccatctgatgttgtaaacccccgtcgattatgagagtcggtacgtttctggttgtatgtgtattgctattcgtttcttgcgaggagaaacgagtagcaattggtggtttaccgtttcagattacccggggggaagagtggggaattatcggaatgaatggcgaaatcaagatgatcaatgctttcgctcatcgaccttctgctttggtgaacgagaggttgagtgttccggatgattcgggaaaatatggtttgtatagtttttccggtgagttgaaatcggtatcacccaagagttttaccactatcggttattttttcgaggaggtgacgcttgcgcaagaaaagaagaatgagccgttgctcgtggtggataaattcggggagaaggtggcgattgtggataattaccaggggcatgaaatacggatggcacataattttaaggaaggattggcgttggtgtacacgaacaacgggaagtatggttatgtggatactcgcggagagatggtaattaaaccggtgtatgattatgccgtggatttttcggaagggttggccgttgtgggtgttgccgacggggaggggcggttggcctatcaggtaattaataagcaggggaatgttcaattttatattactttacaaaactgccggatacatgagaggtttgcatgtggttgtttgatgttcaagaatttggaacagaattattgcggggctttggatcgtgagggaaatgtttgtttgtatctgccgacacgtgtgcaggaagtcatgccgttccgttatgatgcggcgatattctggacggaatcgagagtcgggttgatggataaggtcggaaaggtgttgatcccggcaaattatgacaatggacgggtgatcggggagcgacgggtggcgctgaaattgagggataagtgggctctttttgattttgaaggacgaccgctttgcgagttcgtatatgattggatttctgatttcgaggggtgtgctttcgctcgtaagaataatgtctattatttaatagatgaacggggacaggttgtcgggccgaataagttttctgccgttcactgggatcaggaggcggtcagggagtgtccccaagtgttcactcggtatgaagcggtgaaggattcgatcatcgtgacggtgaaagaagagaagaaggtggagaaatccccggaacctgtcttgcctaaagcccgtgtgatagataaaaataatcctttctatcgggaagccaagcaagtgctggatgggggattgcaggaggaagatgcttcgaatcggcaagttatattaaattatatggaacatttccggatggcgtatccgacgaaagatattgatttcttggagcagttgtttagcgaggaggcgttgattgtcgtgggaacggtgatcaggaaagctccctcgaatgaaaggctctatttgtcctccgagcaggtacgttacagtgtgaagagtaaacgtgagtacctaaatcatttgaagacgatatttaagaggaatcagcgtattgacgtggaatttaatgattttacgataaaacgacatcccacgaaaaagggtatatacggggtttcggtgaagcaaagttataaatcggatacatattccgacgagggatatctatttttgttgtgggattttcgggatcaaacggcaccccgaatacacgtgcgcacgtggcagccccgcatggtggatgaacacacgccgttacccgaacaggagatatttaatatcggaagttttaatttggaatgatgggtaaaataatattgataatcctactgtgttttctggggcgttcgcttgatgcccaagagttcaaggttcattctttccgttgtctaccgaatgatatcacggcttgggtggatccggtgagggatctgaatgacgaggcttgtgccttgattaaagtggtcggtgatccggactttgttttttcaactcctttagggattgtttcccgtaagaatgaggttggagaaatatggctttacgttcctcacgggacggtgaaattgacgattaagcatcctcgttggggagtgttgagggattatcgttttccggcggcactggaatcccgattgacgtatgaattagtgatcgcttctcctcctgaaaaagtgcaggagaaaccttacccggaggtgctgaaacgtccgttccggggactgaaaaacacttcgttggattgttcgctttgtcccgtgtccgggggaaagttgcggggaggaaagccagcttattttctcttggcaaccttggggttacacgagggggaggtcgcgaacgggttgaggtttgggatcatgaagcggcatggagggtggttgcacgtgcagagtaatttccggttcctgtcgacttcggggaagtgtaacaaggcgggggagttgttctcgggtgaaccgacaccttattacaagagttccgtgtcccgggcattgaacacggtgaccgcgggaggaattcaccgggtgataggattgttgcatgtttacgagggaattggttacggggagcaacgggttgtttgggaaactctggaaggtgttaaattacaaaacacggattattcggtaaaaggattcgcaggagaagtgggggtacttatggagctgtgtcgggtggcggtttcttttggagtgttgacgattcagggtaaatattgggaaccgttgctgggtgtcgggattaatttttagagtatgtataagttttatttctatattatttgctgtgtggtggtgggaacggcttgttcgaacgagacggaccccacggtcttacccccgacactgactttgcatgaggctactggaattacccggaatgaggcctgtttatccgggaaaatagtattgaacggggagggaacggtacgggattgttatttcgtgtatggaagttcgccggaggagatgatacaggttgcagcaacccggacggaggagggtgcggaggttacattggaggggttgaaggcgggaacggagtatggttattacttggaagtttctaatggtggtagtgtggtacggacgggaatgttgcgttttcgtacatcaccgaacacggagcccgtgctgggagagatggttttgattaataaaggacccacgacggcagtcgtgcagtgcgtgttagtcgagaatggaggcgaggctctttcttttctgggattcaaataccggaaggagatctccgcggaagagttgtttgttgctgcagagccgggagaagagggccattttagggcccggttgacggatttgaatttatctacatcctatgtggttcgggcttatgccgccaatgccgtgggggagatatacacgggtgaagtgaagtttatcacggataacgctatatatgtttcggagccggggacgctgtcggaggtgattagcgagcgacagaaatatcaattgaccgagatttctattagcggaaggttgaacggttccgatttccgcttgttgcgggatatgttgggacggggagttgagggggaagtgactcccggtatactgagtcggctttacctgactgatgtacaggtcgtcgaggggggaatgagttactattcttcccgctatacggctaatgatacgttggggtatggtatgtttatgaattgtcggaatcttcgggaaatcgctttgccgaacacgataaaggtcgtggagaaagatgcattcaaggggtgtaccgggttaacggttctgacgattcccgatgaggtacgaagttttgcctcctcggaggggtgtagctcgttgcaagagtttcgggtttctgttatgaattccggtttcacggcggaagacggtattttgtatgacaaggggaaagagacgttattgttgtatccggaagggagggcacgggctgtattcgagattcccgagggggtgaaaaagattgccgaatatgctttcctgtatgcacccgtggatactttgagcatggcacattcggtcacggtgttgggacttcaggcgtttcgaggtgccaagtttaagaaagttgttctttccgatggaatagcctcggtaccgggtgcggtttttcaggcgtgtaccgggttacgctccgtgattttggggaggggtaccatgtttatatctgattactgttttgacgggtgtatgctggaagaattacgtgtgttggccgatattcctcctgcgtgtgcatccaaggctttcgagggagggaatttctttgattcgtgcgtgctttacgtgcctgccgggtgtaaaaacaagtatcgttatgccgatccttgggggaagtttaaacgcattgtggagtaagcgagtttgtagaaaaatatcattgggaactttatttgtaattgggagtttcctatataagatactttttgtctgtggcgggctaaaatatagacggtgaagagtaggataaatcgtccctattttgtatatttgtgtaaacttaaaatcgtgagtcatggtaaagcaaaatgcaataaaggttttcgaggagaagaaagttcgtacggtatgggacagcgataaggaagagtggtatttctccatagttgacgtggtggcggtgttaacggatagtcctaatcctcggaattattggaaggtgctgaaacatagacttgtaaaagagggtaacgagtcggttacaaattgtaaccaactgaaaatgccctcgtctgatggcaaatattacaaaacagatgttgcaacaaccgagcaattattccggttgatacagtcaattccttctcctaaagcggaacctttcaagttgtggatggcacaggtggtcaaggagcggttagatcaaatgcaagatccggagttgtcaatccagcaggccatgatggattacaagcggctgggctattccgataactggatcaatcaacggctcaagagtatagagatacgcaaggatttaaccgatgaatggaagcgccacgggttacaggagggagtgcagtttgccacgctgacagatattatctacaagacgtgggcaggtaagatagccaaggagtacaaacaattcaagggtttgaagaaagagaacctgcgggataacatgacgaacacggaactggtgctaaatatgcttgcagaattgtctactaaaagaatatcggaagtgcggaatcccgaatctttcgaagaacacatgaatgtcgcccatcaaggtggaagtgtagcccgtaatgcaagaatggaattggaggctagaataggggaagatgttgtgacacctttaaatgccaaagatatgttagagttgcagggtgatgcgggcacgaaagagggggaagaagacgttcaagaatgaacgtgacggtatgtcttatcagagtttttcccggatatttcttacttcccgttttacgtcaagttgtatgctggacagaagtcttttgtataccgaagtttttcgttgatttgcctctggaaaatcggtatttaaagctttttgtaatgcctgatacattaacaggctatcttgcactaattcttggcggttttccgagtatcgggttatattccggtgtaaacggtttttctcttgtaagagggtgtgatggtaggcattaccggtagagaaattgctatatacttgggtaatcgtatttttgtccggggatttatttccggcaaaagggtattgcaggtaaaggaaggtgatcacgaaagagacaaggataaacacggcgtatttgtagattgttctgaaagatttgcttttcagggtttcgatgatttctgcggtattattgaaacgtgaattcgggtcctggcaggtacatttctgggcgatagaggctagtttgcgatcttttaggatgattgatagttcctcgatgatgatgcccaatgaatagatgtctgttctgcaatccagtatcgctttcgggtttagttgttccggggcgaggtatttttctgttccggctggaattttcaggatttcgtaatcatcacaatcagcaagtccgaaatcaatgagtttcacattgttcccgttatgcgtgataaggatgttattcggtttcaggtctttgtggatcagttgcttgctgtgaatgtactgcaaggcattacatatttccgtgatgaacttgtaggctagaggctgggtcagtttaccttgttcgataaaagtggttaacgggataccgtcgatgtattccagtacgatgtaattgcccaaaagatcgtttttttcccatcccaaggtgtgacggatgttggggtggtccagttgataaccgatattgaattcctttagcaagagttgcttgtagaattcttgcgaggaatagaagggttgcaggcttttcaggatatgcagttttccataccggcggcatagatgtaactgactgaatccgttggccggggtataaaattctttcaggtccgtgtatatatccaaggttatatcctctccgaaaaaaccggatgataaagtttcctcattcattatgtcagttgattgattaaagtgagtcccccgttacgtccggcaatgaagggcggtgttttttggttatctcttaagatgtaggataacagcaaaggttggcccattagaaaacaagctgtttcgaagtagtctcctcttcttagcttggattgcttcgagtcgataacctgaaagcgggcttccccgtggtattgcaggcgcaagtaacgattgggcgaccagcctatttcgatctcgtctcccggctttaaatcctgtacttgtatttgtttcgtggtgaaaaatgatgaattgtacatcgtgctggttttcagatggtggcaaaagtcgctgaaacaagtgaaaccgatgtaccgggataataaatccaaggtttgagtgtgcggctggtgcgtgtcgttgacatatccccacaggcgttttaacgtggaggtggagattaggtaaccgtgttcggattttagatgaagagagaattcgtcgaaatcggtcgtggtaagtaaattccgagaatacttttttccgactaatgctagtaactccattatttccggtttcaattcattcattcgatataaaattagactgatgataaatcatgacaaatttactagaatatggcggaatagaaaaatttttaaacggataaaagtatgtcaaaaggggcgtgaatgttcatttttgtatttttgtacacgaagtatgttttgaaagaattttaaatcactatatttgtctaatgggtgatgaagaatatatgtcgatatgatagatgagcagttgattttatccggggtaaaccgcaagaatgaaaaggcttggaagagtctttacgagcattactatgcggctttgtgtacctacgtgagccggattttgaagggatcggagagtacggaggatttggtacaggaggtttttatcgctatctggaagtcggataagaaatttgattccgtgcaggatttaacccgttatttgtaccgggcgtgttataataacgctttggtgttcgtgcggaataaccagatccatgatactattctgaattctatcggggctgaaagtgattttaccgctgatgacgtgtacgcccagaccgtgcgggaggaagttacccggcagttgtacgtgtatatcgaggccttgccttcggagcagaagaaagtgattctgatgagtatcgaggggtattcgtgggatgagattgcggaaaaattgggggttagcgtgaataccgtaaagacacataaaagtcgtgggttcaggtcgttacgttcgaagtttcaggattccgtgtgcctgtttttaatttaattgaaaaaaaatgactactcgtgtcatctgaaatcgggagttgtgtattatgagtatacaaagtgaaccgataatagatgaacatgaagaaagatatatatgatgacgcttctttgatcaagaaatctttgttgaaagatttgagcgaggaagatcgaatgaagttggagcagttgctggaagatcggcaattaggggaggtgtatgatcagttgagtgatccgacgtacttgaaaaagcaatttatggagtacgagaattattcgggtaagaaaggctacatggtttttagagaacgaaggggacgtgcccgacgggtgaatacgattcgttgggtggcggccgtggctgccgtgtgggtgattgtactgggatcgatgttatggttgacgttaggagagagcggggaaaaggaagtaccgcccgtggcctcgaaagttattccggcaggggagaagaaggcccggttgattttagccgacgggaccgaggtcgaggtgtcgaagacgggtgcgcacgtgttgaaagaggagggtgtgaatataaaatacgagaacggggagatttcttacgagacggaaagggtgtctaccgaaattgtttataatgaactggaggttccgagaggaggagagtgtatcatcacgctggatgacgggacgaaggtgtgggtgaatgccgagacccggttgaaatacccggtaacgttcgtgggagagaagcgggaggttatactggaaggagaagctttttttgacgtggtgaagagcgagaagccttttatcgtgaagacgtctttcggggatgtgagggtgttgggaacggccttcgggataaatgcttacgcggatgctccggagagctatacgaccttggtaaggggtaaagtgagtgttgagacaggtgaggccgatccggtgattattcaccccggagaacaagtggttacgttcaaggacgggaagatgatccggcaggaggtggatgtggaggagttcgtggggtggaaagacggtatatatgttttccgggagaagcatttgggggatatcatgaagacgttggaacgatggtataatatatccgtgctttttgaagaagaagagttgagagaacttccatttacagggaatttgaaacgatatgatgatataaatgtattttttgatgctttaacccgtaccggggatatgaagtatcgggtggatgggaatcacgtgattttatatataaactaaaacgagataacggactacaaatttctcaggttcgatgtccattatctcatcttaacaagtaatttacaaatctatgaaaaaaaatccattcttgaagtggaaaaggcttttaaaatgcaaaggcttttttcacgtggtaagtttgacacttatcctgacgctaggaagtttggcgggatatggtgctaaagtcgtgccggatacggtttctttgaatctgaaagaggtgaaactggagaggttcgtggaggtgatgaagcagaaaacgggactgaatttcctgtataattcattgctgtttaaagatgcgaaaacggttaccgtggaagcaaaaggggagaattgggaagcggtgctgaaacgggttttggagaaagaggggttcacgtatgacctgaaggatgatattgtggtgatcaaacggaaggttgaaagtaatacccgtcaggtatcagatccctctaacgttgtgaaagggaaaatcgtggattctaataaggaacctcttcccggtgtcaccatattgctgaagggaacgagtgtcggaacggtaactgattctaaaggagatttttcaatccgtgtgcctcagggggttgattctttgattgtcagtttcgtgggaatgcagaccacgtatctgaaacttgaaaagaataagttcgagtacacggttgtgatgaaggaggatatgactcaacttggggaagtggtgattaccggttaccaggagtttgacaggtcgagaatggcaggttctgtttcttcaataaaagcggaggatttgcattttaacgggacgaatactttggagcaggcgttgcagggacgattaccgggtgtcgttatcacgaacacgagcgggttggtcggtgtgcggcagaagacccgggtacggggaacttccacgttgttgggaagtcaggaaccgatttgggtcgtggacgggattatccaggaggacccgcttccgtttgacacgaagacattgagtagcgtgggggatataaactcggataatttcgattatatccggaatttcgtgggtagctctatctcttggttgaatcccaatgacatcgagagtatcacggtgttgaaggatgcttcttccacggcgatttatggtgtacgtgctgccaatggcgtgatcgtgattaagacgaaacgaggaaaaacgggaagggcttcaatcacttattctgcgtctttgaacgtggcggagcaggtgacttatgataagttagaattgatgaattccaaagagcgggtggatgtgtcccgggagattttccagagagggttgacggccacttggacgaataataatatcggttatgccggggttctgaaccagtatttgaataaggagattacggcggaacagtttgaacgacaagtggctaaattagaaacgacgaacacggattggtttgatattctttttcgtaacccgtttagtcataatcactcaatttcggtttccggtggtagcgaggacgtgcgttattacacctctctgtcatatagctccacgaaaggtacggctgtggggaatgataacgagtcgtatggcgctaatgtcggggtggatatgaccgtgacggataagttcagggcttcttttactttagccggttcgcacgggacgacgaaagggtttacgattgtcagtccttacgagtatgccacgaaaacgaatcgggcgattgctgcatacgaggataatggtgatttgtcttattatcaaaaagaaagcggtttcctgttcaatgttatcaatgaacgggatgaatccggtacttccaataagacgttatctctgaatacaaatttgaatttgaattatgatttcacggaatcattgaaattccagatgttggggagtgtgaatatcgcttcggttatcggggaatcgtgggcaacagagcggacggagtatattgccaagatacggcgttatgattatggtgcctataaggcgattgattctgagtacaaaaattcaccgcttcccgtgggaggagaatatagtcaggatgaaaacaagacggtgtcttggaattggaggaattcgctctctttcgacaaagtgtttaacggggtacatgctttaacgacgatgttgggtatcgagttgagtagcacgaagaattcgggattttcctccacggcctacggttatttgaaatatcggggaaaatcgtttacacaggttccgataacattagttaatccggttagtcaggcggaatacgcgaatgaattacagaagaagtttacccgtaaaatcacggacaagaaaaccaatcaaatgggggcttatctgacggtgaattacgcttatgacgggaagtacgtggtgaatttcagcgtgcgtatggatgcttccaaccgtttcgggcggtatgctaacgagaatttcaatccggtatgggccgggggacttcgttggaacgtggctcgtgaagtttggtttagtaaacagaatatcgtgtctgatttgagtttgcgtttcagttacgggtatcaacgaaatatggcaacaaattatagtcccagtttgatcgtgaaggttccgtcgtcttcggcttcaagcgctgtaacagaccagaatacgggggaggatttgttggaaatcagttctcttccgtacgaggatttgcgttgggaaaagacctcttcttataattacggggtggatatgggattgtttgataataagattcgggttggtttcgaatattacgtgaagaagggaaaggatatgattacttcgttgttggtgccccgggaatatggtatcgaaaatatgcccgtgaatgggggaagtatgaataattcgggttgggagttgagcgtgagttttactccggtgcggacaaagaattttacttgggatatggggctgaatacctccaagaataataataaaatcacgaaagtgggtatgcagaatcttacttggaagacagccgttagtggggattactacaagaaaggatatgcggtatcttcattttgggcttttgattgcgaggggatagatcagacaaccggttacccgattattaatctggatatgcccgagggaagcgatccgctgaatgatcccacggtttacatgaaatatgccgggaagttagatcccgattttacgggaggacttaccatgtcgttccggtataaacaattgtctttgtcaaccggtttttatttgcaggtgggaggtaaaaagtttctgatgaatgcttacgagtcacagactcttccttcggagtacgagaacctgtcgtccgagttgaatacacgttggcggccgggcgatacggatgcacggtttccgggtttgccggataagaatgtcgttaatttcttactcccgggtacgacgacggtgtatactaacgagtacgagatgtataattacagtaatgcacgggttgtaaacgcttcttctttgaagtgtaataatatctcgttaaattattctttcccggaacggattgcgaatcagttgggtgtgaaatttatcagtttaggtgcaagtatgtctaatccattcacgattgcaagtaaagatttcaagggtcgtgatccggaggttgcgacgggagcacaaccagtgaccagttcgtattcatttagtcttaatgtaaccttttagttgatatgattatgaaaaagaattcattatatatatggcttttaggggtgtcgtttatctgttcttcttgtcacgatttctttaaagagtcgagtcaggatgagataaaaccctctacggtagaagatttgcggtccgtgatgtacaaggaggcttacccctatcagtttgcgtctgataattatttgatgctgttgaccgacgagatgcaatgtaacggattgttgattgatcagtacgcgacacagcatgctaatggaacacccgtgttcacgttcaacccgatgatgtttgacgggggagaagtttttccggatgttgatgttaactcttggaagatttattacgagaagatcaaaggatgtaacgtgattattgattacgtttcggaggtgtccggtacggaacaggagaaaaatgcactattgggacaggctactttgttacgaggattctatcatctgaaattggcgatgatttattgccaggcctatacagcctccggcgttgatccgaagaccgcgttgggagtgcctttgatgctaacgatggatttgacggatgattatcccgaaaggccttctttggaggcgttgtattcgcaaatcgaacaggattttctgactgcaacctcgttgttggaagagaattacacgccggataatgtctaccgggttggaagtgttgccgcttacgtgttactttcccgtttttatttgttccggggaggtgatgaggatttggataaggcgattcaatatgccggaatggcgatagaaaaggggccgatgttatctcgattgtctatgttgatgggaacggataagagtatttatgatagtgatatgagttcggaggtcgtttggtgttacggggggtattctttcaaggtaaatacttattttcccacagatgcttatcagtcaatagttccctggagtgtttcgactgaattgttgagtctatatacgacgaatgatttgagggatgatatctattttcagtcgtttacagccggtcccgggggcgtgtacggtgaaaaaataggtcttaattcttcgtatggcggtgatcacgggatccgtatggcagaggcttatctgaatcgggcggaagctttggctcgtcgttttcaggcaaagggagatgggaatgatcgggtacaggcgttggatgatttgaatactttgcgggaaacgaggtttgccacgggtacttatgtggaagaggaagtaacagatgctcaggatttgttagatttctgtttgaacgaacgtaggttggaattgtgttgtgaagagggattccgctggtttgatatcaaacgtctcgggctgtcggttactcataaatacattgatagcgagggtgtcgaacgggagtacgtgttagagagcaattccccgctgtatgctttacctatcccgtatgatgcgatagaacggaattataaattaaaacaaaatcccagataagtatgaaatggaataattatatctatatagggttgttgctgcaattagtgtttgcggcttcatgttacgatgaaaaggatctggtaccttcggaggttgtttccagttattcggttccccagggaacgcatgattatgatgatgtgattgtagatatttacaatcaatacggtagttgtttgttatacaagtacacggacaaggatacctattggactccctccggttggatggatggagttttgggagagggaggaaaaagtggttatattgtaaccccggcagacgagacttacgtgggggaacaggtgggtttgattcgggatgcgtggttttcattgtattcggatgaattcctgaaagagtttttgcctataaaaataatgctttgtgccgatattgattctgtttacatggtatgggatttttcttcatatccttttaaacagatctaccagggaaaagaagtgaaagcttggtataattatgacaatatttgtgtgtcttatggtagtgaagccgtgacccggatgacgaaagcggattccttggctttccagaataagatgaatcagatttttatagcgagtatgatagggagaaagaagagtgtgccctcgaaggagtttgaagagattacgaattatagtacgaacaatatcaattatttgagtgccgtagaattgtggaagttaggcgtgccccgttccgtgagttacaatgtttctgtggatattgattggcagagttttttgttgatgatggtatgttgtagcgaggaattcctgacgaggacaccggaatattccagtgattgggattatacgatggcaaactgggacgggttgttgaatccggtaaaagacgtaaatggtcttttgaaaaagcggtacgatctggtgcggaattattttatcgagaattataacatggatttgcaaaaggtaggcaatgctttaaatcgttagtatgaagtatttattggttatattgttttccctgtacgctttgggtggcagggctgagagtcgtgcgtcttttccgggggataaagtggttacgatagatgagtttattcggaaggataccccgaaggatgccggtttctttaacgtttacgtgcaggatggaaggtattatctggaggttccggagggtatgttgcagcgggatattttagtggcggtgacgattgtcaagggaaccgcccggaaagagcggagcagggatgcccgtttcgggtatggcggtgattcggtgtttgaccggatgatacgttttatcaagaatcgggatcggattgaaatagtttctccccaggtgtttcacctgggagattctacgggtttatatattgattattaccggaatctggaatctccggcgatagcctctttcgagataaaggctcgttccgggaattcgtacttggtggatatcacggacttgtttttaagtgacagtgacctgtttgccttgaaaggggccaaggagtcgttaaagttaggcggttatcaacaaggacaatcctacgcgttggacgtgaaggctttcccggagaatataaatttccggtctatcaggagttacggtttgtcgtgcgaggtgaaaaaaggtgaatttccttccacgctttgggaagtcggggcttcgtggtatttgttgccggaaaaaccgatgccgcagagagtgtttgacgagcgggtcgggtactttgccttctcgttggacgggatggtgaaacgtggggatttgatggataaaacgatgatggctactcgttggcgcttggaaccgagaccggaggacgtggagaaatatttgcggggagagttggttgaacccgtgaagccgatcgtgttttatattgatcgggctacaccggagtttttggttccttatttcatacaggccgtcaacgtgtggcaaggggctttcgaaaaagccgggttcaagaacgctatttacgggaagttggcccctacgccggaggaagaccccgattattgcgagggggatattcgttacccgttggtgtcttataaggcttcaccgatcgcgaatgcttacgggccgatggtgttcgatccaagatcgggagagattatcacgtcgcatatcgccattttccattccgtgctggaattgatacagcgttggtatttcgtgatgtgcggggcggtagatccccgggcaagagagtacccgttgagtcaggaggtgatgggtgaattggcggcaaccgtgttgactcacgaggtggggcatactttgggattgcgtcatcatttcatgggaagtacggcttatccggtggatagtttacggagtaaatcctttattcgcgaacacgggttgggaacctcgattatggattatcaacggtttaattacgtggctcaaccgggcgacggcttagaaccgcgggatttgttacctcgtatcggcatgtatgacgagttcgcaatagagtggggataccgttatttcccggaggcaggtaatttgaagcgggataacgagaagttacgggcatgggtggatgaaagacggcaggacccgaagctgttttatatcgaggagaccacttatagcgatccgcgggtgcagtcggaggatagcggggatgacgtgatcaaggcgaatcgtttgggtatgaataacctgaaatatataatggctcatttggaggagtggactgacgggaatgatccggattattatgtattgcggaagcgttatttgtctgttttgagccagtatcagaattacatagaacatgtattgcgttacgtgggaggacgttattcggataaccctacccgagaggaagagttgaggttgaatcagccggtatcccgggagaaagaggaggaagcgtgggcgttcctggaggaatatctgtgtaaggaacaggattggcttttcgtggccgacgtgatggaaaagaccggggttactcctgaattttatgaacaggaggaggctttgggaaaattgacaaagttgttgttgaagtattcggcgttgcataaaaacaggcagttgagcgaggtgggattcacggcagacgagttgttgaatcgtttgtattcgaccattttcgaggctaaaggacagggagggaagttatcctggtatgatcaggcgttacaaagcggtttgcttcagaatctggtgatcaacgcggagaatccttacaatctttcgaacggggtcggggttgtgatgcagcaagtgatttcgaaaatcaagcaacatgcacgggccgcgacggaaggatgttcggatgcgttgacggcaagtcattacaagactctttataattttattaccctgtgggaaaaagggggaaacaaagcattgattgaattgaattaaaaatatcgggaatgaaagtattgaatgtatatttgttactgtgggtgactttgttgtttgtttgtccggttgcagcacaacaggatgtaaagcccatgacttacgaacaatttaaggaacagaaagatttacaagcagataaaggtttttacacggtttatcgtttgaatgatcagtattatttggaaatcccgacagagggactgggtaaagaggtgttgatcaccacgcaggttgctcatggtatggctgcctttgtttccgaggcttccggggtgatccggttctcggaagggcggaataacacggtgcaggtggtgcgtaatcgcttgacggacgtgtcggcagattccacggacgtgtgtatgatgatggccttgaaaaagtcggggttagtcccgatagattataccttcccgatcgtggcccggggagaggacggcaaatctgtcatcatcgagttgacgggggaattgaataatccggggagcgggttgtttaatgtaagttcatatcattggctgagtcatccggatccttcccgttccggggtggacggttggcgaatgctcgataaaggcgttgtattttcagtgacctgcggacagtcggattatcaatcgaatccacaaactcaagaaggacgggatatcgctgctaggtatattctggagatggtgatacaacaacttccgggggacaggatgaagcagagaatcagtcatccggcttacgggttcgagacgataggggttacggagtatgataccaaaaggtacgtggctcaaaagagagaatatatccggaaatggaatctgacagcttccgcgaaagagataaagaagcagaaaagagggatagcgatcgaaccggaaagacagatttgcgtgtatattgatccggtgaccccggctcctttcgcggagagtattaaaaatggcgtgaaacagtgggaaaaggcttttgaggctgccggttggaagaatgtcttccgttttagttcggacgcaaaagatgcttctttgagttaccggacgatcttgtttcgttggggaagcgcttacaatggtatatactcttccgtgatcgacaatccggtgaccggggagatattatgcgcccgggtgaacgtgatggacgtggcggcagatgagttgctgggaatgtatttcctgcaatgtggtttgctggacgggaggatcaggaaagatttgcatagtctggcagtccggcaggatgtgttaacggcacaagtggcatcggcttttgccgaagtattgaagatgaagccaaacaaagccgggtatacggttttcacgccagcgaatattcgttcggaaaagtggctgaaccgttacgggataacggcctccataacttcgggcgtgacgtttaattacctggcccaaccgggagacggggtgagcgtgaagaatctttttccccgggtgtctgtttatgattacgatgctatcaagtatgcctatgggaatagcgacgctttaccttctatgcggggggctttttacgctccggaagataaaggagatccttatgctcaggatggtttcttgtcaaatgatatattaaatgcaagtatacagggtgttgaggcggtgaaggagatttacctgcgattgagcgagtggataaaccaattgcccgatgatcagaacacgtggaagaacgtgtcggatttcacggtgaaagcgcaggctttatttcaaacgtatcttactcaaatggtgaaattagtcgggggacgttccgtgcggccgattattaaaggggtgaatgaaacacgggtgacttacatgccccgggagcaacaggaagaggctctgaactacttggaatcggctatctttggagaattcccggagtgggtgcgggtgaaagaactggatcagtccggggttttcgatacggatcagatgatggttgggttggctgaagccttgttaaggcattttatgaataaggaggtgatggaatcgcttgttgccggggagagacgattaggggagaaggcttttacggctagggagttgtttgcttacctggatcgggttgtcttcgagaattttgatccgaataaggccgtgtctacttataaacggggagttcaggcttgtttcgtttcggagtttgcccgttttatggctcaaaataatatatctttcgggctatcgaacggggctaacggggtatatcatgcttatttcgtggaacttgcccgcaaggtgaaggatttaagcgagaaacatcaggacccgtcaacccggagtaattatcaagtgatgttattgagaatgaacagggagtattttgataaacaataaaggatatgaaaaggattttgtttttgctttggggattactggtattttaccaggttggagcgcagaaccggaaaatagcatttgagaagacaactttgcgagaagccttgaataaggcctcttccgagaggaaattgacattcgtggactgttacacggaatattgcggaccttgcaagacgatggatgcgttagtattcacgttggatagtgttgccgatttctttaattccacgttcgtgaacgtgaagttggatatgttgtccgaggatggcaagcaatacgcggatacgtataaaatcggggcatacccgtcgttcctgttgttggatcacgagggaaagatcgtgtacaagtttgtcgggggcaaaacggcggacgtgttcatggcggagatcaggaaagggatgaggccggataaccgggtagcccggatgaacgagacttatgcttcggggaagtattccaacgattttctgcgggaatacgttcagttgaagttgcagttgctcgaacgaaaggagtgtctccggcttggaaaagagtattttgaccggctcacgccccgggagcgggtgaaggctgagaactggtttttgttcgaggatcgggttctgggtggtgttaatagcgcaaacatgcgttatttgttggagcattggcaagagtttgtaaaagagtacggggaggaaaaggtgtttgaccggattacttcgctttacagggatatgacggaatgggtgttgcaaggttggtatttcaatgatttcgaacgtaagccggaagattttgtgtattataaacaaagaatagcggcaatcccggttcattttcagcgggattacctgatcatgatggacgtgaacaaggctatttgcgagggggataaggcaacggcccggaaacttctggaagatcatatcgctgattttgacaagaaaaatcaacaagtgatgttcggggggatgtctttattcccgttgcgtgagggaaagtatgatccgcaattattaaatattgcccgtaaagtggtgcaaagtgacgggttgacgaacttggtgaattattttaagtcgattttgagcccggaagaggtgtacacgggcgaaaagtatgacgtgcagaatttgaaggataaaattggttccacgatgatcgttcccttttttcacccgacaaaaccgttattctggtacgtgtgggatgacggttccgggaaacgggtttattatgcctatgatgcccggatggggaaacgggaattgtatgatcaggaagttattgatagcttggtgcgggatatgtttccgggacaagaggggagtgtttactattctccggaatttgaaggagatgaattgttagctaaattgcaggttcggggaaagacgttcgtgtatgatgcccgaaaacgagtgttattaccttccgaacccaagaaatacccggaagtgcgtccgtatggggtatctccggatttaaagtacgagttgatcacgagagaacatgatctgtggttggaggataaagatcagaagaaacaggtacaacttacttttgacggggaggacgattatgaatttgaaattccggatatcgagtggttgacggaagacgggactttttacatcacgagaaaagatgaacgggatataaggacttttcccctggtgtattctcttcgggaaccgcaacctgttgtttccgagtataaatacgaattaccgggagatacgcttgtagcgaggcaggagttgtttgtcggtaatgtcagaacgggtgattttaaaaaggtcgacgtggaacggtggcgggggcagttgctggaagtgctgaaagttgccgatgtgcatgatcgggtattttttattcgcaagaagggaacgcgggatgagtttgagttgtgttccgcggatgcgaagacgggggaagtgaaagtgatactacacgaggttagtaaaccgtatctgaatgaagagttattcagttgtcgggtggtgaacggggggaaagatattttcctgtggtcggatcgttccggttggggacattattatcattattccggtgaagggaagttgttgaacgcggttacttcgggagagtggacggctgggagaatcatgaagatcgacacggagaagaaacagatctacctgtatggatacggcaaagagaaagggcgtaatccgaattatactttcgcgtatcgtgtcggtttcaacgggaagaaaataaccctgttgacaccggaaaatgcgactcacggggtgtttattcatttgcccgggaatctgattgttgataatttttcccggatagacacggtaccgcgcatctccgtgcgggacggtaacggacgtttgttgacggtgctggaagaggcggatgtttccaagctgttggaatacgggtggaagttcccggaacagtttaccgtgaaggctgccgacgggaagacggatttgtacgggatcatgtggaaaccttatgattttgatccctcgaagaaatacccgatcgtgtcgcaggtgtaccccgggccacagacagaaaccgtgtggacggactttacggtgctggatcgttataataacacggctttggctcaacggggtattatcgtggtttgtttcggacaccggggtggttcgcctttccgggataaagcgtacgccacgtacgggtatggaaatttgagggattacgctctggcggatgacaagtacggcatcgagcagttgggacgagaatacgcgtttattgacacgaatcgggtaggtattttcggtcactccgggggtggtatgatggcttttgccgctatttgtacttacccggatttttataaggttgccgtggcttcttccgggaatcatgataaccgtatctataaccggacgtggggagagacttaccaggggataggcgatgatcataaatttaccgttaaaacgaatcaggagttggcgaaatatctgaaagggcatttactcttggttacgggtgaggtggataacaacgtgcatccggctaacacgttccgggtggcgaatgaattgatcctgcaagggaaggacttcgatttgctggtgttgccggggcaaggacatgggtatgatggcccttataaggcctattttgaaaagaagaagagggattatttcacgaaatacttgttgaataaataattgtaatacagtttgtaaattgtgaaggagagatttccggtgaaaacggatttttctcctttcgttttttatcgtgtcgggtaaatgcgtttgcctcgaaggggtggaaggtagacgatggtatctcgcacggtagtctcgccggtgtctcactagtaagttcattgaaagttaactgaaaattgactggaaattgattgaatattcaatcgaagtataatcgaagtctaattgatgcataatcgaagcattagtgaagtgctagtgaatcaacggttcatctccggtgcgtgtgtagcggaatactagggaggaatattcgtgttgtttatgatttttcctatatttgtgatctatttatgcacgatggataaagcggaaacaatattgaatatgtttaaggttgcggaaaaggaggcttttcagttactttatagctcgtattatgagacgttggtgctttttgccaatcagattatagatgattcgcaagcggcagaggatatcgtgcaggattgtctggtgaagttctggatttccaagcgatacagaacgttagagtccggtctggataaatatatatttcaggcggtaaagttttcttccttgaattacgtgagaggggacaatatgggatatagtcattattacgctgaggtgttacgggtgaaacaggtggcagaagaggtggctaaggggaagaatttggttgtcgtttttgacgaactgttcaagggtacgaatgtcaaagacgcttatgatgcgaccgtatcggtaaccgaggcgttctccatgaaccggaattgtacgtttatcatctccactcatatcattgaggcggggcatgctttgcgggagcgccttgataatttgcattttgtttttgtaccgaccttgatgaaaggaaacgtacctacttatccctatcgacttgaagaaggaattacggatgatcgtcatggtatgctgatcatcaataacgagcggatccttgaaatgttggaatagtattattatctttgtggcactagatttatagtgttatggcaagaaaagaaattacatatatcccttcggcagaggtttgctcgaaagagattcatattgtgttggaagacgaggtgattgaggaagtcggttttaagaaaggatgtgccgggaatacacaaggagtggcagccttgttgaaaggaatgaaaagggaagaagctatccgccgattgcggggaatctgttgtgggaaaaagtcaacttcttgtcccgatcagttggctcaagcgttggaaaatatggtgtaattagagcgtgattctaccgatataatcggcagaacgttgaaccaaatttagataaagacgacataaagctaagacatagctgagttatgtcgtctttatctttttttgatgcctttgatgtgtatcacttaaactttaaataggtatggataagggttgaaaatgttttattttacgagatgttaaatttatgattttattaagaaaatatttggtaaatataaaataatgttatatatttacaaaaagcaatgataggagcgggagtttgatttaagttagtaacttttaaaatgaaaagagatgaaaactaaatggaatcaaatggtaattgtagttctgctactggtcgttatcacgagtattgttgtttacatgtggattggttttgcggagttgatccatttctttgatcacgctgcaggtgaggctctcacgggaatgaaagtggtaggattgtaacgtgaaggttaaccgagaatggggtaaatggtggataaattttccgggcagagtcaataacccgataattattgttatttttgtaggtgtaaaatgtatatgtaaatggcacctaaaacgattcgggtattatctttattttcaggttgtggtggaatggatttaggattggaaggaggtttctctatccatagggggtgtattaatgaaaaaagtaatcctgattttattgaaaagcaaggacaaggtaatttggtaaaattacgttctactcgttttcaacttgtttttgccaatgatattttgaaagaggctcgggtggcttggactcgttatttcgcgaagtacggctataaaccggatgtttaccgggaagagagtatcgtggatcttgtgaaacgtcataaagcgggagagaagatttttccggagggtatagatgtggttacaggaggtttcccatgtcaagatttcagcgttgcggggaaacgtaatggattcaattctcataaagatcacaagggaaaaattattgaaggggatattgcctcggaggaaacccgtggtaagttatatatgtggatgaaagaggtgattgaaatcacgaaacccaaattatttattgccgaaaacgtgaaaggattggtaaatctttctaatgtgaaggaaattattcaacaagatttttcccgggcagatgaagacgggtatatcgtgctggagcctcgtgtactgcatgctgcggattatggtgttccccaatcccgggaacgagtgatttttatcggtattcgtaaatcagctttaatccccgcggcccgtgaggcattgacacgtgatgttattcctgatgagtacgtgccttacccgtctcccagtcatgcatatcatattaagaataagggatttatggaacctcaaacggtgggagggatgtttaccgggttgaaagaaccggaagagagcaacgatttctcgcaaaaggtttattctaaagccaagttcatgggtacgcattgtcaggggcaaaccgaagtggatgtaaacgggatcggaccgacaattcgtgccgagcatcatggtaatatagaatatcggcgactgtccaaagagcatggtggtgttattgaccgagaattggacaaggggttaaaagagcgtcgtttaacgccgcgggaatgtgcgttgatacaaacgtttcctcttgattatgaatttgtgattcctcgggaggacaataagcagagatatattttaagtccttcggcagcctataagattataggaaatgccgttccgcctttattggcttaccatatcggaaaacgaattgagaatttgtggaatctttattttggaactgatgaagtcattatttaaccttgatacgcgggatgatgccgcttttgaagcgttattacaaaaaacggtagatgtgatgaaccgggaggctttggcgtgtccgaaaatgtatgcaggtttattaggtagcaaattggaagataaggtggtggaagtgttgcgacaatgtgccgtggatacctgtttcgagcatcagattatgaaatactccgggcaacgttttccggatattgttgttggtggttattacggggttgaggtaaaaaccacgaaatacaatcactggaaatcgacgggtagcagtgttgccgagggaacccgtgtggaaggtgtggagcgggtgtatcttttatttgggaagatgtgtgaaccgattcgttttgtctgtaaactttacgaagagtgtttgtcggaagttgtagtgacccattctccccgttatcaggtggatatgaacttgtcaaaaggtgaaacgatatttgataaattgggaattccttacaatgaattgcgtcgtcaacctaatcctattcgtacgatacttggttattatcgttctcgtttgaaagagggggaagagttgtggtggttggataacgacaatttgcgggcttccaaccttgtgattcggatgtggagttctttgtcacagaaagagaaacgggcttaccggattaaagggtttgtttttttcccggaattattaagtaaacgttcggataaatttaaccggatggctgtttggctagctactcgcgagggtattgtttgtcctagcttgagagatgttttctcagctggagggaaggtgtgtatcgtgaaagacggggaaaaatatccgggggtttcaaaggtaatcggaagactttaccgggagttgtcgacaataaaagaattggttcaacacgttgattgcgatgaattacaagaatactggatgtgtccggtggataatgaatctaagtgggaaacatggtgtcggctggcaatcaagcatcttgaaacaatcaacacaacccgaatccccttggaaaaattaattcgttaatatgatctccctatagttttaatcggaaaatgtcggatacttgtttaaagccgtgatgttcaaagaaacggtgggccgaatggttattgactcccgattcgagataacaatcctgtattccatttgcccggaaactctctgttgctctttgcagtaactcctgcccgatgtgtttgcctcgataagccggatccacgctgaggtcaaaaatgaccccgtaaggagaggctccatcattcgtgataccgaataatacaaaaccgatgatagttctatcgtctaggtagagcaggagggtattatccgggttttccacttgtcggtcgagatatttcagccacatttctttgtaattcggggcgagttcattgccgtcaagagcgatgcccatttgcagttccccgtgggaaatataggctttgtgagactctatgatacgggaaaaaaattcgcaaagttgtgttctataattgatggaatatgttgttatcatacgtgtaaatttattgtgattttcttctactatgttttatgcgaagatagtgaataattacccgaatcataattttcatgctgaaatatatgccaatggaagtaataataaccagtacaacagccgtgaataccccaaattccttggaaatcatcgagaacacgggagcttcaccgtcaccttccaatagtaccccgaaaagggaggctatagagatgaaaagaagaatgtttttcgtgctgttggcttctttcaggtctgcaatattgttggcatttgttagggatttatccactctttccgtgatgtcctttaattgttgttcgtcagcatcaattcgtagtcttcggcttgtttcgtggtacatgtgtttgtgagacatatagcgtagataacgcaccgaatcgagttgcaggatcacatcggacaagctgatgcttaggcgggcattctgctcgatcatgtccaaaatcttgtcattgatgatcgtgaatccctgttgcccgtcctttgattccggatgactgttgtctttgattgcttgtcgggagttgaaaatatacttgtttagcacgtagttgatagtgtgttttttagctaacagaatttcgactaatacgagatattccggccaactgacgtgataacggtctcgtcgggccaagtgtttcttccaatcggtgggagcttcttttccgcgatttccatacgtgccgataacgagactcatgttttcatttgccagcacaagatcatcggtatcgatagcgatgtttttcccacaaatatcttcgaagcttgaatccatacggtaaggccattcttcggggtagagactcatgaggcccacgagttccgctttgtggcattgttcgatgtgttcgataacttggtcttccctcatccggtcaaaacggattcgtccatcgtgaccgatactttcccaaatatccagaaagatataattatgccatccgtattcgaattctttgaattccttacttttgcctaagtctttttgtttttgtttgtcaaagaaatagcgataacgtctttgtacttcatcgaaagtaacacctttgattttcacggttgtcgtgtggacgtgtgattcttcatcgatatgcaagttgctaattgaaactactttcaaggaaccgtcgatttcttggcctttcttcttgttgttatatacccaatgctccacgtgttgcacgatcccggctacggcaatcagttgatccgtgttgaacggaatgtccgtctggcaaaacttggttccattaattcttcccgtcgggcttacgatgatcctgtaggaaatttcaaccgtcttgttgaaaaacacggcagctcgtacgtgtacgtgtccccatagcctgacgggagtgtttccgtcaatgtcaatacagatgtcaaaccctttcaagcgataacggttgattactttatccgagtgggtgaacaactgatcgtcaaaatgcccgtcatcatcttttttgatgaagaaatttgtttcgggtgtcaagggaatttcaattcccgcggaggtaaaggtctgtatcagtatgatggaaaattcattgtagataagaccggattcacactggttgtaatttctcataatacgcacgttttgtgcaaatataataaattttgtaaggaacttatatacgagtttattgtaaaataatgatatatcttggatgtgtaatctgttgataattaagcgttttttgcaaagagagaattatagaggggcgttataatgttctattgggtttaaattgtgaaacaatattcgtaaaatacttgatttttataattattttcataaatttaaagtatatattactagctaaatttgtgaacgccatgggattcgaaggacatgtatttgat

SEQ ID NO: 10760 - DNA, 8895 bp, Unknown
  gut microbiota DNA sequence
gacgtacgaagcaaaatcggaaaatgcttcaggatcgtcgtgatcggatgaaagatctcatcaagaaaataaacgaaaagcctttaacaggtttgctgcaaatttgtatataagtttctatcttttaatttttcagatactagattttatttcttttatggaaataaagtatctgcttaattttgcattacctttgtccaaaaggtttggatcatggaggtttttatcaaaaaaataagggaggcttacccgttatcggatgaaaccgttcgtttgttgctcggtcacacggaacgagttgttcttcctaaaggagaactgttgatgcgggaaggaacagttgcaaaatatacctattttattatcaaaggatttgcacgtggattttttcacaaggaggatagggatattacgatttggttcgcttccgagggaatgtcccttttatccatgaacggatatatgttttcaactgccggatacgagaacgtggaattgctggaagaatgtgatctgttgaaaatatcaaatgaaacgttgaattgtttatttgattccaatatcgaattggcgaattggggacgacggatgtctgacgggattatattgaaattcgaaaaattatttatggaacgctattttatgtcagcctcggagcgttatcatttattggttgagcgggaaccggagattctaaagaaggttccgcttcgccatatagcatcatttttaggtatttcgcaggtatcgttaagtaggatcagggcgggaattcagtaattttagataccaatcgtacgaaatctaatgtactaggtgatgacttctgtttttttacatatgtaaattgaaaagttaggaattttacagacctttgtgcccgtttaatttagaaatagaaaatagaatgaggcagttgaaaggtgtactattagcaatgatttcatcatccacgtttggattgatccccttgtttgctcttccggccatgaaggagggcgtggggttggattccgtgttattttatcgttttgctatttccgcggtggtcgtgggagtttatttgctattacggcgtacggatcttcgggttactttaaaggagtttggaacaatgtttctgttaggaggagcgtatgcttctacctcgcttttcctaacagcatcttacctgtacattcccagcggagtggccacgacgattcatttcctttacccggtgttggttactgccatcatgattgttttctttaaagataaaatatcactctccgtgatcattgcaacggtgctggctattggaggagtctatttgttgagtagtggcgaggggcagggacggatcagtttaaaaggacttttcatggtactgtcgaccgtcgttacttacgcgatatatatcgttggggtaaataagtcctgtatacggcacatggaagggttgaagatgactttttacatgttgttctgttgcacgattattttcggagtgaatattttggtaaaagggcaggggttggatatgatgcctagcgcgaatgccgtggtgcatatctttttgttatctttaattccaactcttgtatccgatttaacgttaatattggcaatacagcacgtgggttcaaccacggctgccattctgggatgcatggaacccctgacggcagtgagtatgggggttttgtttttagaggaacgttttggaatagggcaaatactaggagttgttatcgtgctggttgccgtgtttatcgtgatcctgtccagtcagccgggacatttttccatgaaacgtttgatcccgtcatttataaagataagaagataaaattaaagattcgtgttatggtgaatttgattagaataacagagccgacagatattcgtttacagaaacttctttccctttatgaggaggctttcccggaggaggagagacgcaatgccaagcaattgaaacggttgataagcgagaaaccggaaatgtattttaatgctatcgagacgaacggtgttttgtccggtttgtttatctactgggatatgcgggatttttactacctcgaacatttagccgttttcaccccgatgcgcaatttgaaaatcggacaacaggtgttggactatatagcagaacatttagacggtatgcgattgttggaagtggaaccgaccacggatgagatgactactcgtagggtaaattattatcgtcgaaacgggtatgagattctcgataaaacttacatgcaaccttcttacgatgaagatattgaggtcggtaacctttggatcatgggtaaccggaagtctggtcgtttacaggagtttatcgagcggataaagcaggtggtttaccgggaaaatcgataacgattaaactttcccgattattgatcgtttcttagtgagagctataagagaaagaatggaaatacataagagaaagaacctattgctcgttgattgctcagagcttaaacagtgcttacacatctcgttatggatgagcgacgtttgagcttcgaatgagctctggacgtggggtattatttggaacttatttgttctttatttgggatacatttgtgtataaatcgtgggttaaaatgcaggaggatacttgattgttgtgttttctcgattttatatgttatttttgcatttggttattgtaaatgaaatctttatattgtaaattacaggtaacataattagattatggcaatacaaagcgaagctgctcttgaaactggacttgtccagacgctccagcaaatgagttacgagtatattcagattgacgaaggaacaaatctaaaagagaatttcaagcggcaactggaaatacataataagaaacaattagcagaacatgggcgagagcgatttaccgaggcggagtttgataaaattttactttatcttgaaggtggttctcgttttgaaaaggctaaaaaacttcgagatctttttgctttagaacttgaaaatggttgtcgtttgtgggtgtcatttctcaataagaaacaatggtgtcaaaatgagtttcaagtttctaaccaaatcacgatagagggacgcaagaaatgtcgatatgatgttactatcttggtgaatggtttaccattagtacaaatcgaattaaaacgccgaggtacagaattgaaacaggcatataatcaagtgcagcgttaccataagacttcatttcatggtctgttcgattacattcagatatttgttatttccaatggggtgaacacgcgttattttgcaaacaatcctaatcagggctataaattcacgttcacttggacggatgctgcaaatacaccgtttaacgatctttcgatgtttgcacaaatgttctttgataaatgtactcttggtaagatgataagtaaatatatcgtactgcatgagggtgataaatgtttgatggtactacgtccttaccaatattacgcggtagaagagatcctcaattgtgtacagaacaccaataaaaatggatatatctggcatacgacgggggcgggaaagacgctcacgtcgtttaaagcggctcagttagtgtctgaaatggatggtgtggataaagtgatgtttgtggttgatcgtcatgatcttgatactcaaacacaatcagaatatgacgcttttgagcctggggcagtggatagtaccgagaatacttctgaattaacacgcagacttgaaagcgactcgaagatcataattaccacgatacagaagctcaatgctgcagtaacacgtacttggtatagttcgcgtctagagaaagtgaagaacagtcgaatggtgatgattttcgatgaatgtcaccggagtcattttggagacagtcataaaaatattgtaaaattttttcataacctacaaatttttggttttaccggaactccaatatttgtcgagaactctgttgataagcgtacaacgaaagaaatttttggagagtgcttacataagtatcttattaaagatgccattgctgatgaaaatgtgctcggttttttagtggaatattatcacggtaatgctgatgtgaataacacggaagaatctcgtatgcgagaaattgccaagtttatacttaataactttaaaaaatccacttttgatggggagtttgatgcactttttgcagtacaaagtgtacccatgcttatccgttattataagatttttaaagaactgaagccggatataaacattggggctatttttacctatgcggctaacacttcacaagaagatgaacttacggggatgaaccgtggtttcgtgagtgagcgtgtaccagaggctgatgatatggaagatatcatcaaagattataatgaaatgtatggaactgctttttcaacagaaaatttccgcgcatattatgatgatatcaataggcgtatgaaaaagaaagatccttcaatgaagtctcttgatctctgtcttgtggtgggaatgttccttactggatttgattccaagaaattgaatacactttatgtggataaaaacatggaatatcacgggttattgcaggcattcagtcgtaccaatcgtgtacttaatgaaaagaaacgtttcggtaagattatctgtttccgtgatttgaaaaataacgttgatgctgcgattaaattgtttagtaataacaataatatagaggaaattatacgtccggtttttgaagcggtaaaaaaagaatatgtcgagttgacagatgagtttttgaagcattatcctgaagctcatgtggtagattatttacaaagtgaaaatgacaaacgtaattttatcctcgcttttcgcgatattatcaagaaacatgcggagatacagatttacgaggattatgcggaggacgatgaggaatttcccatgacagaacaacagtacatggattttcgtagcaagtatcttgatattcatgatacgttttttgataatcagaatttacaagctaaggatgcgatccagaataaagaggacagagatgaagaaagtaatagtatcgaggatatagatttttgccttgagttacttcacagcgatattattaatgtggcttatattttaggtttgatagcagaacttgatccatatgctgaagattatgctgaaaaacgtcaggaaattattgatacgatgataaaagatgcagaacttcgtagcaaggcgcaactcatagatggctttattttacaaaatgtagataacgacaaagataatttcctctcggagcgaaaacgggccgatggctcgtccgacctggaagaacggctaaaccaatatattcgtggtgaaaagaaaaaggcgatagaaaaggtggcaactgaagaagaattacccgtggaagtgcttgatcgatacttggctgaatatgatttttctctcaaagaacaaactgaaataattcaggatgctttaaaagagaaacaccttggattggtgaagcgtcgtcgtactctcaatcgtatcatcgataggttgcgtaatataattagaacctttagttgggattaaatactaggatgtgtttgtgggatgtactgaaaataagaaaaaagaaataagattatgagtgaagaattacaacagaaattacgtacccaactttggactgtcgccaataacttgcgaggcaatatgtcggccaatgaatttatgtatttctcgttaggtttcattttttataaatatttatctgaaaagatagaaaaatatgccaatcaatcgcttgaagatgacgaaattactttcaaagagttatggaacagtaaagaggatgaggctgaagaattgcaaaaagaggtaaagaaacaatgtcttgaaaatatcggctactttatagaacctcaatatctttttacttctattattgatgcgattaatcgaaaagacaatattttaccgcagttggagcgttcgttaaaacgtatagaggatagtacgcttggacaggatagcgaggaagatttcggtggcttgttttccgatattgatcttaattcacctaaacttggtaaaacagcagatgacaagaatacacttatttctaacgtgttgcttgctttggatggcatcgaattcggggctgatgaagccacgcagattgatattttaggtgatgcttatgaatacatgatcagtcaatttgcagccggagccggtaaaaaggccggtgaattttacacaccacaggaagttagtcagatattggcggaaattgttagcattggtcacacacgtcttcgtaacgtgtatgatccgacctgtggatcgggttcgttactcattcgtgctgctcacgttggtaaggctgtagaaatttttggtcaagaaaagaatcctactacatacaatttagctcgaatgaatatgctgttacatggcattaaattttcgaatttccagattgagaatggagatactctcgaagctgatgcttttggggagagacagtttgatgcggttgtggcaaaccctcctttttctgcagaatggagtgcggctgataagtttaacagtgacgatcgttttagtcaggctggacgattggctccccgtaagactgcagactatgcttttatcttacacatgatttatcacctttctgatggcggaacaatggcttgtgttgctcctcatggtgtacttttccgaggaaatgccgaaggtgaaatacgtcgattcctgatagagaggaaaaactatatagatgcgattattggtttgcctgccaatattttctatggaacatctatacctacttgtattttggttttcaaaaaatgtcgtaaagaggatgataatattctattcattgatgccagcaaggagtttgaaaaagtgaaaactcaaaacaaacttcgtcaacagcatatccgaaaaattgttgaaacttatcgtgatagaaaagaaatagaaaagtatagtcatttagcccctttaaaagaggtgcggggaaatgactataatttgaatattcctcgttatgttgatacttttgaagaggaggagcctattgacatcaaagctgtcatggcagagataaaggaattggaagccaaacgtagtgaattggacaaggaaattgaagtgtatctcaaagaattgggactagtagagtaaaaaatagggcatggcaaagaagtttgaaatacggaatagtacagcagagtttctaatttttcaacttgatagtaaggaagatggtgtacaggtgttatataaagatgaaacgatatgggctacccaaaaagcgatagctactctttttgatgttggagttcctgcggtcagtaagcatttgaataacatatataatgagggagaactgtttcgtgggacaactatttccaaaatggaaatagttcaagccgaaggggctcgtgaaattagaagactgacggacttttacaaccttgatgccattatttctgttggttaccgtgttaattcgcttcgagccacacaatttcgccaatggtgtacatacgtgttgcgccagttcgctataagagggtatgtgattgataaaaaacgtatggaaaatggcgttttcctcggtgtagactatttcgaacatttacttgcggaaatacgggagattcgattgagtgaacgccgattctatcagaaattgacggacatttattcaacggctatcgattataatatgaatgctccgactacaaaacagtttttccaaaaagtgcagaacaagatgcactatgccgtacatggatatacggctgcagagattattgtgagacgggcggatgctgaaaaagagcacatggggctgacgacttggatgaatgctccaaacggaaagattgtgaagccggatgtcagtattgcaaagaattatttgaatgaaacggaactgaaagatatgggacggcttgttaatgccgtgcttgatatggcagaacgtatggcagaacgtcatattcctatgacaatggaagattgggcgaagcggattgatattatccttgaggcagggggcgattctgtactgactgatgccggaaagataacagctgagtttgcaaagtcttttgctgaatctgagtttgaaaaatatcgtatggtgcaggacaaattgtttcgttccgattttgacaaatttgatggtgataatttattgtcgcttgattttaatacagataaggaataattatgactaaaaataacgaacataaaaaccttaatgttccggctttgagattcccggagtttagtggggagtggaaaaagtgtaaggtttcagacttgttggatttctattccactaattcacttagttgggagcagcttgaatatgacaccaatgccatgatgaatttacattatggacttatccatgtgggacttccgactatggtagatttggcaaaagacaaattgcctaatataaaagaggacaacatgcccacgaactttgaattgtgcaaagagggtgatgtggcttttgcagatgcctcagaagatacaaatgaagtagccaagactattgagttttataatcttgcagagaaaaatgtcgtctgtggattgcatacaattcatgggcgagacaataagcacaaaactgttgttggattcaaaggatatactttctcatctaccgtatttcataatcaaataagacgaatagcacaaggaacaaagatttactcaattagcaccaagaatttttcagagtgctatattggattgccatcaaaaccagaacagactaaaattgcaactttactacgccttattgatgaacgcgtcgccacccaaaacaaaatcattgagaaactggaatccttaatcaagggaatttacagttctatactatggaaagat

SEQ ID NO: 10761 - DNA, 25255 bp, Unknown
  gut microbiota DNA sequence
aaatccggcccctcacttcccgcagcatacgttcgcaaatgctctcccggatgttcccgccaatagttcacgatcggatcgataaacttccaactagcctccaaggcatcatcacgcgtgtaaagcatcgaatctccctgcatggcatccagcaacaaacgctcgtaggctcccggcaaataattattacaaagcgaggtatacaggaaatccatccccacttgtttcaccgtaaagccgccacccggcattttcaacccgaacttcaacatcaccccttcatccggtgtcatacgaataatcaactggttacaagacgacccctcgcattgtccctgaaataacttgtgcggcgtggacttgaaatgaattaccaccccggaacgtttgtctttcaatcgcttacctgtatatatataaaacggcacatgactccagcgccaattatcaataaacactttcaacgccacgtaagtctccatgtcggaattcggggcaacatccttttcttgtaaatacccaaccacgggttgccccttcgattctcctgccacgtattgagctcgaacaacattacggggaatatcctcccctttccactgccgaagcgaacgtaacaccttcaccgtctcgtcccgaatcacttctggctccatcgtcgccggggattccatagccacgaaagccaacaactgcatcaaatggttctgcaccatatcccgtaaagcccccgctgtctcgtaatacttcccccgattctcgatcccgagcgattccaaggcatatatttccacgtaatccacgtagttccgattccacagggattcgaatatttcgttcgcaaaacgtaagaccaatatattctgtacagtctccttccccaagaagtgatcgatacgataaatctcctgttcacagaacacttgcaacaaggatttatccaactccttcgccgtctccaaacttgttccgaaaggcttttccaccacgatccggtgccatccaccccgttcctttacgccaaacagacaacttcttccaatgtatttcgtgattgcctgctgggaattcggcggagttgccagataatacaccacctgcatcggaatagcgttttcctccatcaaaaacatcacccgttctcccaactcgtcagcacctcccacgggatcaaaaggttggtagaacactttctgcaagaaacgatccacctcttccccgtccagtcctttttcccctttcaactcctccaacatcaaacggatcgacaaacggaactcctcatcactcatggatttccttgaagttcccaaaataacaaaacgctccggcaacatctgccgtacatgtaactcgtataaagagggcatcaacattcgtttggttaaatcacccgatgccccgaatatgactaatacctgatcctccggtctattcataattacacattataagttcctgaaaccgtctttccaccttttcccgtccagtcggtatggaaaaacttacccctctcagcatccgtacgttcgtaagtatgcgccccgaaataatcccgttgcgcctgtatcaaattcgctgcggaattaaaattacgtaacccgtcaaaataactcagtgccgagaagaaacaaggagccgcaataccgttaaacacgcaatccacgaccacaccccgcaaagccggcaaagcattctccattctctcgtggaaaaaagcatcgaataacaagttctgcaatcccggactcttcgtgaatgcttgagtaatcctctccaagaatacagagcgaatgatacatccctttctccatattttagcgattgtcccgtaatccaaattccagccatttcgctcggaggccctgcgcatcaaggaaaacccctgcgcgtaagagatcagtttcgccgcatacaaggcatctctcaccgcctcgattccagatgtgttcaaggtaatgcaagcctccatatctcccactttacccgaggggtactgtacggacgctctctctctttcgttcaccaaggacgacatgaaacgggcaaacaccgcctccgacaccagcgtcaacgggtccccctcatccaaggccgccatcacactccattttcccgttcccttctgcccggccacatccaaaatatgatccaacaaatagtctccattctcttccttgtaatgcaaaatatgtgaagtaatctcgatcaaaaagctattcagttctccccggttccacaactcaaaaatatctcccaagccgtcattatccaacccggttcttttcttcaacatagaatacgcctctgcaatcagttccatatccccgtactcgatcccattatgtaccatcttcacgtaatgcccagccccaccgggaccgatccattcgcaacaaggagaaccgtcttccagttttgccgcaatcgactgtagtatatctttcactaacggccaagccgtctccgaaccacccggcataatggaaggcccgttcaacgccccctcctctcccccggaaatcccggctccaataaaatagaggcccttctcttccagcattttcacccgacgttccgtatcatggtaatccgaatttcccccgtcaataataacgtcccccggagaaagccacgggagtaactgcccgatcaactcgtcaaccgggtctccggccttcaccattaacatgatcttccgcggcaagcgtatggactccacgaactcttcaattgtataggtcccgtgaaaacactttcccttccctcgcccttccacgaaacgggttaccacgctttcccggtccgggtgaacccggttgtaaacagagaccgtgtaccctttactttccaagttcaaagccaaattctcacccattaccgccaatccgatcaatcctatatctgatatttccatcataacaataatttattcgtaactctattgtacgacgattccttttaatttgttcttaaatattataacaaaatttacactcgcagaacatcctacaaaaagagagccaaaattgatcgacaaacgaacaatctcacccgcccactctcacgtactgactcgaagagtaggtcattcctccttcccccgagaaaaaacaatacaaatgtgctatctgtccccctgcccgttccagctgaaatgtcatactcccatcctttctccgggcatctactccttccacgacaaaaggagaaaaacaacggtcactcaacaacacgatcacccgtaagcgatcctcatccccggctgaaggcgaattgatccccacctcccacgtcaaagtaacccgcccctcatcatctgccgttacttccaagtgattcacttgttgcaaaactcctgctgtcaaacacaagcgagaaaaatcccccacatttccacacggggtaaataccatcatgtttttcttcataaaaagattaaaaccattctgacttgtccctgtcgccgctaatttccatattctcctagaaatcgtcttcgttaaccgttgataaaaaagagttgccactcttaaccgggatcttccgggatgttgtccttccgaatcggcatcttgaaaatcattcgctgtacttctcacccggatttcattaccaaccttgtagaaaaccatattaccaactttacctctaatctcttgttcagtctttgccatactattttattaattatcatgacaaaagtacctttcccatctcttctcaacgaattcatttcataaacgacgtcatattctcacaaacaacataaattactacacaaacgacatttaccctcacaccagtttcagaacacatcccctacattcccgctgtactaccgacagaaaaagtactttcctttcccccaccatcctcccacccccgctccaacttcgcccgctgagcgaaattgcaccgaagatgttccgaaaatgcaccgagattaacacggaatttcttcctttgctccaaggtattacaccggaaattattccatagataatttccccgctcgttattttccaccattttaaatttccccttgaaaaaaaatctaaacaaattattttatcttcgcaccgctatttgaaaatgtaaatccattttcaattttcaactttcaattttcaattaaatatgatttcagtagacggattaacagtagaatttggagacagagcactttttaaagatatttcttttgttatcaacgacaaagaccggattgccctcatgggaaagaacggggcaggtaaatccacgttattaaaaattctagcgggagaacgccaagcctcccggggaaatatttcctacccgaaagaaactgttatcgcttatctaccgcagcatttaatgacccataacgaaagaaccgttttcgatgagacggcacaggcttttgcccaccttttcgagatggagaaagaaattgaacggctgaatcaacaacttaccgaaagaacggactacgattctccagagtactacaaactcattgaagacgtatccgccctcagcgagaaattttacagcatagactccacgcattacgaggcggatgttgaaaaagtattgttgggactcggattccaacgggaagatttcaatcgtccgacagccgatttcagtggaggttggcgtatgcgcattgagttggcaaagatgttgcttaaaaacccggacgtgttactacttgacgagcctaccaaccaccttgacatcgattcgattcaatggctggaggacttcctcgtgaataacgggaaagctgttgtcgtaatatcccacgaccggacatttgttgacaacatcaccacccgaactatcgaggtcaccatgggccgcatttacgattacaaggtaaattactcccaataccttgtactacgccaagaacgacgcatacaacaacaaaaggcctacgacgaacagcaaaaaatgatcgccgagacgaaagaatttatcgagcgtttcaagggaacctattccaaaaccttacaggtacaatcccgcgtgaagatgttggaaaaactggaaatactagaagttgacgaggaagacacttccgctctgagattgaaattcccacccgctccaaactccggtaaatacccggtgatcgcagaagagcttacgaaagactatgacggccacatcgtgttccaagatgcccacttcacgatcgaaaaaggagagaaagtcgcttttgtcggtcgtaacggggaaggcaagtccacgctggtaaaatgtatcatgggtgaaattccctataccggaaaactgacattaggctataacgtgaaaattggatatttcgcccaaaaccaagcctctctcatggacgaaagtcttaccgttttccagaccatcgacgacgtaacccccatggaattgaaacacaaaatcaaggatatgctgggagctttcatgttcagcggtgacgacatcgacaaaaaggtgaaagttctgtccggtggagagcgtacccgattggccatgatcaagttgttgctctctcccgtgaacctgttgattctcgacgagcctacgaaccaccttgacctccgtaccaaggacattttgaaaaatgccttgaaagagttcgacggtaccttgatcgtcgtgtcccacgaccgtgattttctcaccggactcgtccacaaggtttacgaattcggtaacaagaaagtaaaggaacacttagaagacatccaaggtttcttgcagaaaaagaaaatggaaaatctccgggagatcgagcgtaaaatctgataatcaattttttttattataataaaaaaatattatccatctgttttgtttgaaccaatattattcgtaattttacgaacaataaataaaaccaaacatggaaacaaaagaatacaccacagatcaagaacagctcgcccgtttcgcaaaagcaatggggcacccggcacgaattgccatacttaactttttggccaaacagaattgctgtttcttcggtgacattcatgaggtcttacccatatcgaaggccaccgtttcccaacatttgaaagagttaaaggattcaggactaattcaaggctccatcgagcctcccaaggttcgttactgcattaatcgagagaattgggccatcgccaagaatttattcgtacgcttatttgatcatgacaacacgaaaaaaaatagttgttgttagtaacaactattttattagttatattgttcgtaatttgacgaaatacaaacataataaattaatatcaataacaatcaattaaattaaaacgttatgaaagtgattctattgttaacaatgtgtctcggcctttttgcatgcggcaacaaaaacacaaaaggcagcaaagcccaagaacaacaaccacaaaaagatcgtgtcgaagtactctattttcatggcaagcaacgttgtataacctgtgcggcaatcgaaaaaaataccaaagaaacgatggaaaccctatttgccaacgaactgaaagacggcagcctggtattcaaatccatcgacatctctcaaactgaaaacgaagagatcaccaacaaatacgaggtcacgtggtcttcactcttcatcacaaaatggaaaaatggcaaggactccacggaaaacctaaccgaatacgctttcgcgaaggccctttccgccccagatacattcaaggcaaacgtgacacaaaagattcggcaactactaaaataaacatccatggaatggttacaatctttattggatagtagtactactccagctttgaccgccttcctgctaggactactgacggctatttccccttgtcctctggcaaccaatattgccgccatcggttttattggaaaagacatcgagaaccgccacagggtatttcgaaacggtttgctctacacgttaggccgcatcatggcctacacgctcctaggcattatcctcatctcaattttggaaaaaggttcaagcctatttggtatccagaaatttatcggcaaatacggagaaatgctactcggacccgcactattattcatcgggttattcatgctgttcggccacaaattcaacctgccgtcattcggtttcaaaggtaatggagagggattagctcgtcggggcggatggggagctttgttactcggaatattattcgccatggcattctgcccaacgagcggcattttctactttggtatgttgatccctatgtccgcaacatcggttggcggttacttacttcccgtcctctttgccatagcaacggcgttacccgtactggccacagcctggattctggctttcagtgtacagcatatcggcaatttttacggtaagattaaaaacatacaaaaatggttgaattggattgtaggcgggttattcaccgccatcgggttatactattgtctggttataaatctctaagttttttcacacgaacaatgttcgtaatataacgaattaaataaattaaatcatggaaataaaagttttgggatccggttgcgccaaatgcaagacaacctatgaaatgatcgaaaagatcgtgaaagagaatcagctcgatgcaacactttcaaaagtggaagacatcgttgagctactgaattatggcatcatgacaacccccgctatcgtcgtcgatggagaagtcaaactcaaaggtcatgttcccacggagagtgaaatcaaaaagattctcggtatttaataaccttctagtcatgaataacaaaaaagaattaaccatcctgttttggatgactgctattttcgcagtgatcttcttcatgccactcggcaacgagcggttcatgaccgccattgatgccacactcgaccttgcccaatggtatgcgcaagaacacgtggtgctatgcctgctccccgcattcttcatcgcaggagtcattgctgtattcgtcagccagggagcggtactcaaatacttcggggcaaacgccaagaaatggttatcctacacgatagccgccatctccggtggaatcttagccgtttgttcctgcacgatactaccgttatttacaagcatatacaagcgcggagcagggctaggccctgccattgctttcctctattccggcccggcgatcagtattttatcaattatcctaacggctcgcatcttgggcgtggaaatgggaattgcccgcatagttggagccatcacattttccattgtcatcggtcttctcatgtcattcattttccgtaaggaagaaaaagccaaaaaagaggaacagatgaacatcaccccaccaccagagaaacgcccgatgtggcaaacttcatttcactttttcacgatggtactcatccttgtcttcgccaattgggggacccctgccgtatccgacaaaggattatggctttatatatttacctataaatggtatataacgggaatcctcgccctgttcttctgctggtcactcatctgggttctgaagttaccggtcacatgggtattgcttggtgcgattgcgacgacactttccgcctttcttgccaacacgtttatcactgatgccaagctggtccctttgctcccgatgattataggaatcacgtcattatccgtgatactactttttgacaaacgggatgatgaaaaccgggaatgggccttttcctcctggggatttgcaaaacaaatcctaccgctattggcaattggagttgttttcgctggatttttattaggttcaacacatgatgacctaactatcgccgggatcattcccaatcattggatcgagtgggctgtaggcgggaattcactgctttcgaacttcttcgccagtttcacgggtgcattcatgtattttgccaccctgaccgaggtgccgattatccaaggattacttgcctccggcatgggtaaaggtcctgcactggcattattactggccgggccatccttatccctaccgaatatgttggttattagtggtgtcatgggagcccaaaagacaattgtgtatgttgccctcgttattatcatggcaaccatatcaggttatatctttggctcgttctgttaaaacttgtaacctgcaactctccgtgggcgaaaagaaacggggtctaaaaacagaccccgctcctgcaaaaaaaatataaaacacaacatttatttcccatgcatgtagcgcacgaagacctccatggcttcgtactccgccattcccaacttgttgtacaagtcggccgtattacggttacggtcttcagcccgctgccagaactcgcgaggatcatctcccgggtaagccggtccgttattttgtgaaccatgtctgtaaatcgcttgccgcttgatcgataactcggacggacttaccggcacggccatatctactttctcaacctcccattccaaccaagccccgcggtacaaccacacgtaacaatccttgaaccagtcatcctcacacacgacgtcaaaagcctgcatgatcgcatccagacaaacactatgcgttccgtgcggatcggccaaatctccggcagcataaatctggtgaggtttcacctcacgcaatagattcacgataataccaatatcttcttttcccaacagattctttttcacggaacccgtttcatagaaaggcaaattcaaaaaatgaactctctccgagcggatacccataaaccgacaagcggccaaagcctcggctgcccgcaaggctgttttgtatttcagcacctctttaggttcacttccctccggtttcagattccgaatcgtttcctttacctgcttgtacccctcgccggacactcccatattttgggcgaacaaatcggctatatccatcatctcgtacagataatcatcaaacacggcgatattcccggacgtttggtaaaccgcatgaacctcatgtccctgttccaccaaacgggcctccgtacctcccatcgagatcacgtcatcatccggatgcgggctgaaaatcaacactcgtttcgggtaaggattcgctctctccggacgggttgaatcatccgcgttaggttttcctcccggccacccggaaatggtatgctgcatatcattaaacacggcaatattcaccttattcgcagaaccgaacttctcgatcagatcgctcaaaccgttatcttgataatctttatcttcaattttcaaaatgggctttttcaacttttggcacaaccggatcaccgccttacgaatcagcttatcatcccaatccaccttactcaccaaccacgggtaatccgcccgggtcaattcgctagccgcactctcatcaataacaaactgcacgttagaatgcatttgcaagaatgttgccggtaccgaatcagacacccgtccttccactgttgccttaataatcggagcctttttctctccccacgccatcagaatcactctccgggcctgcataatcgtcccgactcccatcgtaatcgctttcgtgggtaccagattccgacttccgaaatcctttatcgcatcctttatcgtcaagtcattcaagaacactttccgggtctgtgacgtgataaaagaccccggctcgttaaaaccgatatgtcccgtacgtccgatacccaatatctggaggtctatccccccagcagcctcgattgccttctcgtaatcccgacagaatttatctatttcatccccttccagcgttccgtccggaatatgaatattcttcgggtcaatatctatatgatcaaacaaatggtggtgcatgaaataatggtagctctgctccgactctttcggcatcggcagatactcgtccaaattgaacgtaaccacgttacggaaagaaacgccttcttcccggtgcatcctcaccagctcttgatacaacttgatcggggaaaccccggtcgccaaacctaaaacgcacttttcactgctagccgctttcgtttgtaccaaatccacaatctcacgggcaacggccttcacagcctcgtccgctgtttcataaatctgaacaggaatcttttcgaacctgttggctccctcgcccttagcgatgtagtttttagtaatcatcatattttatctctaattttcctctattaataaagcgagtactcgcattccgtgtcatcatacaagtgttccataaccatcatcaacgtacctaatatcgcagaataaacgcccaaattactcatcttcaactcacaatgtcctcgcattcgagccaatgcgtacttgtttatcgcctgttgaaccggaaccagcatcaagtctcccgcttgtacgatttcccctccgatcaccaccatatccgggttaaacaaatgtatcatcgtggcgatcccctctcccaacttttctcccgcacgatgcaaaagatcgatagccgaaatatcatccttccgggcggcctcgataatctcctgtaacggtttgcccgccacattctcgatggcccgtcccgaagacacggtttccaaacaaccgatcttcccgcaatgacacggtgcctccagtcctgagatacgaatatgcccgaactctcctgccatgccaatacccccacgatacaatttcgagttcaggatcatccccaaaccgatacattcgttcacgctaacacacaaaacattattcacatccttggctaccccgaacgtgtgttcagccatggccatcacgttagaatcgttatcaataaataccgggatttgcagcattttctccaaaatacccttgatccccggttgttcatacgtcaaataagtatacgaagttccctcccggtcaatcaaacccggaagagcgaaacctgccatcttgatcttcgcccgatcaacgttcaatcgcccgatcgtctcatcaatcttctctcgtacgtaacggagagtcgcctcatcatcctgctcttccaaaatcgaggaatattccagaataccctcaatcggttcatttttcaaattgaagatagccacccgcaggtactcccgaccaatatccacacctagtatatacgcggcgtccggatttaatgaaaacacgtgaggacgtttacctccaattgaatttccgcatccccggtcaatcacccatccctcgtctatcaactcttcgatcatgcgactaaccgtcggcgtggtcacattcgtcaggcgacaaatttcaggcttggacaactctcccatccggtaaaggaaaccgataattgctttcttctgcaagtaccgtttctctttcaatcccggtagtgaacctttatttatggtattcgagtcgttcatagctctccgtttttcaaaaagaatcgtgtttatttcatcacaaatatacgaatactttctaaaatattttcgtaagtcatgctaaaaataaaaaatattttcattacaaactctattttataaaattccattccctaaacgagtacttgaaaataaaaaaagtgtatttttacaaatcaaccattaaaaggggattctgcgactatggtaacaaaattggaaatacaaaaacacttgaaatacctgaaaaacggggcaagtaaaaagttcatcgaactattcaacaacttcgacgaagaagatttgtgtgaccgtaaaaatttcaccggacacatcacggcaagcggaaccattatccacgttcccactcgtgaagtcctgttactgcatcacaagacccttgataaatggcatattcctggtggccatgtggacctcgatgatgattctcttttcgatgctgcattacgggaagtggaagaagaaaccggactgacagtcgaacaactgattcccatcaatctcattaaaaacaaaccctattgcgtcgagatcaattcccacccgatcccacgtaacgagaagaaaaacgaagatcagcactatcatcacgattttcgtttcgtgttcgcatataccgggaataaacgcatacacatagacttgaacgaaagtctgaattacaaatggctttctatcgacgatccttacctgcaaaagatcatgacagatcccgaaacactcgatcccattttactggaaggtctggaaagtttcgaacaatccgttaaactggttcgtcataacgattacctcgtaacacccctagccagctacttgtttcaattaggtcaacaccattacgaccggggcaactgggaatccgcagaacagatgttccgtcgctctgtttcagcttacgagaacacgtacgatgacgagtacgagacgccaccatccattctggccgcttgctggaacctagctaccgtctacgaaaaaacaaatcgtcattcacagaaattacaagcacttgaaaaaggcctaaactttgccaaggaattctcccgtctcgatgagaacttccttcccgaaatctccgagttcacggaacggattgatgcctcccgtcattccacgggacaactataacatccctccccttcgaactcgacttccacggtcaagtgatctatgcccacctccttcaaccgatccacggcatcatgtttcacccggatagcatccgctcgtgaaatatcatctgccacaatcaagtgagccgaagcgatattcctttccccgtccagcgtccacacgtgcaggtcatgcacgtccttcacgttcggcacctcttgtaaaatggcctttatcttatcctccggcatatgttccggcgcagcttgtaaaaggattctgaaaatcgtgtacaaattccggcacacgtttgtcagaataaacactccgataccaaccgaaagcaacgggtcaataaaataccatcccgtataacgaataatcacgctaccgatcaacacggccacccatcccagcacgtcctccagcaaatgtaacatcactgcccgctggctgatcgaatttcctctcatcaatcgcaaggctgctcccccgttcacgacaagccccaccaccgccagccacatcatcccggaataattcacctccgcggggtgaaataaacgaggaatcgtctccataaacacaaagatggcccccaccagcaacacgattgaattgattaacgcccctagcgtcgaaaatcgcttatacccgtaagtaaacgtcacggtcctcttcctgttcgaataacgttccagaaaataagaaaccccaatagaaaaagcatccccgaaatcatgtaccgcatcggaaataatagccaccgaatttgtccacaacccgccaataatctctattatagcgaatcccaaattcaagaaaaaagcaatccccaaattcctcgtgctttctccatgctcatgttgatgtcccgtatgtgaatgatcatgtcccataaaattatcgtctaatccgtaaaagaactttttcttcaaaaatacgaaaaaataggacaaataaaaattaaataccccctgcattgtttggggtacaaaataatgcagggggctaacaaaaaaatcctactatttctttatcttctcctcgataccatccagcatacgccctgcaaaagaaaccaccgccggaggtaacaccttcaaatacgttcgaacaaattcactcatctgtcgcaagacctcctgatcttccgattgcaccaaacgagtcatattcataattaataaattacgagcagtaccactcaacgcctcaaaattctcccaacataatctcataaacgtggcatcattctctctcacccgtccctcgatcaagcgaaacatcggttcatacttatttttctcgactaatcccaattcttgaattttacgtttcaaagcctggtaatcttcctctttgtatgccccctctcgaaacatataaccggaaaaataacgtcctagttccaaattatacaaatgttcaattttatcataaatcgttttacgcaccgaagcatcaaacccgtcccgatgatccaccatgaagctagctttctcatccgtcaaatccaacgtgtaacgagtgaacagaaaagaattttgagactccaaacgttggacttccgtcaacaaagcataataatcattcaccaccttaaaaccttccgcctccttccgctgctccatcaaatacaaggcgtaacgattcaccagatcaggcgtacgctcaccaccggcataacgtgccgccaactcatcgggtgcataattaggattcaacgcctcatccaacttagccaaaaacttgtccgcatccatcgcacctttcaactcggcccgcacctttccatccgtgtcaaccacaacaaacgtgggataggcagtaaccctgaaacgcttagcaagcacccgtccctccttctccgcattcaacttcaaacaaacaaattttgcattaaaataatcccctacttgtttctgcgggaatacatcttttgccatcatcttgcaaggcccgcaccaatccgcatagaaatcaacaaacaccatcttaccctcctgttttgcagtctcaacagccttttcccatgaaagttcccgaaatttagtctgggcaaaacttgtgattcccacaactaaagtcattatcaagaaaatcatctttttcatctcatcaaattattaatcccccgaagttccctccgggggtatctatggattattcttcttccccttcctcctccggttcttcttccgcaggatcctccccgtatttccattcaacatccacgaccttcatggtaaccggccaacaatcctcctcagcataattcaattcgggtttctgagctccaccaagttgtagaagcttcaattctcctttttgcccactataagtagtcacccaaaaagaactattactcaaaacagcatctgctttaagacaggaaatatcactttccatctccatagaacttaacgtattgtatgaataattgtaagcatacaacgtcgaccccaccgaatataaaacgacataagcgttagacataaaagcataatgcgtagctttatcaaaatcaacagctaccgctttgtctatcgtatatccattcaccttggttggattattgaccgtattaaacatagtctttgctcccggtctgaatctataaatgtagtaattaatatcctctccttccaaatctttcatcaacgctacgcaatcacacatataatctgttggagaatttcgtaaattttcaccatacacaattgttctcttcacacttgcctgattccaaggaaatttatctcccggataatctatcaatttcacacaagaagttgcattactaccatataaactcccaggccgtacaaaacactcttcatccatatcatagaaaaggggcagcaaattaccgataaccctcgttcctaattgaacaaatgccatcggatacggtttgaaaaattccttactgtatgcattataacgattcattggatttacataaacttcagaaccatcacttatcgaaatagtcgtcatataaatcgcactatcagttatgattccccgactttgataattacgcatagtcattgcaacaccatacccaaaattagattgcctcggaaacatatcgcgaatccttgggatctccctggaaacctccatctcctcaatcaccatcatctcatgaaattctccgacaggtataaaattattcccccatgtcaccttcatatctttttcatctgtcattaaccaaaggtgtgccgagttttctttaccactcctatttcccgtataaatcaaattacgagcacctttcagatgcaattcagaattatcgaatatattttcaaccaacacgatagaattatccggtttttgcactaacatatccatccgtgcttccccattgtccatctctcctaacaacacccatccctgagttaattcactgaaaatagttacccccgtatttttgatccactccaacccggtactcttatcaatcacttggaaataaagcgtgtaatttcccggtttaaaagataccactggccacgtcaaattcttggttgtccccacctccgtgtgtttgtgttccttcccggaacagaaaaaccacttatattcataattatcctcgttatcaccgtagatatcaccctccacggtcgggtgaatctttaatgtatccactcctttttctaacgtttgattcatctcttcgtcagcaaaagtaatcgtcaccccattctgataatcgtagtcataatttcccttgtcctccacgtcacaagcctgccacatgaacaaggacaacagtaaaaataatccgtatctcattttattccctcccatatttattcatttgcttgaggtttgtaatattttttcactaactcttcaggcagagtctcttcgttccaccaagagattccgggaacccacatcatggtacctctatcctccaataaccactcttcccagccatctgcatctcctttttggagtctggcatatcctaaattaaatctacgttgcaaatccgttacggcagtttgcctgattttagttccgcgacctccctgcgttatcgctcctaattgctcgaaatgagctttggtatatcccgtcacatccatcaaatattgatacttcgcgggagaaaaagtcccaaaatacgaggaatactcattagcaccccaaccaagcggtctctgcaaaatattattaaagaacacatcatgaacggccggatctcctcccgtcgcaaattgagttttcgtatcattccatcttcccggtatctgccccacttccgaaaaaggcaaggtaaaatgttcacccggttctatacggaactgaatacgagccgtgtcatgcgtcaaccgagccgttctaaaaactttcaaggttacatacgcatgattctctcccgccttgatcacctgctcctccgtgaaccccgtgtactcctcttccggaatagcgttcgtactgtcttgaacgatctccacccggaacggacggtcataatccttaatagaacccgaaattcccaccttcatcgtaacatcggcttcctccgcttccaacgtaccgaatgaaacgtacgtgtaattctggcgggcccataaactctcgtttccgtgagacgcaccatactgcacgtcaaaataaataccatccaccccctcgtactccatcacctctttcctttcacaaccagctaccaaaagacctcctatcacccataggaatatcattaatttacaagtatatatcttcataatcatccgttttaattgtttgtcgaacctcgtttatcaacctccacgtccggtaacggccatttgtaattatcagtcaacatctcgtaagtaccaccgatctccgatccattaaaaaacgtcgttaaattcaaacgtttataataaaaaaacaattgtccttcaccaatcacctcccgggcaaactctttcgtcaccaattctcttacttcatccgaagatgttgccatgataggcatatgacaattccgatgctcccggatagcaaccaaatactccaatgcctcttcgggagttgccgcacattccgccgcaatcaagtaagcctcactcaagcgaatcaaaggaatcatatacaagtacgtctccgttccatctaattcagcctcacgaccagcatccgcatatttcaagaaatacaaggaactattggcatccactttttcaccatcgtcatcatcatcgtcatcatcttttggatctcccgtcgtagtatatacagcccatgtcaaactagcacgccaatcattatccggatcatcataaaaaacaggaatctgagaattggaaggactactccccataaaagtcaagcgagaagttagctgtaaagccggaacaaaataactcgaattaagcttcgaacgagaagaattataaatcgcgaaaaagacttcagaagaaaacaataaatcatttttatcctcagcttccacttgctccggtgtcgtccacgggaaaatcatctcattttcgtccaccatattcttgtcaatcacctcctctttagcaatgcgataagccgttgccttatcccctttccacaaataagcccgtgccaaaagagtctgtacagcaaaataattcaaacgcaactgacgataggtaaaatccgcccgttccaacccatcatcggaagtcaccgcattacccactcctgtggtaaaaacaggatcattatctttcaataaccgaacggcttcttccaaatcctcgatcacccgctcaagcacgtactcggctgaacgcaacggagtgatatcacgctttgcctcattctgatacgggattgtaatcatcgacttcgtgttttcattataagacggcccgtaaagtcgtaacaaatcgaaatgaatcatagcacgcaatgccaaagcctcccccttcacgattggataatactcctcactcaacgcactattctcctcgtcacaatgcacaagcaacccgttaatattcgctaccaacgcatacattttcgtccaaatattattagacttatttttaaatgcgtcatcattaaactggtaattagcgaatactttataattatggttaccgctcaccatattataatattgagccatcacatcaatcacccccaaactcaaatcctcaccatacacatcaatcatacccatatacaccccgttcaaagcaatcataaaaccgttattcgttgaaaagagtgtgttctccatgatcttatcgttcatcttcacgtccaaccagtcggaacaagaggtagtcgacaatgccaatgtccccgccaccgctaaaaatttaaatatattctttagtttcataataacaattcattaaaagttaagccctatcgagaatgataccgaacgctcgaacggataactggttccacgctcctccttaatcgaagaaatcctaaaaatatcattcatgtatgccgtgaaattaattgccgaagccccaatatacttcaaccagtcagcatttgtcgtgcgataaccgatattaatagaattgcacgaaaacgtattctctttctcgataaaacggctactcattttggtcgaattcgtatcatcaatacgtttaaaacgagcaatatcacccggtttctgccagcgatcatacaaagcccgcttatcctgattatacttcaactgggaagaactaatattctcaaccttattaaataaggttgataactgagtcaaacctcccacccgataagagaacgacgctccgaaagtaaatcccttatacaccagagaagtctggaaagaaccttgaaccttcgggttactatctccaatcaacacctcgtcctcctgcttccattcatacgtgtacgaaccatccttcttgataaaaatctcgttaccggttgccgggtctatacccgcagaacgtacggcataaactcccgtcgtgctggcattatcataataacgcaataaagaagcactagcttgtccgcgctcattatactcctgcaacaaattacctattttcttgtattttgtagtattatgattcaagttaccgctgatataccagttaaactcccgttgcttaatcaaataataagtcatactcacggaaatagaacggttatcggtagcacccacgttcatcggtgcggtcgccgccccggttgaagtaggcatatcaatgcgcaccaacaacgggtcggtatcacgcatctggtaatcaacattcaaattcaaacgactcgcaaaaaattgaacatccaacccgaaattatgcgtcaccgtacgttgccacttcaaattattattaccccacgtttccacccaagcagcgagcccaaaaggattggaatgagctgtattatacatgtaaatactggacgacaactttgcatcgtaattctggttaccgggattacccaatgaataacgtaactttaaataattaatcaccttgctatcagctaaaaaatgttcattatgcacgttccacccaactcccacagcccaagtcgtcgcaaacggatcgttaataccaaactgagatgctccattcgtcgttaagttaaaatctattaaataacgcatattgtaagcataattcgcattaaaataataactaacactccggctcttgctatccgaagcactaggctttcctgttacataactggaggaaaaattcggactggaaaactgatcggtagtatacccttgagccccaaaaccgtaagattcctgatttttatccgagaactgcataccggctaccccgttcaccgtatgatcgccaaaagaacgaccaaaagtcaaattcaaacgtcctgtaattgaattgtttgaagatgaattcttggtataagttcccttcttgtccgcatcggtcttggcaaaaaacgtctcgttcggagaacggaaacgctccgcttctgacttcgacatctggtattgtaaattaccgcgtacgcggaaataggtcaagaaacggtactcgatttggaaattattcgttatactccaagtattcgtctcattcgtgcttgcttgttggtaatcccacaaaggattccaaatataatcataattattcaccccggccaaactctcccgatacacatacttgggcacctctccgtcaaccgtacgcttagcatagaacgggttcatctgagaatacgccgagaaatccaccggattattcacggccttggtttttccgatcatcgtttggttcgaaaacgacaaatcttttactcgataagacaaacggatattcccgttcaagacatcacgacttgacttcttcatcaccccttgtgtattattataagaaattcccacaccataaagaaacgtccgatctccaccatcgacaaacacattatgcccctgtgtaaaagccgtacgcaaaggctcgttcatccaatacgtatcatatccctctttcactaatttcaaacgggcgtaataacgtgctcgttgagactcattgataatttctccgttctcatccaaattgacaccgtttgcatccttatacgccccagccagtttctcgtattccagtttctcggccgcattcatcaaattaaaatcactcaaatcagcccaacccaccgtgaaatttccagtgtaagaaaaacgcaactgtccctgtttcggcttcaacgtttccacgacaaccacaccattagcagccctcgacccgtaaattgccgtggccgaagcatccttcaaaatagaaatactctccacgcgatccatattcaaatcttgaatagcctccaacgtcgtctcgaaaccgtccaaaataaacaacggttgattaggatccgtgctatactcttgcgacaaatccgtcacgttaatcttaccattaatactgatatccatcaacgcattcgggttagatccctgcgcccgattctccgtgataataaacgacgggtccaaaacgctcaaactccgaagcacgttctgcggaccaatctgtttcaaatcttctgctttaaatgttgacacagaaccggtaaatgtctcgatgttacgcgtatatatacccgtgatcaccgtctcttccaactccgtcacatcttcctccaacttcacgtcaatcacactcttatccccgacaaccacccgcttacttttcatccccatgaatgaatacagcaatacgagattcttggaatcactacactctatcgagtacgctccatccactcgtgtcgttgtccccaacttagttccctcaatcataacagtcacccccggtaacggttgccccgtttcatcaaacacacgccctgacacttttcgagatttcacctgttgctgttgcgcaccgactttttcctcgcgttttaatacaatagttttatcctctaccgaccataccaaatttgtcccagccaaacacttcgttaacaccacactcaatctctcgttcgtaaatcgaaatgtcaagtttttcaccgcggccacctgctcatcctggtacaaaaaagtatatcccgtcgacttctccaaaatagaaataatctccgtcaattttgcattctgcacctcaaaagagaccttctcgtcttgagcgtatgttcttgtcaagaatgatgatgacaagaagatgacaaacatcaccttacgacatatcacccacaagcctcttttactaaaaagcgctccgtgtttcatctttaccattttttttaatttaaattaaacaaatgaacggtcttctccccgcttcacgagacagtcttgggcccgatgactgtttttcatttttcggttatataaatcgtcctaccttctatattaaaaatcaatccaccggtcttttccaacatacgcacggtttgttcaaaattactataacgtcgcatatttcccgtgaatgaaatcttttttgtcttctcgtttctaaacacgacctccacgtcgtaccacctagaaaccacctgcatcacccgctccaaaggttgctgctgaaatacaaacaatcctttttgccaagctacatacggaaacacatccacctccatcttaatcaaatgccccttcttatctaaaataccttgctcgttcggaatcaataccacactttgattttccgacgacaaacgcaccatcccctcgaccaacgtcgtcaccacccgttcttcctcctcgtaactgcacacgttaaaagtcgtccccaaaacctcgattctagcattctccacctctaccacaaacggatgatccggatctttcgtcacctcgaaatacccctctccccgtaaaaacacctgccgctcctctccatcaaaacgtactggataacgcaattccgattctgaattcaaacaaaccaacgtgccatcacccaacaccacggaatactcccctcctcgcggaacccgtaaaatattatattgtaactctaccgatagactatcctccccacattgcctctcgccgacataactcactcgttcctctgttgaatgtacttccattccctcgtgcatccacaccgaatccaactgccccttacccaatatcacgcactcgccatcagataaaatcaactcggccttcaaacccgatgcaataatttccgccccctcctccgtcaacacatccccactcgacaagaactctgtcccggaataaaaccacactccccaaagcaaaagaaccgaagcggctaccacggatacgcgacgccatttccgcacccgtaaacgtttcttacaacatttttttacctgcatataagcactaacggcatccactcgttccctctgttcagtcttcatcttcataaaatcagaggacatcactttcgcatataacgcctcgttttcttcacactcttccctccaagcccgaacccgggcttcttcctctaccgttaattcatgttgtaacgctttcaccaacaacaccaccacttctgaataattctcgaacatatcgtatttgctaaattttacatatacgacacattaaaaataaaaataggtaacaaaaaggttaattatttttcattttaacatttcgtcacctctcgatatcctcataaataacttataatcagataacaacatcagattaagggtaataaaaaaacatacaattttcctaacttctctttcaacacctgcttagcagcttgcttccgtttcttcaccgtctcctcgccaacattcaacttctcggcaatttctttcactcgatatccctccaacgtcaatgtaatcacctgtttatatgtcgacggcaatgaatccatagcttggtttaccaaccgaaagatctcctcttcaatatattgattaatttccacgatacttagcttctcttccttatacgaacgcatcatctcctctcttaatttttcacctcgcaaataattaaagcaccggaaacgtaccatctgataaatataagccgaaaagttttccacacccttccattgttcccgtaactcccacatcttcacaaacacatcctgcaccaaatcttccgctatcatttcatccttcacgtaataacgtgcaaaagaaagtaaagaagggtaatactccataaataaattatggaaaagctcctcttcatgtgttatttgtttacttttcatagaccttattctatcacattcataacgcaaatgtaatttgttttcatatttaatcaaaattcaaacaaaaatgcatattttaaaatatatactcaattcaatcacccacatttgaaatttaagatataataagtctaagctcatatttatcctttgttgattcaaataaaatacctac

SEQ ID NO: 10762 - DNA, 75646 bp, Unknown
  gut microbiota DNA sequence
ataccgtagttatttttcatatgatttattacaatttcatatctttgattaatgagtggataggtcgttggagaatacttcgcttgaaattctgttttcgtgtagaacatggcagctcttacataactgaggaaatcccgatatggataagctgcttgttcccagcttggatttgtgtattcgcttacaccagagggaactttttcatttttaaagtcccggtagataatcttaatgaaacctctaatcatatagtaattcggatcatctttctgattatcagtattaactattcgagttgtatagtcaattccatttttgaagtcgtttggttcagtgataattccattttgtaaggctgcttcgatcattagataaaggaatactgcacgcctaattttaagcgattgttgattcggattagctatttcactatttgtaaaactgatcgcccagtaatcaaagccatctgtttttaattccacaaaatttggatttcctgttccggtacccgttccagtgcctgttccggtacccgttccagtgcctgttccggtacctgttccggtacccgttccagtacctgttccggtacccgttccagtacctgttccagtgcctgttccggtacccgttccagtgcctgttccggtacccgttccagtgcctgttccagtgccggtacctgttccggagcctgttccactatcatctggatcttctcccggcaataatcctcttaaattatcaagcatatatatttttacaggtaatacggtttttgcaatttcgggagacacgtaattgagaacgtggttcttgagaaaattgagataatatggtacttgttcatctgtgaggtcgttgccgtaatataatttacctgttcctaatgaggtccatttacgattaagatcttgtgtgctaatatctttgtatattaaatacacgccataaatgttatgaatttcttcaatctctttatcccatgaattatttccctgaggaaattcaaatcgaagaacagagtagttaccggaaggagtcacatcattttcattgtaacaacctgttatcatgaaaatgcaacttaatgcgattataaatagtttctgtttcatggtaattattttaattagaggttaaactaccgttgcgaggagagggtgccagtggattttgttccagtaggttatttaattccaatgcgtccgggggtaaaggtagagtgtatccgggatcattttcttgtaatgtgtaaacaatcgtggatgttgcatccgggaaccacgtgtgtttaatttctttcatcccccaacggcgtaaatcaaaccaccgatgatcttcaaaacataattctcgacgtcgttcgtcatgtataaacgtaattaattcatccggatcagaaatgtttttttcttgataatctgaagggaatcggtatgttcgaagttcatttagcaaacgtaaagcttctgttcctgcatttgcatttccggccttgtttaacatggcatttgcttcacagaaatttaaataagcctcagacaagcgaaaacttctactgaaaataccagtccctccccttggttgataatatctggaagaacttacattcacttttccgaaagcagaaggcattgcttccacttcattgtttgcgttcgtgatttcatacgaactacgaatgatgtaacgatctttacgtaggtctccagctgtttcatcaaaacttttcatcagttcctccgaggctctgaaaaatggacggttttcttttcctgagcttgcattgtagacataattagtaaagtcgttcatgttcccgtatacccagattacttcgggagagttggtgtaggagtggtagtttatataagagggagagtcgggattgaagtcaattgtttttagatccaagagacggaaattcccgttttggataacattattggcataagtagcagctttttcccattgttccatgtataaataaactctggaaaggagtaattgtaccatgggaaggcttgttctccaattcgcttgccattgttggtctgtgggtaatgattgatataagcgttctgcttccagaaggtcatctaatatttgtgaataaacttcttctactgtatttctttttaattcggattcttcaattccactgtttaattttagaggaactcctaatgccattttatcgctattatagggtgctccgaaaatgttgaccaagttgaagtaaaagtatccacgaagagctaatgcttgagcctttactgaattaatcgtgtttacatcatcatttatatcaacaatgtaatctagaacggcattggctcccagtattaaagtgtaatagcttttgtaaatattaagtgttgttaacccggcagtttccataacctcgtacatattcgattgccaagaataaggagcccaccatgcattagcgtttgccccggtatttggttcttgataaggagcaggggcaacatcgtcatctaatagataaaggaaaatgtttaatcccgagacatcattacgagggtaagcttctcccagtagaagttcattcatggagttagcatccttgggtacaaattcactcttggatttgggttccagaaaatctccgcaccctcccaaaatcaagctgataataaagataaatatgatttgttgtttcataatgattttttttaaaatccgacacttaaaccgaacgagaatactttgggcataacactatctcccaattctgggtcaaaaccattaaaacggctactacctataacaaacgggttattcacgtttgcactgatagaacaattggtcgctccgaatttggcacatatctgaacgggaacattccaggatagagagatttgtgtacaacgtaaaaaagacgcatcaacaaccatggcatcagagttcccccacatctcatagatggaatttgcagccgtcccgtccgggagttttatgttgtatacatcttcgacggatgtatataaggccggataaatcgtgtgtttctcatctcccggtttttgccatcgttttaatagatccttcgataaattgtaaaaaggctcgggcaattttccgtaattgaaattctgataaggattggggaggcgttttttagccccgagtagcacggaaaagtttactcctaatgataaacttttgtaacggatacgtgtatcaacacctccggtgaaataaggatctttttgaccggaatataccagaaatgtagtgggatcaatgtccggatctgcttcctcgaaatcaatcagattaaatgtcgggtagcctgtttccgggtctagaccggcaaaagaatatgaccaaaatgcactaagcggataacctttttttaagaaacgatcactgctacccgagatgaaatcacttttggttattttatttgctttggtttgaatgtcatcattttgagttttattccagtttttagaggcattgaaacctatcgtccatgcgaaatcttttctttggtagggagtgatattcatggagaattctaacccgtgattatggatacgtcctccgttcagtttcatggtgttcataccgtattcttgggctatgtcttggttgataatggcatttgaacgtctaccataatattccagactcatggttatgccattaaataattgtagatccaagcccacgttccaggtttttgtccgttcccattttaatagagggttaggtaggctcgatatggttaaatagtattcattataaccgggcagaattccttggtattgggtgataaggtccggacttacagaggtcacaacgtttccttgaaccccatacgtggcacgcatattcagttgattgatccagggaagatgagttttaacgaattcttcttctgccattctccaggacacgcccaaagaataagtcgggtcgaattgtttattggcatcttgtccgaatcggtttgatgcatccgatctaatattggcgttgagcacgtagcgatctttcagagagtaggcgaatgtggcgaaaaatgatacgtagttgtttgtaatcgttgtgtttttccaacctccttggtataatttatctaatgctccccaagaaatgggaacggttccgccaacaggtgttacttctgtcggatgtgtggggctaactaagatctcgcctctttcgggtacgtatccccaaaccgtgtttgtgttatttttattgtcttcggagcgtatctccataccagccattgcgttaattcgatgaatttcgttgatggttttggagaaaacgagtttgtgttgcatattgtaggaagtattacttgttgcattggttgccaattctcctccgaatggtaataaagcagccttgaatttggcagaaccggaagtttccgaaccataggcgtaaccgcgatagtttttctcaatataagaagtcttttctcccgcaaatgattctgaattattcatactgtatgctatactcccgacgaattgatattttagccaatccgtgatactccaatctgcgttgactgatacgttaaaattcttggagttgtttttagagtaactgttttccatttcgtttaggatgttgtatccgtattcgagctgtccagttctgtttaactgatatccgtaatattgtttataaaatacatattccccgttttcatcgaaagcgggaattgcccggcttgtccgggttgcataattttcaggggaaactcccggcccatatcctttcttgtcattgaaagaaccgcttaggttaaatgtaattgacagagatttagtgaattgtgtactgacattcaaacgggaggtgaattgtgtcatgtcatcccctttttgagtaccatggtttgacgagtaaccgaatgaagcgttgtatgttactttttgggtacctccggagatacttaggttgtgattatggctgaaagaattccggcacaaaatatcgaaccaatccgtattacacgtttccagtcttttcatttgtttcatgaaatcgtcttcgttgattagccgattgttgtacatggccatcaatccttcgtaagtatatatttgtggaagaggatccgattggtatctaactcccgcatcataagcttctttgctgaattgaattcgttctttagaattcatgtaattaaacattccgtaattcgggcgggttctaaatgaaagattggtagaataacggatgcttgttctctctgcacttcctttcttcgttgtaattacgattaccccgttagaggcttttgatccataaattgcagtggcagaggcatcttttaagaccgtgatggtttcaatatcggacgggttcaaccatgatatctgattcccgattaaatttctcatatcttgcgtaatggcagaactggcatctatcgggagcgggtctggttggataataccgtctacaacccatagcgggtccgtgtttccgaaaattgtcgatgttccccgaatggtgattttgggagtactcccgatgcgggaagaggagttgacaacaaccattcccgggatttttccttgtagcatctggtcgatggaattatatgccggcatcataatgtcttccgctttcaccgtggtgtatgccccaaccatatctttacggggaagactgttgtatccggttgatacgacagttacttcttccagttgggaagcatctgttttcatcgtaatttttagcggtttatcatccgtgcattttatcacttgggtttgcattccaacaaaagaaaacaccagggagttttcattttgattgggtaacgtgatgctgaaatttccctttgcatccgtggaaacacccatggaagttcctcgaataagtaccgttactccgggaagggttcctccagtctcatcaaatacggttcctttgatggttctttttgtctgtggttcttccggttgttctttgaccacgacaactccttcaaccatggaataagctaagttgaaatgtttcaatacaatgtcaatagctcgttttgtaggaatatttttgacagtgaggtctttacaccttttgtctttcaccttttccaagttgtacatgaattttactccggtctgtttgcggaactcgttaatgacctccacaaaagaagcatctttgtagttcaggtttactgtactgttttgtgcatatattgtgctactacacaataatgaaacggataagaatagaaaactaacaaaaatgtgcgctgttcttttcttttttttcataatgttattaattgagtttgtataattgttgaaaacatttatagtttcttacattccaataattaaattcttcccttgaacttctattttcacatccgaacttttctcgaacatctcgatgaacgtatttatatttttgaaacgactcaaatcaccggagaagtgtagatttttagctctttcatgcgtgtagaaaacatggatgtcataccatctttcgagttgattcatgatatcttccagtctcatttcttggaataaaaacataccgtttttccaagaggtggcatattgcgtgtctattgtccttatttctgtttgtccgttagttcttatgataatctgttggttaggggtcaggataagttgttgtccatcaggcaagcaataggcaattttcccgttaataagtgtggtcacggtttcccggctttccgggtaattgttcacgttgaattctgttccaagaacgcgaatattacctttattggtttttacgataaaaggagtattcgtgtggtttacctcgaaatatgcttctccggatatagttacttcccggaccgagtcgacgaagttgacgggatattctagccgggaatcggaatttagccatacttttgttccgtcagataacgtcaggaaaaattctccgccccgaggaacgactaatgtgttgtagatgattcccgtcgggacttgggatgatgggttataatgtaaacctgttgtgtcgatttgaattatagtctcgttttgccttatgatttgcccagaatctcggtttaattttactttccgtccatcgtgcgtgattaataatgcttgttgttttccgggatgtatatcggcaaaatatgtttcattataatattgggggggatactgtttttgccaaatatacaagagcgtacccgagccgattaaaagcaaaagaatacaggcaaccttgagataggaaggtataattatttttttcgggggaacaatatttttgtggtatgcttttaaatagtcaaaccgttcttgttcctctatttttttgtgaagatactggctgtctgataatttttgagcaatatctttcaggcgagaatcctcgtgtgggactttttcctccctgtttaggatttgtcgaaatagccattcggacttatcaaataaagaattccattccatgatataatcttttattatcgattatatcccaaaagtgatttggcgggtgacagtaaatatgaaaattatttactgccctggattatttcaagattcccagtaacaatagcaggctgaaatattgtttcaggttttcttttaaaaacgagtatgctctttttttctgggttttgaccgtgttgatacttatttctagttgtaaggcaatttcttgaacagagtatccttcgagacttaattgtaatattgttttacgttgatcgggaagaagagctattgctgcccgtagtttgcggattacgtcttcttcggcagccatgtaaaaaatgtcatcctcggtttccgataacgttgaactccattctgattttcgtttgtcttcaacttttttatcccggatatattttaatgtattattataaacggatttgtatagataagaagataatattttaatgttctgaaaattcaaatccgatttccagatcataatcaaacattcttgaacaatgtcttcggcgacacttgtctcgtttatgatagaagaagagtaattgcataaggctccataataaaaacgatataattctttccatgcacggggatctttgttatttattccttgtatgaatttatcgagttttatcatgatagtggtagcttttgattgtaaaaaagcaaaaaacagatgaaatgacaaagtacaatcatgtaaatgattgtacttttataattttttcctgtttttttaaagttgttccgtcagatacttttccagttttccggaagatgcgttaggaagatgtgactccacgatttttccgtctggggcaattaatataaattgatgaattgttccggagctataatgatattttttcaggaattctttttcattttttaggaaaaagtgttttcctgtttggatatcttggtttctgatcgttttcttccattcgtctagtttcggttcaatggataaatttattaattggatgtttttttctttaaatagtgaatctagttttttcaaatgagaaaattcaacaatacaggggtagacgttttgccaaagatagagacagacgtactggtgcttgaagtcctttagcgagaattctttgcccgtagaatcttgggcatgaaaatctatcgccttgttgcctggggcaattctgacccaactgtcataaatttgttcataacgggttaaaagtttcttgtccgtaagcttttcacgagtgaatttgtttaattcataaatttgttttattccgttattttgcacgtattcatttgcccaaagggaaataaatccttgtttcacatcttcttgtttgaaattttggtcaaggtagtacatttgttccaaaatattctcgtagtatgttgtcggaattcctttcttttggaaggcgagagtggcgcaagctcgggagataaattcctggtattcagttaaattcaagtaatctttgtcttcctcaatccaatttttaattgttgtgtaataatcatctctgattttttccaagtcttcctcgccatgaactttaggataatttagaagagccggggcaaataaatattttatacgggcacgttctaattttatgaatttctcactttcgttttttaacgtgttttcgcaactatccaataggagacaattttctgctattttctcttttaatgcggactcgaattcggggaattgtagggaatagatgttacgatcataaggtgttattttttgattggacaggtattcagtgattccggggcgatctccggtaatttttaaagattctttcatacttttcccgtcaaatgtaagatgaatattgtcacccagttccgcgtaaatttgtttacgttcgctaaatccgttgtgtagggttatatacgcggcatccatattaggtatgacatattcaccgtgtttattcgagtcgaaatgaacgagttggagattatagtccgttgttgatattgccaagccgatcggcggtaattcctgaacgtcaatggaaatctttatactgtctttcgaagaaggtggtgtggcacaggaaactagtgcgaataacaaaattgttaagtagcatttcatgttttgggtattaattaaaatgatttattcaatatattaatcccaaaaaatggtcaagggtgacagggaggagaaaatattttttaattgggagtttacagttgttcgccagagagaatgtgtccctagcgaacaacttttcaattaaaataccacaaggggtatcctgtttatgggttataataattgatgtttgcataggtattctgcaatttgcacggcattcgtggcggcacctttgcgcaggttgtcggaaacaatccataggttaaggctattgggttgtgaaaaatcccgacggatgcggcccacgaagacttcgtctttctcgttggcggtgatggccatcgggtagagatcttgggcaggattgtcctgtacgataataccttccgagtgggctaaaagctcccgaagtgcgttcaagtcgtagtcctgtttgaattcaatgtttacactttcagagtgtccgcccatgacgggaacccgtacggccgtggcggttactttaatcgtgtcgtcattcaatattttacaggtctcgttgaccagtttcatttcttctttcgtgtacccgttttcagtgaatgagtcgcaatgcggcagacaattccggtcaattgggtgagcgtatgcttttttcacctcccggccttcccgttcgccttcgagctggttgattcctttcaaaccgcttccggtcacggattggtacgtggaaacgactactcgtttgatcccgtattttctgtgaagaggggctagggtgactagcatctgtattgttgaacagtttgggtttgcgataatcttatcttccttggttaaggtgtttgcgttgatttcggggatcaccaatttcttggtcgggtccattctccaggctgacgagttgtctaccacggtaattccggctgcggcgaattggggcgcccattccaatgaggtgtctcccccggcagagaaaatagcgagttgaggtttcatattgatcgcgtcctgcatacccatgactttgtagttttttcccttgaaggtaatttctttacctaccgaacgctcgctggctaccggtattaactctgttaccgggaagtttctttcttccagaacctgcaacatttttcttccgactaatcctgttgctcctactactgctactttcatcgtgtataatttgatttaatgattagattcccttttcgggagtctttttatgagttaggttatattaacgcctcaaaagtagtgaataagcattgcttgaacaatagaggaatgttattttttcaacaatcatacggggtgttaaattcttaacaggacggctggaatctaaaattattccgtcgagtgatccatacccctcttgagaatcatctctttatcttgtttttttaacccgacctcgtaataattcacgggttggtcgtgatctccgaggtacatgcggggtctccggacaaaaccaggattgacgagcgagtaggtggagtcaaaataaggggtctgaatttcggccatattcaacagagtgtggaagattgaagcgttcgaagaaataggagcgctgctattgtaacgtgcaacctcgtacttctccggtctggcgtcaatgtaattttccgagaaccacatcaggaatggaatgtgtatctggtaataggtcgggatcggtgaggcgtgcaggaatcttttccggttgtcgtccagtaaatcctccccgtgatccggcgagtaaatcatggtagcatcagcttccgagttcttcaatatcccgatcaggctgtgcaggaagtaatccgtgtacaggacactgttgtcgtaagcgttgatgagttggtccttgttcttgtactcgacttccgtggcgttggccggttggaatttggcaaattcttccgggtaacgttctttgtagttgaagtgcgacccgtaagtgtggaagacaatgaatagattctcgctcaacgaatccacgtattgctgtatcaacggtagcatttctccgtcaaatttattgaccgtgattaatcccccgtccgcttggggacgtacattgacatgaatgtctgcctctgcggcaaagtaatccgtgaatgatcggttcggtgtctggtttgacaggaatatcgttttaaatccggcctctttaaaggcggttacgatacttttatgcgtgtagaggtactcgtagtggcaagcgtcggcggcagacaaaataagtggtacacttttgtgtgtcgtgttagattgtgttaaggcgtctttgtatagtatcaagttatcctcgtttttcaataacgggttggtttcccgctgatatccccacagttcccagttttcggctcttccggcctccccgattactaacacgtatatttcccggcgttggtgaacggaatcacgggtggcatgatagacgaaatctttcgaggtgacggggtaattcatgctgcggttccatttcactcccgcgtaatacaagttatacatcacatttgccgggtatatatctgttttcacctcgtaggtgttatccctgtgtttctcgaaagcgaccagtccggaaccgatgataaagaagatgattccccacgtgatcatgtgtttgcggaacacggcagtacgtctcactttatgatgcactgcaatagaggccagcacgataacaggaatataaaggacgcagacgatgataatggagggccatatgtttcccagcaattccccggcctcggaggcgttcgtggttggcaggttcagaaacatatcaacagcgatgactgactctccgaagaggtagaacaaaactagctggaaggcgtgtaggatcagtaccggaatcagtatcaattgcatgagtcccgcccgtttgaacagggagaacacaaccatgtaaacaccaagtggtagcaggatcaagatcgttttacccagtccggagagaggttccgtgaaaagcaagcagaaattcgggactaaattcaatacgataaagagccaaaacaatagtcttggttgtttcacgaaattcacgatccctttagaaagcttcgttaataccgaagtagaatgcgctgacgcctttgccgaatccataatctaatcttacgtttactctgtttttaaattcccagcgataacctattccgtaggttggcagggtttgtttccacttgaatttgtccatgtcggggaacacgtttccggctcctccccatgcggtgattccgtggcggttgtatatcttctggcgatactctacctgaaattgtatcaggtcattgtcccggtatcttccctcgtaataccctcgcatggcgtatgatcctcccatgagggaaaccatgctccaaggagtgtccccgtaattgaatgttccttgtaactggctggcgagtatggcacctttccacattttctggtagtatcggaagtccacgcttgtgcgtttgaaactatcgtcatttcccaaccatccgggaaagaattgttgttccagttgggcgaaaaagcctcttgccgggttcgggataaaatctcgcgagtcataggatataacgagtcccggcccgaaagtgttcacgtttttcttggccccgttgaggaacgtgatgtcgtcgaaattccttgccgtgacgttgcggaacatgaggtttgccccggcgtacaagttaggggcaagtttgtatagaagttccaattttacctgttgttccaatcgcttgtactcagtcttgtggtcttcgtctttcccggcatcgtagccgattccccagtattcactgggaaacgagaagaaatacatattgatgtttgcccggaaacggtctttcgggaaaatcatgttgccccggatacctagcaggtaaaaacccgtggttgtgacgtccccgtaaagggaaatgtttgacggggagatggttttatcttcacggtcgatacggaacagtccggatgcgaccacgccgagccccagtttcgtgtcgctcgaaaagtgcggccccccgataatggagaagtcgaatttcttttcttctttcaccttgttcgattgctcgaaatagcgatagaaacggtgaaagaatcccttcttcaacgtgtcagttgtattgttcagcgaatctcttgtcatgaattcccccgccataatgtcatggaacgggataaacaataaaaggcataacgacaatgcacgtgttattcgttgaatcatataattaacctgtaaaaatgtttataatcattcatcttgcgtcttcttgtacgcaatatctatgccaattgtttgcaaggacgaataatcattaacgagaaataggggaagtctttacgtgtgatgtcgttgtaagcggtcgtgtgtaactcgtctggcgtgcctacattttcgtaatagtggtattcgtggcagggacttttttgcatgaaacggtgtatttcttccgtgcattgcgagagtttcatgatcaccacgacatgaccgttggaaagaaggacgtccagttcttcggcggtagttattcccggtaggacgacgagtttttcttcttgtttcacgatgtgaagaccagagatggctcctgccgcgataaaggcagggacaccggccacagtggtaacgggaaagttcatggaagcaagtttatcgaacatataattcacggaagagtagaaacctgaatccccttctgccgtgatggcaacgtttttacccgtggcgacaagggatgctatttccgtgcaaagggcatcataggcttgattggcaaacgtgcgatccttggacatgggtacgtgaaagagtcgtactcgttccatatccacgggaagggcttgcaggatgtccccggaacgggatttggtctgtgtgccgggacaatagatgatgtccgccccctgtaaggcttttaatgccttcaacgtgatcaactccggttctcccggtcccaacgatactcccacgatttttcctttcatgcctgaattagtttgtaaactttatgaactctttttcttcgttgcaaaagtcgctaaaaaaggaatagcctcaaaataatatttatatatttgcaggcgtcttggtgctttcatgttggaagaaaagggaatccggtgaaattccggggctgtccccgcagctgtaaagtcattgcccgtccgtgagggcggatcttttcgttaggccactggtgataccgggaaggggaaaagatgacaagccagaaaacctgccaggaggcgtgattaattaatactttcggaggaaaagaaatgaatgtagtgcgttttttttgtcttttatgcttttgtagtgttctcttttgttgtaagtcgacttcacgcaaacagtcgtcaggagaacagattgcgagagggaaggtcgatacggtttcccggattcatattaagtatgctaaaggtttttggttggaggaatgtgaggggtacgtggtactgaatatcaaggacccgcaggagagtagtcatactcattaccagtacgctttggtcccgcggggatcgacggtgcagaccccgaaagatttaccggtggtggccttgcccgtgcggagtgctatttgcatgacttccttgcaactctccaatttcatcaagctgggggcgatggatcgggttgtgggaatcacgagtacccgtttcctatttaacaaggatatgcaacggcaggtggacgaggggctaacccgtcgtatcggtatcgagggaaatttcgataacgaggtgatcatgagtattaatcccgacctgatgttgatttccccgttcaagcgtgggggatatgatgccgtgaaagacattggaattccgttggtgcctcatctcggttataaggagatgacgccactcggtcaggcggagtggatcaaatttgtaggtctgttgctgggcatggaggacgtggcaaaccgggagttcgcccgtattgaacaacgttataattccttgaaagcgatggtgggagaggtggaacggcgtcccgtggtatttagcggggagttgcgtgggggtgtttggtatgccgtgggaggaaagagctttttggcgcagttgttccatgatgcgggggcggattatttcttgaaggatgatcctcgttccggtggtgtgacgcttgatttcgagaccgtgtacaatcaggcggaaggtgccgattactggcggatagcgaatagttttgccggggagtactgctatgatgccttgaaagcgcaggatgagcgctacgcggacttcaaggcgttcaaggagaaacacgtggtttattgtaatatgcgggaaaaaccgttttacgagagtatgcctgccgaaccggaagtcgtgctagcggatatgatccgggtgttccacccggaaatccttcccgatcatgaaccggtgtattatgatattttaaaaaagtgaaccgatgaagagaggtaagtacacgatactcgtttttgcgatcacgatttccattctcgtgttcttgttgttaaacttgctgctgggttcggtggccatcccgtttcgttcggttgggaatatcttgacgggaggcgagggggatccggtggcatggcagaatattatattgaaatcccgtcttccccaagcgttgaccgctttggtggcaggtgcaggactttcgataagcggtttgcagatgcagacgattttccgcaacccgttagcggggccgtccgtgttgggtatcagctcgggggcaagcctcggcgtggcatttgtggtgttactttccggccagctgggtggggtggcattaagccgtctcggctttatcggggaggtggccctgtcgattgcggctatcgtgggagccttgtcagtgatggggctgatcgtgctggcatcccggaaagtggcggggagcgtgacgttgttgattatcggggttatgatcgggtatattgctaatgcggtgatcggggtgttaaagttttttagcgtggaagaggatattaaagcttacgtgatctggggattggggagttttgcccgggtttcgggtaaccagatgatgctgttcgtgacgatcatggccgtgataatcccgttatcttttttgttgatcaagccattgaatttgctgatgctgggtgatggttatgcccgtaatctggggttgaatatcaaccgggctcgggtatgggtaattacctgtgccggggtgttgacggcaatcgtgacggcgtattgcgggccgattattttccttgggttggcggtacctcacttgtgccgggcaattttccagacatccgatcaccgggtgctgatgccggcctcgatgcttgtcggggcatcgctggcgttgctctgtaacttgattgctcgcttgccgggattcgagggtgcgttgcccgtgaattccgtgacagcattggtgggagcgcccgtggttgcgtcggtgttgtttaggaaaaggaaaaggcgggatgcggtggaattttagggattcagtgatttatgattttgatcttagtgtgaaaaaggaactctctcccccttcgggtactccctctataaacagatggattactttttcccgaagacaaagagtaataaagttcctcccctgtttatagaggaggtggcagcgtggctgacggaggagttcaattcacaattaataagttttcagttataacaagatgaaacaggcaaccattcaattaaagaatctggcgatcgggtacaagggaaagaacgacacgaaggtggtggcgagcgatatttgcacggcgattaacggcggggagctgacctgcttgttaggggcgaacggggtgggtaaatccactttattgcgcacgttatccgctttccaacctaagttggaaggggagattgacattatgaatcgggaaattgacacgtattcagacaaagagttgtcccgcacgattggcgtggtcctgacggaaaaatgcgatgtccggaacatgacggcccgggaactgatcgagatggggcgcagtccttacacgggtttttggggtacgttacacggggaggatcgggagattgtcgaacgatcaatcgctctcgtgaagatcgaaaatctggcggatcgtatggttcacacgttaagtgatggcgaacggcaaaaggtgatgatcgccaaggcgttggctcagcagacacccgtgatttttcttgacgagccaacggcattccttgattttccgagtaaggtggaaatcatgcagttacttcaccagttgacccgggagaccgggaagacaatatttctctcgacccatgatttggagttagccttgcagattgccgacaagatctggctcatggatcgtcaacacggtatcaccatcggcacgccggaggatttggcccttgaagggcatctaagcggtttcttcgctcgcaaaggaattgttttcgacatggaaaccgggttgttccgcgtggaaaatcaatattcatcccaggtgcggctggtgggacacgggcataaatacgctatggtgcgtaaggcgttacagcgtaacggtatcttggctaaccggaacgtggaatcgagcgtgtgggtagaaacgggagatttaaaaacttccggctttcggatctgccgggaaggggaacctgtggttgaggtgggaacgattgaggagttactggaacaattgaaaatggagaatgaatagaatcttgatttacgatttatgaatgacgatttgcgattgaaaaaacgttggctagcgggaggaaatcacttaatcgaaaatcataaatcaagaaattaataggatttaaaataaaataaggcagatccttatttagatccgccttatttcttttgcggttatacactttcttggatttatgtacccggttgatgttcaccgggtggagatgttctcggatctcctcgtcccgccgggcttttctcatggctttgaggtagtcggcccgggtaattttaaacttgcttttcatgctttaattgttttaacgtgtttccagtcacgtgttttccaagtacaaagatagcatttttttgggattattccgtgtcgggaagtgtgatcgttttatcctcggaaaaggccgtgttatctgcgcgtgcaaagaatgggtggatacatacttcaccgtcgtcattgcgaagggtgatttcgcatttcccgtctctacgggtagccccggtttctttttcaagcgtgaacgtgtcgcggtaattcgcgtagaatatgcctaccatcatccggtctgtcggggcagcggaggggttgtcccgcgaatcgtcccacgtgatggtgacgagcgtgctgttccgtgtcgctcgcaggttgatcggtagggcgagggggccaaggctgacttgaaaaccttccatgtcaaggatttctcccttctcgtctaagtacttatagttggttgagtgtatcagattatcatcggtcatccctcgttgtgctgcggcaatcttccagacaggcaggtctccaaatccctcgcgaatgaaggcgaacatatagcgggcaaaggtgaacttgatattattttttctttgtttcggtgttcgatcagggataatattgccatccttgtcttttttcttctttttcctgagagttgagcgcctgctggggcaggcttgtagcttgccgagcctgtaataataggtgatacctcctacccgaaagcgttttttaggagttaacgaggttccttctacttgcatgatgatgtttttagtgtttttgggcgggtcctggggtccttaaacgattcgcttggcctcttctggctctccacagggataaaaataagaatttaattcgagataaacaatatttatactgtataaacagtagaagaacagtacaagagtagtagaagagcagtacatgaaggagaggagggcaggggaggactatgggatgcttacggatgggtttacggttggttatgttcgggaacgagtataatatctaggctggcgtgtggaagtagcggacggcagacggtgaggcagcgatcaacaagcaggacaaaaaaggccggggtgtcggcaaaaagttcccagagttcacgggcaagggtgattccggcgatgcgggcaacgctttccgggggacagtggctttcacgggcgaggctggcgatgaagttccggttcatgatgacgttgcggctatgcgtgtccagatgcccctcggcgagcttgacggctttaccgatcatgatgcccatcgtgatgcgggagataccttcctcttcggcaagacggagagtatctccgatatagttgccgtaatgtacgaaggcttgcggtgggaggtggggaaaacgagagcggaggtaattttcactcttggccccggagttgataacgagttccgtgcatccaagggctcgggcaacttggatctctttgcgtatggagttgacaaaagcctcggaggagaaggggcggacgataccggaagtaccgataatagagattcccccggtaatgccgagtttgggattgaaggttttttgagcgagtttgttacctccgggtacggatacgcggacggacacaccggacaacgtgccgtgggtgcggagcaaccgttcgatttcactggtaatcatgcggcggggtgttgggttgatggcgggatcgccaacgggtatgccgatgcctggaagggtgaccgtgccgacgccttcgccgggcaggaatcgtactccgggaatgtctgtgagagagacggtggaaagaatggtgtagccgttcgtgacatccgggtcgtctccggcatctttggtaaccccgcaggtgcaactatccttggtgaaagtacacgagctgacgggaagggttaccgtttctccatcgggaagggtaatcgtggcggagtgttgtggaattcgagagagaaggccttcgagggcggcacgggtggcggcggtggcacacgagccggtggtgaacccgctacggagagggtaaaaaccgggaaggaggcgttccacgcggtaacgcaggctatgctcaccgttcacgacgtagaaactgtcggggagcgacgggcggcgaatgacgatgaccgggatgcctagttgtcgggcagcgctgattttttcctcgtagtatccggattccccgctttctttggttagaatggccccgggatgcagttgacggaacagggccagttcatcctgtccttcgtgccagaaaaggaggttttccgcgggaaatccagcccggcgggcaatctcccgggagtcgtcccggtcgagtacacggaaatggcaggggtgttttttccagtaacgttgtagtttggttatggtctggaccccggaaagggccaacagatcacgtatttcgtgagattcgaggtaatcaatggcgtcatcgaaggtgtcacaccacacgagcgattcgtcccgtggcgggtaacgacgttcgaggcgtatgacgggcagatccagttgttcggagacggtggccacggtggtgtggagcaaggaggcgaaaggatgggcggcatcgatgatgaggcgtatgttgtgtgtcgagcagaattccgtcatggcgtcacaatccatgcctcccgcaacccgtgttccatgcttacattcgatttgctgggcattaccacgggtggaatagtagtaggggctacctgcctcgtcgagtacttttaccgctgttcttccttctgttgttcctccgaaaatgagaatcatgacgttttaattttagatttgacgattgtagatttaactccctcccggctccgccgtactccctctataaacagagggagagttggattactcgctggtttcgggaatggttaccagctcctcctctgtttatagaggaggtggcagcgtagctgacggaggagtttgttgcatcctttctgccagtgctatccttatagtttcgagtatattttccagttgttcaaaaactagcttgttttcaaaacggagagtacggattccatgtttttgccaaagagattccgtccggtgttcatcattatattcaccatcgggagtgaaatgacttgccccgtctaattcaatgcaaagtcgggcctctgggcaatagaaatcgagaatatatgtttcgatactaaattgtctacgccatcttaaattatttatttgtcgtcccttgaggaatttccaaagagtcgcttccgctggtgttccgtgcagacgtagttccctacgggcgtcccgttgttttttcgtgttgtgggtaattttggggtttgtcatggtttatcttttatatttaactccctcccggctccgccgtactccctctataaacagagggagagttggattactcactggtttcgggaaacttttaattttcaattctccattttcaatttctaaacaggtgcttgaactggtgtgaatagagtttagacaggccttgtcggttgtcgatggcgtcacccacgacgatcatggtggtgagggtgaggttgttttctttcacgatcttcgccaagtcttgcaattttccccggtatatccgttcatctctccacgtgagatgatagcaagcggcaacgggcgtggttggcgggtagtgctgcatcaattcggattgaacctgatcaacgatagaggcactgaggaagatgcacatcgtgctttgtgaacgggcgagcaagtgtaacttctctttttccggcatgggggtacggccttctccgcgggtgaggatgatggtctgtactttttcggggatggtaaactgggactgtaaggcggcggcggcagcgaggaaggaggatatccccggtgtgatgtggtaatccatcccgtattcgtcgaagaatgccatttgctcctgtattgctccgtatatgcagggatctccggtgtggagacgaacgatgaaaagtcccttgtcgtaaaattctttcatcaaagtgaattgttcctccaaagtcatggaagcagaactacgaaccgttgctccgggcttggcgtagtacgtgagttccacggggacgagactgccggcgtagaggatgagatcggcttgttcgaggaagtgcttgcctttaacggagatcagttccgggtccccggggccggctccgacgatctcgatgaatccccggcgttcggcagtgcgattcatggcaacggcaaaggtaaagtcattgccctcgctgagtttacctttctgtttttcaaggagcagtcgggtgttcccggtagattttagggcagcagcctcggcgacgctgggggaagaagttacttcacgtactttctccgaggggttgggaacgttgatgtcccggagttcgtcgggcgagtaggagtccattgaaagtcttaaactgtgtgtaagaaggtcgacaacaggttcatcctttttgatgtcaattgttgcgaggttggtaaggctggtgggtgagatgcctgcctcgatgagacgtgcggtgatgtattcccgtatacccgacgggtcacagttctcccgacacccaaaacctagagaaagcacgtgtgggcgatagtagagggttgggattgtgacggggtagatgaagggactgacgatgatcagggcctcgtaacgattctggtctatttcctgaaaggaattgtaaatgtcgacgtgaggtggtgccgtacgttcaaggtttctggttccgctatcttggacgtctaggagtagggccacggggcaacggttgacgaacttgtagatgatttcattcatcggcccgacgggttctgcctcccacccctcgaatctttcatgaatggtgtcaagagcccaaagatcgttgttgtcgctttgggtcgtgatgacggggaatgccccaagtatggaggcaagcctgcgggtgagttcgttggctcctccaacgtgtccggagaggacggagataacgtgtttgcccgtggagtcgatgttgacgacggcgggatccgtgtacttggattggatgcagggggcgatggcccgcacgcagatgccgagagcgccgatgaagacgagagcttcgtaacgggtaaaattggcggcgacaaagaccgggatcgagtcgatggaggtacagggattttcctgtccttcgcccgcgtagaatagttctgtttcgggaagttcccggtgtatgataagggccggagccactccttgatgagatgctatgatgatggctatttttttcatgggattatattctttgtgctttcatgattactatggggttgtggtcgtcaatggccacgtgttgggtgctgacgagggtaaacccgtgttgtttcacagtttcggcgaataattcctggctttgcttggagacggaattgaagacgataattccgttcgggagcaggtgttcgctgattttccggacgatttgatccatgtgaccgccatgcccgccgatgaatacggcgtcggggacgggaaggtcgtctagttcagcctgcaaaaagtctccgatgcgggtgatgatgccgggcgttccgaaacgggtggcgttgatttccatgaggcgtttgccctcggggcgttgctcgaaagccacgacgtgcaggtgagggaactggagtttcgcctcgatggagacggaaccggtgcagaacccgatgtcccacagggtttgataacgacgaaggtccagttgtgccagcgtgagcaggcggatcggggctttcgtgatcatgttggcacgtccgtcgagcagttcgaagtctctttcggggatgccgaaatgacgttgccgttcgtacgtgcggtggagaatgaggcagttcgggtggcggaaggtgagggccgtggcatcatcgggaacgaggatgcggacggtttcggtggcgctgccgagggcctcgccgacgtacatgatgtagttgtcgtacccgtaacggagcatacgttcggcgatggtggccggagtgtgttcccggtcggtaagcacgccgatcttctcctgtccctcgatgagcgcccggtcgaactcgtgccacggtctcccggtgagggaaacgacgtgcatatcatggtaggggagcaggatgcggtgggccaatgtctgtaacgagttgaacatggggatcaaggtgatcttggcgtcgggtaaacgtttgagtaccgtgttggcgaaaccgaaaaagagagggtcaccggaggcgaaaacaacgatgtccggatggttctcgtactggtggaacacgtcatccagtggaacggtgatatcgatccagaggtgatcctccggcagataatcacgcatgatctcgtggtgccttttccccccggaaaaaacgtgatgcgtgacgatggccgctcgggcttgttccggtaattcgggatgctccttgtcgtcgataccgatgatggtgaagttattcattttagatttaataatgttagattccagccgcacggggccttgctaattttagattttaaattttagatttccacccactaaattaccccttctagatttactgcattcaacttttatcttttagtttttatcttccaagagggtcgtctttttcatttttaattttcaattctccattttcaattcctcaaaggtctcttcccggtcgtagccgcgcggcgtcatcgaaacaaaggatggcgttgacgagggtggcggctaggttgctacctcccttgcgcccttcgataacgagcttaggcagacgggtgaaagatttcagcatatgtttggattcccgaacgttgacaaaaccgacgggcgcaccgataacaccgactggatgggccttatcctggcgcatgagtttgcatagttccatgagggccgtgggggcgttaccgaaaacgtagagtgcttcgggatgttcttccacagcaaggcgtatgccggcttgtgtgcgggtgattttgagacgggatgccatttctactacacgaggatcgtcaaggtagcatttgacttcaatgccgaggcgttcgagggctcccttgcggattccggaggccgccatagtgacgtcggttactatcatgcgtactttgccatcgtgtagggcagtatggagagtttccacggcgtcattgtcggtgtagagaatgttctccatgtcgaagtcggcagtggtgtggatagcgtgtaacagcgcccatttacggccgagggggatgtttttgtcccttagttcggattcgatggtacggaaactgcgcatcatgatttcttgtccgataccgacgttctcggtcgattgttcccggtagtaaccgcggggagtgatgatcttgtcattccacgtgtaggactgggagtttccaatgattacgatcgtgaacatgtcgatttcttccgggttgaaatcatgtagtgtcgtgatcttaatttcttgttcttcacgtccggcttggcggatgtacccaacgggagtttccggttggcggtgtttgaggaataattctttcaagcgatagagttgccagtagcgtccctcgcttttggggttgtagacagcggttacgaagtcggcggatgcggcagcttcaatccggcgttcgatcttttcccacggggtcatcaagtctgacagggagataatgcaaaagtcatgcccgataggggctcccagtaacgcggctcctttttgaaaggcgctgatcccgggaaggatttctacctcaacatcacttgctttgtcccgtttcatttcgagaacgaggggtgccataccgtatattccggcgtctccggagctgacaacacaaactgtacgtccttgttctgcatactcgaaggcaagggctgcccggtctttttcttttttcatcccggtatcgatacacaccgtttcagggcggacaatggatcggatgaagttaaagtaatatttgtaacccaccacaacgtccgactgcatgatggctgtccgtacggctggggtaatgtcttcttcgctacccggcccgatgccggcaacatatatttttccgtgtttcataacgtgtgactttatttgtgacaaagttacttatttagtttgtaaagtttataaagtgtggactccaaacacgagaaagtgtcaaaattcatgttcaaacaccctcccggcaatccattttagattttaaattccagttgcatagggctaatgctttgactaccccctctaactcccccttacacagggggaggatgtgctacattgttatattgtaatgctttctcgcgtttgtttctccccctgtgcaagggggagccagagggggtagtttttccattctaaattctacattttatccatcggataatgtatttcaccgaaagtacgattcccgtgaaggagacaattgctccgccaagaagaagggtccaaatgaccacggtccatagtgcggggcgctcgacgagaaatttgatgtcaagggtgtgaagaccacggtaaagccagcgtttccggcgtccgttggtgtcgtagtgaacgggacggaaagattcaaggttatagtaataacagtcctttgcctcgttgtcgaacgtgaccttgtagacggggagcggtagaggacgacgacgggatatatagtagttgtcgtactcgttcatcttggtgatggagtaggtggtcgagtctccggcgaggcgtttgacggcagcgaatatcatctcttccgtgatgcggaaagggcgaatcgtgtcagcggaggcgtccaaggtcacttccttgctaatcgtgcggagacggtagaggggaagaccttggtagtgggtccactcgatggttttgacaggatcatccggcgtggctgtgagtgcgatggcttttcgatagtccaagacatagctggcaggtgatggggcttgtctttcggctaggctttgacggaatccgctggagtcctgtttgccgaaaagccacgaggggagtggggccatggacatgtaaccgctcagtatccacgtgaagatgaatataccgaagaagaaacccgtgatgtggtgccatttgaaccaccgtttcttatacggagagcggagaaagcctttccggcgggcgagccagtaggaacgtatgccgagaacgaatccggtaaaacacatgaacattccgagataacatgcccagtacatgaattgtgtccataagttctggttacctcggataacggtgaaatacacccaatggggaatggccccgaaccatgcccagaaacgattgttggagttggtgaactgcaagatgtcggcagttcgggaagagacgtaaagctggtatttttccggaccttcgaagtagaacttgtagatgggaaattcccgcttgtaatgggcgaggggtatccactggtcgagggagtgtaaggtatccacccgggtaatctttcggttagtacaccagcgaacagcccggttttcgcagagagcgtagttaataacgggagccacgacattcgtgtcggcgtatatctcgatacgttgacgcccccctcctatactgaatacgggatctccataagggttgttcagagagagtccgcgggttggtgttttggcagggagacggagtaacacgtcttggatggcaggtaagccatttgtatcaaggatttccgcacgagtgaaccgatcttcttggcttacacggggaaaggagtggtagatcatcacgattccggatatgaaccatgaaaagcacaggatacagagaattaaccccagtatccggtggatatggataaataatttggttaacatggttggttagtcgatatcgtctgttttctcgtatttctttttcttcacggtgatgtcttctcgttggtgtttggtggcgaatttcacgtgttggatgaaaagttcctgtatggcagggtattcccccaaccctttgagtagtacgtttactttatagcctttcttttccagttcgtctttccagtcccctgcgatgtcattcttggcatgatctccggccacgaacatgaagggtactaatgtcacttcttttgctttgttagattcgagtccgcgaattacatcgtctatcgtggggtaaccttcgatcgttcccacgtggtagttcttatgtccttgggctttcatcacgtagtcgagcattccgtaggttgagtttgccgggtggtaggttccgtggcacacgaagacgcaatcccctttttcttttcctttgagaacttcggcaatcgctttgacggttgcttgataatcttcgggcgagtaaaggagggcattacctaaacggatgtccttgaattttttctggtacagtttcacctcctcgcgcagggcctccatctctatcccttcaataatgttcgtgggttgaatgacgaggtgggtataaccgtcggcaatcagtttgttcatggcctcggtcgggttcagttttactatacctttctctttgagacggcgcatgatcatgcgggaagtgtaggattcacggacttccactccggggaatgtttgtgacacttttttgttaatggtttcaatggtcagggttcgggtatcgtcgtgggtagtcccgaagtgaaccatgaggatcgctattttgtcattaggaccaagggtcttgaatatatcggaatgtttgaaaccgccgccaccgtgggctaacacgtttagaccggtaaagagggatagtatgatgataattgttttcattatttttttaatctaatagttaaacttgcaaagaatgttcttcccggacttaatgttccgagattggagccgtaaggcaggttctgggaatagtcgaatagattctcaattcccgcgttgatttcgaaaaggaacatacccacgggagagaaagagtgattggttgtcaagttccagatctggtatttaggagcatctttctcggtggatttcacgaatttcttgccttgtaatcgcccgttgaggttcacgttaagccgataattgttccattcgtgtatgtaattggcccgaatggttcctgagtgacgggtactttcttccagtcgtattttggtcctctgatctcgggcgtccacgtagctatatccgcctcctagagagaagcctgcgcccaggtaactattaacggaaatgtcgactccctgcgtgcgtgctttgttaagattttcataggtggtccgggagtctattccgttggctttatcctcgtccgtggttaggtattttgttgtaataacatcccgcaaatcattgatatacccgttaaccgatatgttacagtatttactggtatactcagtgttaaaggagtaatagtttgatttttccggtttaaggtcggggttgccgattgtgatggtttgtttccctttcttggtagcctctttgtaatagtagaggtcggtcaataaaggggctttaaatccggcggcatatgacaaccggaagttaaattccccgaggctatacattgccgctatcttaggagtgaatttgttcttgaatgtctcatggtagatgtagcgaaatccgggtactaactggagttttttcaagatacgaatctcatcttgtgcatagagtgccaacgtgtatatgtttttactctcggtaaggtccgtggggtttttaagatagtctttaacgtattcggagcctattgagattttgttgtatttaccgattttgaaaacccctttcaagttagcagacaggtaacgttgacgtttggtcaggatttcttccccggcgtgagttgtcgtgtcgctcttggaaataatgtctcgggtgtatactttatagtattcataattgttggcattgacatccaagctaatataggcggaattcccgaataagtatttccctcctagtcctatggcataattttcgtatgacatatcatagtcgaatccggaaaggtctttggcgtctttatttacgggacgttcaatctctttggtaaagtaacttccttccacgtagatatttaaatttttagaaggatcgaaagcaaagcgttggttcacgatgtccgaatggaatttgtcggaaactttacggcgtgtcggtacactgtcttctgtgatcttgctgagttgccaaccatcggactggcgtcgttggtaagaggtggaggaggtaaatttcccgacattgatatcggtgttgatgttctctataaaactgccttttcctccgaaacgagtggtggacataatattaagtgcatcatgtggttgatcggtgatgatattgatcactcctgcgatagcgtcagaaccgtaaagggatgatgcggcccccttgaggacctcgatacgttttactctacccatgtcaattcgggacagatcgacatagccggagatgtccccggtcatttttttcccgtttacgagaatgagaatataatcccctttcatcccgttaagtgtcatgtttgttcccatggcagtcggtcggaaactgaaagagggattaagcatgacaagggcatcctcgatcgtggagataccgcctttttttatatcggaagcggtcattacttcaacgggtacgggagaatctttcaaccttctgtgagttccagttccggatacaacaacctgatccaagttgatcagcgatgatttcagtttgaacagaatgtcgcttttactgctattaatattcatggaactgacctcgtaaccggagtaactggcccggagagtgtatgcgccttccggtactttttcaaggataaattctcctttgttgttggtagcgattcctatactcgttccgattaaccgaacgttcgcaccaataagtgctttcccgcttttggcatcaataactcgtccttttagtgtgatttgtcctaacgaggtacttactaaggctaacatgaataatgtggttagcaccgcaattcttttcattataaaatgatgttttaaaagtttataatagtattcctggccccgagaatacgctattacctgtgtttgtcttggcaggtctcctgactacgcctaagaaagataccttcccgtccttacgaacagtggtgtaagaacctttctttgaatctcctcgttagggagaaacgggcatcacagtagcgggcactgtaccggattctaaccggtttccctcttgtatgttaattgagcattaacacatcacctaagacggtacaaatgtatatattttttgacaaaaggttacggttggataagaaaaatgataccaggggaaagtgtagagattcgttaggaatatcgttggcgtttttgtataggaattggttgtcagtttgttatgatgattgaattgtgaaaataaaaaaatcatgtagaaaaagtataatataaaaaaatatattacatttgcgccatgttttggtgcggagccttcggtcatggaggtaacgcttaatagggaacccggtgtgaatccgggactgtacccgcagctgtaagttcctgtacaagggattttgtacttcaaatgtcactggttataaaccgggaaggcaacaaaatccggaacgagtcagaagacctgccgaacacgaaaaccatagctttcgggaaaaaaagcgagagggaagagatctatttatcttaaactcatgttgcccaaaagactatgttaataatgctttattcattattaatatatagttgtatgaaaaaagttgttgtattagcattgttgctgtttgtgtgtgtcggttcgcttctcgctcaggagaacgataaacaaaagaaaaagagtatcacggattctttattccgtattgatcaagtggacgtgatgcagaaaaagaagaggattgatttgttgggattggatgtgcctttgcgtttcgttccgataacggtgagcaagttgtctagccagatgcttgaccggaagggaattgttgatctgatggatgctgttaagtttttgccgggaattgtagcgaaagataagcaatacgggcaattccaacagttttcgattcgcggccaggggagtgcggtcgttatgattgatgggattcgcgatgaacggacgttgaataataacgtgccttacggagatttggctgccgtggagtctatcgagttactgaaggggcccgccgctattttggccggacattcggctatgggcggagtgttgaatattgtgcgcaagaaagcgtctcccgatttctcggccaacgctcgtatcagttatggtagctgggatgagagacgggctactctcggttttggggggaaactcgtgggacctctcgaatatcgtgccaatatcaattattcaacgggtgacggatggcgtgaggtgaatgcaaatcgtttttccgtgtatggtgttttgggagctgatttaggaaagtggggacgtattgatgtgaccggtagttatgctgatgatgattacacgaccgagatcggggctgcacccgttatgcccggtgatatgttctacgtggatggagacaagccgtatgcgctgaagggggatcgccacccggaggcggattaccgcgaagtttataatgactttgctaataattacatgaaacggaaagtatgggatatgtctgtgtcatacgtttaccagatcacgggttggatgaagttgaaagaacgtttttcttatttccatagtgatttggattatcattgtattgaggggctttcttatcgtacttctaaggatccgatatataaatggtattattataagtcagaaaacgagaaggtctatgttgacttggatacggttcaacgaggaaatgctgcccgtcagaacccgttgaattttaacccggaccacaaaaacgtgaataacacgatcgagttgaccgggaagttcgagacaggttccgtgttgcataattacacgttgggatggacgtacaattgttttgatttcgcccagtataacggttatggagatggcgatttgtgggggcccggtttggatgctcttttgcctgtgcgtgacccgcatattgtgcagggatggtgggacacgaaagtttcagccgtttctcttcgcacggagagaacgcatggaatttatttgcataacgtgatcgaattcaatgacaaatggaaaatgatggcatccggacgtgtggatttgtataaccggaaaacatcgagtgccacgattgacgacggaaagcagaagtatgaaacgaagaacaggaaagaatggaaagaggtggagacctcggcattcacgtatcgggtgggtgtcgtgtatttccctatgcctgaattgtcattctacggttctatttcttcctatttcaatcctgtgaccacaacgtatagtcctaccgtgatgtatttggaccgcaagggtaatgagttcaatcctgacgaggatgggggcgaagtgttcaaaccggaaaaaggatattccacggaagtcggtgtacggtacaccataaacgagatggtggatattaatgcgagtgtattttatattcgtaagtataatatcgtgaagagtttgggtgacacgacggtattggtggatggtgttgctaccgaaaagagtatccggggacaagtgggaagagccgattcgcgaggttttgacattgaggtggttgttcgtccgttacctaccttacaagttacgggaggtctcggttggtcggactatcgtctacgggagattgccgagagcggacgtttctctaaatataaggaacagaataaaaatgttcgtgccacgggtgttcctcgtacaaccttttatgcttatgcggattatatgattcccaagggaatatttaagaatttatctttccatttaagtgggaattttaaagataaggtattcagaaacatcgataatcgcctttatgatccggccttgtggctgatggatgccggtatcttttacacgataaagaatcatgtgactctggctttgaatgtcaataatctgtttgataaagagtattttgagagaaccacgattttgggaaaacctaggaattaccaggcatcggtttcttatactttttagggattgttcgaagatgaggtgttgtaatcctatggtatattgggggaagaaggggattaacttcggtgcaccttcggtgcgcttggggtacaccttcgctccccgaccgaagatgtaccgagggggtgcctgaaatgaaaagggggtgcctcccccgttcttccttacggtaacgggatttcctgcgctttgttcctgtttttaaccgggaggtaagagtattttacgcttctttttatacttttgcggcagataatgaaatcattaaatataaagagatgagaaaaacagtatgtattttgtgtgcccttctttttatgggtacgatgatgtcctatgcgcaacaggacacgataaagccggaaggatataaattcacggatgtaaaaagattgcctgccacatccgtgaaggatcagtaccgtgcggggacttgctggtcatgggcgacgacctcattccttgagtcggagatgatgagaatgggtaaagattcggtgaatttgtcagcgatgtatttcgtgaaacatgcttattcggataaggctgaaaagtatgttcgtttgcacggggttctgaattttgcggtagggggagcttcttcggatgttaccaatatggcaaaaaaatacgggattgtgcctcttgaagtatttcagggattgaactacggggagccgagtcacgtgttcggggagattgacgccgtgttgaaagcttacgtgcaggccgtggtggagaataataacaaacggttgagtacggcttggaaacggggtttcgatgctattctggatacttatctcggaccggagccggaaaagtttgaataccaaggaaaagaatatactccgcagacttttgctaaagaggtggttggcttaaacatggatgattatgtgaatttaacctctttcacgcaccatccgttctacacggagtttgccatcgaggttgaggataactggtcttgggataagtcttataatcttccgttggaggagttaatgcaagtgatggattatgctattgataacggttatactttcgtctggggtgctgacgtgagcgagaaaggatttgccacgaaggatgcaggggttgccgtaatcccagcaacggacacgaaggagatgagcggagcggaaatagccaaatgggaaaagttgccgaagggacaacagatgatggatgctttcaagcaagggccggctcccgaaaagacaattacgcaggagatgagacaggaagagtttgatcgttaccagacaacggacgatcacggaatgcatattattggtaaagcaaaagatcagaacggaactccttatttcatcgtgaagaattcttggaataagtataacaaattcggtgggtatttttatgcatcttatccttatatggctttgaagacaatggatattatggttcacaaaaacgctatcccgaaggcgataaggaagaaattgggaatgaattgattttagattttagattttaaattttagattccagccgcacaaggctgacgctttaacaaccccctccggctcccccttgcacagggggagagacggacgcaagaaattgtatcaatgttttaatgtagcgcatcctccccctgtgcaagggggagttagagggggtagtcggaaatttaaaatttaaaatctaaaattagtcagttggttcgtgcgtggcataaatgctgtccagtagttgacgtccaaggcaggggcggtaatgtgctccgtcgtaataattccgaatgtcatttgtgtattggttgatacctgaaaagtcatacacgttttcgctgccgaatatatttttcaattgctccacgtctgccgggttcatgcgtatctgtttgtattccgggctgatgataattttacagttcgtgtggtgggtttggaatacctctgccatttctgataacagttttatttgtggtttcatgagtaccgggggataagtctggtcctgaccggaacgaggacggaatctttttttgtacttttcccagtaataatcgcccaattctgctatttcctcttctcgcgggttccacaaatcgtttgttaccgtgttacggatgtttttatccggatttacaatgcctctcatgtagggacgatagtggtggcatatccggtaatccatgtatggaatcatgaatttgggattaaagaattcttgggcgaactgggactggaatttgaatttattcattccgcttatttccgggggtaagaggtgcatgtatccgcttgataactggtgttcccgcaaaagggtgggatcaacgatcaaaagcacgttggcaattttatcttgttgtttgtcaagggccataactttccggtgtacggcagccagacgttgtgctgtcccatacagccggatggctttttccccgttgaggtatttttcccagtcggaggtaagaaatgccatggtgcaggaatttcctaggatgaaggaatcgaagtgcagggagtcccgataattcttgtatgttttccaaccgatgtaatcttcgttcaggaagatcgggtcgttgtcatattttttgtactcacgcaggactttgaagggatcatcgtagaagtagatccccgcaaggacaaagaagggaacaagaaaaagcacgcattttattataaatcctttgaaagttctcatggctaaaactgtaaataaatgaaatcttcagatccgaattgtccgaataggaacatgagtagtacgagcaggtagtagaccccccagcgtatgattctgtgacgctggttcagagcttgtaacaggtcctgtttcgacatgaagtattcgtacaggaagagtagtacgacagcaactccggtaacgatacattcttggtcggtcattcctaatcgcagctctttaatagaggtgtgcaggttgaaggagaggtgactgatcatgtatccggcatcggataacgaggatagacggaaaaatagcagggagaatgcgaagagcaggtaggttcggaggatagagtaagccccgaacacgtgtttccccacgcttgtttccattttattccggtaggccacggtcaccatctcgtagctgatgataagtccttggattaacccgtatatcacatagttccaaccagccccgtgccacacgccgagtaacacgaaggtgaccacaagagcgtagacgataccccactgtccccaatatcgtttgcttgctgcgatgggttggtaaaggtaatccctgacccagaaggagagggacatatgccagcggcgccaaaagtcggtgattgtttttgccacgaacggacgattaaagttcggagacagacgataaccgaacatcatggccccaccgatagccatatccgtgtagccggagaaatcagcataaagctcaatcgggtacaataatccggcgagtaagagttgtgctccggaggcatcttgcacggaggcaaatatactatccagatgtggggccagtcggtcggcaatcaggacttttttcatcaaaccgatcagcatgagtttcagaccgtaggtaaccgtgtcatagtcaaaccgtttctcgattttcaactgcgggagcatatcaaaagcccgttcgatcggtccggaaaggaatttcatgaaaaacagcatgtagagcatgaagtccggtagtgagcgttcgggttcttcctcttcccagtagacatcaataagataaccgagtgcttggaaggtatagaacgagattcctaacgggaagaagattgaggtgatggctcctttccagtccacgccgaaccaaccgagtagtacggcaatgttttccccaatgaaattgaggtatttaaatgccacgaggaagaggacgagaaagacaattcccccgatgaagattctccggcgtttgttttcctgttcctgtataccgatccagcggccccagtagaaggttattgctgcaatgagtgcggctatcagtaggtacgcgatgttgaaataaccgacaaagatgcaactggttagtaacaagaccggtttctggtagctgccttttaccgtgtaatataggattaggcaacaggtaaacagaatgacaaacggtagagagagaaacatcatagactatttctttttagcttggatggatgcgcacaggtcacccacgtgtttgaatttcagtatttcacgcaggccgaaacgaatgttgtaatgtttttcgatggccgtgatgaggcgcatattcgtcagtgaatcccagccgtccacgtcttttgccgtggtctcggtagttaacgtgatgttttcgttttttaggatgtcacgaaaaatcgtgtccagttcgcgtaagatttcttcgatttccatagttttttatattaatgtcgttaatgctttccggtcaattttgccgctggtgttcaacgggaattcttctaaaaagtgaattgccgtcggtatcatgtagacgggtaaatgttccttcagataatggagcaaggcatcccgttcatggggagttgtcccgacgaacaagtgcaattggcatcccccgtcatcctctttcttgggaacgacgacggcattggtctcgttcggaaagaatttctttgtccggtattcgatctcgctgagttcaacccgaaaaccttgcactttaacttggtagtccttacgtccgcggtagatgatgtcaccgtccgggtcgacagaacagaggtcgcctgttttatagtactttttcccgttgaaccgggcgaatacctgtcgagacttttcctcgtcttgccagtagcctcgcatgacttgctccccgcttacccataattctccctgttctccggtttgcacgggtgtttcattctcgtccatgatcatggtgtcgatcccggtgaaagggtggccgatggcgatcatcccgttgtgttgtttgcagccttcgggaggaatccggtaagccgtacaataaattgtggcttccgtgggaccatacaggtttacgaattccgcattgggggcgcaggccctgaaacgttggagaagatcggcatttgcagcttctgccgtcacgataaggtatttgagttttggaacgtgaatctcgccaaagtaaggggacaggaattgtagcagggagggaggcatggccacgaaagtcagttcctcgtcttccattaattcgtatactctcatgtatttcaacttgcttgttcccaccgtgtaaacgctggctccgagggttagcgggtagagggtggacacaaccgaaacatcgaatgtcagttcgaacatttgcaacatccggtctgttggcccaagttgccagcccagttgatggtaggctgtatagaatgcatttaggtttttccggctgattgggactcctttgggaaccccggtacttccggaggtgaaaatgatgtaggcattcttgtttgtatcctgcgttcgctctcttgttagatggtctgtattttcatcccgtagttctaatgtggaaatacatttgatctcgttggggagaccttgccgcgtaccggattcgtgaccgtataatacccgtttcattccggtggattccacaatggtcctgttccgactgtccgggtagttgggatggaggattacgtaagttttctcggataacaaaacggccagaatagaggcgtacgtttcaatgcaatcttccgcgatgattccgataatgtctttcgggcaatcttgcacgaagggcataattccctgcactcgagcaaatacctcctgataggtgtaagaggtatcatcaattacaaaagctacacgatccgggtaatttctgtaagcccggatgatgtctttaatcatgtccatttccttcataaatcattccttcatacttgaggtccgcttccggcgtccattccgaaagcttatgaatgttgcaactacctcaattatagtaacgctacaaaaataggcttttattagaaacatccaatgttattatacttttattatttcgggaagttttatctttgcatgtaaatactggaagaaatgaaacagaaaccatttatcatgatcggggcgacaagttccggtagcgggaagacgacattcacgttaggtttgttacgattgttacggaaccggggaatgaaggtacaaccttttaagtgcgggccggattatatagacacgaaacatcatgctatggctgtgggggaggaatctgtgaacttggattcttacatggcgtcggcggcacacgtgcgggagttgtacgcccgctacggggcagcgagtgatgtctgcgtgatggaaggggtgatggggttgtttgatgggtacgacgggatgaaggggagtagtgcggagattgccgagttaatcggtattcctgtcgtgttggtacttaacgcgaagtccacggcttatactgtggccccggtgttgtatggttttaaacacttctatccgggaatccgggttgtcggggtcgtgtttaacttcgtggcatcggtagcgcattatgcttatttgcagcaggcttgtgtggatgccggagtggaggcattggggtatatcccaaaggatgaaagtattgttatcccgtcccgtcatttggggttgtcgattgatgagacgttttgttttgatgcatttgcggatcgggtggcagaggtgatagacaaaaccgtgaatgtcgatcgtttactggaactttgtacggtggaattttccggagaacagacagaaggtgtcatttgttccggaaacaggaagatcgctattgcccgggatgaggcttttaatttcatgtaccgggagaacgtggaggcgttgaaacgagccggggaggtggtgttttttagtccgctgcgtgataaacgtcttccggatgccgatctggtctatttccccggagggtatccggaactacatttgccggagttggcagctaacgagggtatgcggcaggctgtccggaagtattgcgagaccggagggcgggtgttggcagaatgtggcgggatgatgtatttgtgtgacacgattacaagtgatgacgggaaggtttatcctatggcgggcgtgttgaaacaaggggcgacgatggagcagatgaaattgaaattgggctaccgggaagttcgtgtaaacggtcaacgtattcgggggcatgagtttcactattcccgaatattgcctgggcatgagaaaatacctgtgattggcacgatatataatgccaaggatatggtggttgacactccggtatatacctataaaaacgtgttggcgagttatatccatttttactggggtgagtgtggaattgatcattttttaatgttaatgagtcaaaaatgacaaaatgtcctaagctatatttttaatgacataattttgtaatggcatgtaatttgttcgttcttcaaacgatttgaaagaatgaatatcaaattttaaataaataattatgttgagcgaaaatttagtaaaggcgtttaatgctcagattaatgctgagatgtggtcatccaatttgtatttgtcaatgtctgtgtattttgcacagaatggttacgacggaatggcatcatggatgagagcgcaatcaaaagaggaattggatcatgcttatgaaatgattgactttgtgatcaaacggaacggaaatgtagaaatcggtcagattaacgtggttccgacggcatggggttctgttttggaagtgttcgagcatgtttatcaacacgagtgtcatgtttctaaattgattgatgatttattggatgtagctatcaaggagaatgacaaagcggcccagaattttatcaataagtttgtagatgagcaagtggaagaagagtctactgcacagactattgttgacagaatcaagatgatgaacggtcataacttgatttatctggatgataaattaggagaacggaaataaattagttcgaaaaaagacgaggggacacttcatcggtgtcccctcgtcctttttatatcaatggtatgaaaacaaggcaaataaggattaccgtgcttaggcataccgtttgattgatgcgggcggcacgtttgtaatcgttaatcgatagttccctgttgttcgttccgatgtaaggcttttccacgagcattccgtgataaatgttcggtcccccgaaacggcaatcgagtattccggccatagcggattccggatagccggaattgggactggcatgttgacgggcgtattttcggatgaaggaaaagattcctttccggtagccggataaggcgatcaaaaatgccgttaaccgggccggaatataattcagtatatcatccagatgagccgaacagcacccgaaatctttgtaacgtgtgtccttgtacccgatcatggagtcgagcgtgtttaccattttataagccatcatggcaggaaatcctcctagggcatagaaaaacaggggagcgacgactccatcgctcaaattctccgccatggtttccaatacggcggtatatatctttttgggggagagttggctggtgtctctaccgacaatccatgacaggcgttttcgtccggcatccaatccttgttcttcaagagttcgaataacctctccgccttcttgtataagactgtggttcgccaatccgtagaaaacgaacacggaggcgatgccgtaatacgcgaaaggatggagaatccagcttccccaagcgagaagtccccctaagaagagggtggaaagtggcaggataatggcaatcaggcacccgtttcgtttcttgtgaccacctttgttaaagtgacgttcacaccacccgatgatgtttccaaaggctacgatcgggtgaggtagtttccggggatctccaaaaatgagatcaagaagatacccgatgataagaggaacggtgaagattgaaaacgagagcatggtaaccaattataaatcattgatggataataatctcaacgcccggagtagcatctggtttttttcatccgagagtgtgtttacccggaagtaatgttcgtccagacctctgaaattcgaggcgtcccgtatcagaatcccgaattgtttcaatagttcttgttttaacacgtgggatttatgtattgtgtgaataaggaaaaacgaggtttccgagggaacgggagagtaaccgggaagttcatcgaaagcccggacaaaattctctttacgtttgagtagcctgcccgtgtcgggtaggagatacttaccgttttgcagtaggaatttcccgatctcgatagccaaggcatttacattccaaggatgagtgaatcgtttgattcggtctatcagactttcgttaccgagcatatagcctaggcgtaatccggggatggcataacttttcgtcatggaatgaatgaccagcagattgggatagctggctaatagcggttcggatggctgtgccgtgggggcaaagtcaatgaacgattcgtccacgacaagcgtcatttgagggtattgttgtaaaatattctcaatctcttccagtttccatacgtgtccattgggattgttggggttacagatgaacatcaggtctgcggggcctgtttgaaagtcttttatgggtacgaatatctgttggtgcctgtaaagggtgcaagcatcttcgtactctgaaaaagagggaatgggaaggatggttttactcccttcgaaagcgtgtgcgatcaagtaaaacagttcagtggcaccgtttccggcaatcacgttttgcggttgcaggttatggaatcgggcaacttcccgcacgaatgattcggcggcaggctccgggtaatggaatattttgtcgatttgggtgatcagcatggaacggagaatatccgtgtccgcgtcataccatacgttggtggagaaattagcttttatttccgtgtttgatttgtatatgtcatctccgtgtccgttcagcatattacttggttttaagggtggaataaatgtatggcaggtcaacgtgtgcgcgtacgtgatcggccagtttgttatattgttgatctttgaaatcggtataattgaaggttgtgggggttgcttgggtcagtccttctgccagttcgttgaggacgatgtcattgtctaaaattccgtggaggtaactaccccagcatttttcgtttaagatatagccgtccgtccgcccgtcgtgtaaatggttcaagggagcttccggagccccgtctaataaggtcgttcggcccatgtgtatctcgtaccccttgcaggtttccgggtgattgcggaaggtgaattggtcttggcgggtgactttttcaggttccatgatcgtgacaagaggaaggatgcccaggccgggaatggcggtcatgtccccctctatctgatccgggtcctcgatccgggcgcccatcatctggtatcccccgcaaataccgatcacttttttaccttctttgtgagcccggatgactgcctccgcgataccgtttgcccgaatgttccgcagatcggagatcgtgtttttcgttcccggtaggatgatgatgtcggctttgccaatttcttccacgttattcgtgtagtaggcatggaatcgttcatctcgttccagcacgctgaagtccgtgaaattggaaaggcgtttcaggagtacgatggccacgttgatcttgccgctcccggctttggtgtttttggtctccagtgagacggagtcctcttcttcgatataaatgtctttgaaatagggaatcacgccgacaacaggtatacccgtgagatcgtggatgatctttctcccctcgtcgaagagggatatgtcgcctctgaatttgttgatgataattcctttgatcaattttctttcttcctctgaaagcagggtgatggaaccgtagacggaggcaaacactcccccccggtcgatgtccgccaccagataggtggcggcatttgtgcgcaatgccatccgcatattcgtaatgtctctttcccgcaagttgatttccgagatactcccggctccttccagcacgatgggcgagtagctggcttgcagacgttcataggcagcgtacgcttggttgaataattcggccttgttgttggacatgaagtattctctggcagacatattcccgacgggttttccgttgagtacgacctgcgagcattgttcgtttgtgggttttagcaggacaggattcatgtcgctttccggggtaatgccacacgcctcagcctgtactgcttgcgcccgtccgatttccagcccgtcgggagtggaatatgaatttagcgacatattttgcgccttgaaaggggccgggtggtaaccatcttgtttgaagattcggcaaaatgccgtgttgatgatgcttttacccgcatctgaacaggtcccgacaaacatgattgaacgaagaaaagacatgtgtattttagattttagattttaaattttagattccaaccgcacaaggcgaacgctgtttattgttttttctttttgtaaaggaatgctttccatctctcttcttccgcaccttgctggtccatttcccagcgggccatggtaaatagtaggtccgagaggcgattcacgaatcgcaggataagcgggggaatttcgtcagttttgtttagagtacacaatcttctttctgcccggcgggcgatcgtgcgggccacgtggcattgggctgaaatcagcgttccgcccggcaggatgaaatgggtggacgggtgttgcatttcgctgttcatgcggtcaatttgttgttcgcaataccggtctatatcttccggtaggatgttctggttttgttcccggatgtttgagggggtcgccacttgtgacatgacgatcattaacgtacgttgtatgtatgccagaatttcttgccgttcgtccttctcgtccaataaggctcgaatgacacccagcgtggcattcagttcgtcaagggtcccgtttgtttcaatacgaatatcatctttatccacccggctcccgccgaatattcccgttgttcctttgtccccgcctttcgtgtatattctcatgttaattgaaaattgaaaattgaaaattgaaaatgtggagattcaattttcaattgggttatactgtttggttgtcgtccactaatgtaaaacgtatacaacttgtgttttccatgatgggaaggtcaatcatgtcaatagccttttttccgttgaggtacgcgataattgcccggttgaatgctccgtgtccgatagccacgatccgttgaccggagaaattcttttttaaataggcaatgaaatcgatagctctttggaagagagcatctagggattccacgctgggaggtaggttggtccaatccacgtcatccaagcgcttacccgtgtatataccccagtccatttcccgcaggaggggagtttggtgaggcgttagtccatgtttccgggcgacagcaaccgccgtgttataacttcgggccagatcactggaaacaatgttatcaatcgtttcctcttggagcatctccgccagtctctcggcttgggctatccccaatggagataaggttccggggagttggccctggagtatatgttgttgattttctaatgtttccccgtgtcgggataatatgagtttcatcatcacttctttttagacttctaactcacaaagttagtaaacaattttgaatctttagagtatttgtcggggtgcttgattgtttttgtgtgtggcgtggtattatgggagattcttcctaaatttgttgtcaaaaggaaacgttggatgtatgatagggatgaagaataaacggttgaaatatttgttgttaacccttttcgtggttatgctgggattgttttcccggaaaatgagtgcttgcacgcttgatttcgtgaaattatacctaggggatgttttatgggctatgatggtgtatttcgggtgtcgtttcctattcgtgaatatgaggaaaagggtggcttgtgtgttggcattggtcttttcctacttgatcgagatcagccaattgtatcgtgctccttggattgacgccatccgggcgactgcgttaggaggtttggtcttgggattcggttttttgtggagtgatattctgtgttatactgtgggagttttgctgggaatcatcgtggatggcttgttgggatggagccggaaataaagttgtagatttttcgtaatattactttgtatttcttgaaaaaacagagaaatttgtcgtcatgatgaaaagaaaaataattttagttacgggaggacaaagatctgggaaaagtcgttatgctcaagagtttgcgctaaagttggcagagaatcccgtttatctggctacttcgagggtgtgggatgatgaattccgggaacgggtgagacgtcatcaacaggaccggggaccgcaatggaccaatttggaagaagaaaaagcgattagtcaatgtgacgtgtcggggcgggtcgtggtcattgattgcgtgaccttgtggagtaccaatttcttttttgacaatgattccgacgtggataagtctttgcgagagataaaggaagagtttgaccggttcaccgggcaggaggcgacgtttatttttgtcacgaacgaaatcggaatggggggagtttctgttgaccctgttcagcgacgattcacagatttgcagggatgggtgaatcaatatataggaagtcgagcggacgaagttgtcttgatgatttccggaatagctatgcgagtaaaataaaatggtaatttaattttcaattatatgagaagttttgcaataaaagagactgacaaggctttgtcggaggctttgatagataagattaataatttgaccaagcccaaagggtctttgggattactcgaaaaaacagcacaccagatcgggttgatacagcaaacgctttccccggagttgaggaacccccagaatattatttttgctgccgatcacgggattgtgaaagaaggggttagtttttcggcacccgaggtgaccgctcagatgatttttaattttatcaaaggaggtgccggggtgaatatgttttctcgtcagcaccatttcgagattaaattggtagattgtggggtaaatgcggatttcgaacctatggaggggctgattgatcgtaaaatccgtaagggaacttcaaattatttgtacgaggctgccatgaccccggaagaatttgatcgggcaatcgagatcggtgtggagattgtggatatggtatatgatgagggttcaaacgtggtgagtttcggggaaatgggaatagccaatacttcttcttcttccatgtggatgacttacctaacgggtattccgttgagtgattgcgtgggtgcggggagtggattgtctcgggaaggcgttgagcacaaatataacgtgttgaagcgttgtatggaaaattacaagggggatggaactccgaaagatattatccgttattttggaggtttcgaaatggtggctgccgtgggaggtatgttacgtgctgccgagttgggtatggtaattatcgtggatggttttatcatgacgaattgtgtgcttgccggaaagatgttgtacccggccttgacggattattgcgtttacggtcatcaaggtgacgagtgtgggcataaattggtgttggattatttgggggccgaacctttgttaaatctcggtttacgcttaggtgaagggacgggagctatttgcgcttaccccttgctcgtttcagccgtgaatatgattaacgaaatggcctctttcaaggccgcggcggtaacgaaatattttaaataattgaaaaatgagaagactacttctctagcttcccttgtgcgggagcggaaacgatcacaagaatgcgtttcaattagagggggtagttatgtgtcagtcttgtgcggttggaatttaaaatctaaaatcattaaatctaaaattagtatgcgttctcttttggcggcgattatgatgtttacccgactacccttgtggcggattgtcaacgtggacaagcgttatttcatggatgttattaaatattggcctttggtggggtttatgacgggagccacgacagggggcgttttatggctgtcggcacagattgtacctttggaggtggcgtgtattttggcgattattgcccgaatcctgttgaccggggcattacatgaggacgggttggcagacttttttgacgggtttggtgggggaacttctaaagagaagattctagccatcatgaaggattcgcatatcgggtgttacgggaccatcggtttagtgctctacttcattctttattattcattgttgtccagtttcgatccggccatgatcttcccgatcgtgattgcggcagattgtttttccaaactctgcgcggccgtgatggtaaatacgttaccttatgtccggaaagaggaagaaagtaaaacaaaacttgtttacagcaaggtacgcacgttcatattcgtgatcgtgggattaatcacgttgattccctttttctttttgaaggatgcgagtttctgttttgcgatgatccctgccatactgacagctatcgggttacgtttcttcttgaaaatcaagatcgggggctacacgggagattgttgcggtgcatccgtgttgattattgaacaggtcttctatttgagcgtgttggttatttggtgtcgctatcaattgttatgagaatttgattttagtgtaattaattcaatgtcgttcatctctttaaatttaacaatatagtgtaatttctgttggatgtaaagttgaaaaagatattgaaaaatgaaaaagtatttatatatttgcagatatgatacgaaaaggcaggggagcctgtcttaaaaatattgtgagtttatgctaatcttagactgaaaatcgccaatttgaggaagtaggattagacggtgagttcacgctggttaggcgtggatcgttgtctatttacttccgggcgtttggcgatgcctcagtttagatagagctattgacgatcctcgctttttttattgtatcatttttggggatcggcttataaaagaaattttcggagataaaggatattaaggttgcaacttaactaaaatgaatggaatgaataaagacccaaaatttataaatcatggaaaattaaagagatatttttaagggaaagatgaaaaaagagggtgaatcttaaactttgcacgttgaatatcacccccttgcatcattagttttataaaccaattaataatcaaagttatgaaaaaaacttatgacaggaaattttttcggcaaaaattgctatcggaaagaaagacagtcactgcggttacccaattacttatcgttttattacttgggtttccgttgtttacacgggccgagatgagtggtacaacccggatagaaagtatttccgttcccttgtcgggaaattccgttcgtcaggattcggtcgtttcggcagagaagccaggatcccaaaaactaggattttatgagggagaagttatggatacggaagggaatccgttgcccggagtaactgtcttgttaaaaggtactcaaacgggtacttccacggacacgcatgggaaatttcgtttcccggcaacaaaaacaggaaaatctgtactggtcttctcgtttatcgggatgaaaccggtggaaaaggacgtgacaccggggaagaaaattattgtcacgatggcggatgaggtggaagaccttgaagaagtgatcatcacgggtatctactcccgggataagaatagctacacgggatcggcttcgacttattcggccaaggaattgaaaatggttggtgcacagaatatcatccagagtttgaaaacactggatccggccatgctagtggtggaaagcaaacagtggggatcggatccaaatcgtatgcccaagattgagattcgtggaaagacgagtgtcgtgggattgcaaacggaattcgagaatgatcccaatcagcctttgttcattttggatggagtggaaaccacgttggaaactattatcaacttgaacatggatcgggtggcaagcgtgactattttgaaagatgcggcttccacggcgatctacgggtcgaaggcggctaacggtgtgattgtcgtggaaacaaaagcaccggaatcggggcagttacgtttatcgtatagtggaaattatgggatttcgtttgcggatttgtctgattataatttgatgaacgcttccgagaaattagaatacgaactattggctggacgctattcgccattggaaggttacgacgggtttgtcgacaaacttcaaaagatgcaggattattatactcgtttgaaagaagtattgaggggtgtggacacgtattggttaaacgaaccgttgcgaaccgtcttcaaccattctcacaacttgtatattgacggtggcgaccaggccatgcgctacggcttaggtatcagctataataaccgggacggtgtgatgaaaaagtccgatcgtgacggtttgggcgtgaacattgatttgatttaccgtagaaaaggtcttctgttctcgaacaaggcgagtgtggatctttccaattcggaacgtgaaccggtggctttttcccagttttcaagggcaaatccctattaccggaaaaaacaggaaaacggtgtaattcccatgtacttggagagaaagacaggactttacggggaagatatgttgaaccccttgtacgtgtggaacattgaaaacacgaatacctccaaggatctcgcgttgagggacaacttcacgatggaatggacaaccttcgatgcactgagactacgggctcgcttgggaatatccaagagtatctcgaaaactgaggctttcaagtcaccgaatcacacggatttcttgcagaccgagaaattgaagaagggatctttttcttttaatcagaatgaaagtttttcgtataatggagacctgaacattattttcggtaaaatatttaagaatattcatcaagtgaacttcgtgggagggtggtcgtttagtgaatctcgttctgaggcttccggttatagtgtagtcgggtttaacgatgatttccacaagaatccggcctattccacgggttttcgggaaaatcagaaaccgacctactcgaacgaccgtcggcgttctaccagttttttcatgaatttgaactactcctatgataatcgttatctgatggacttcaacctacgggcagatggtacttccgttttcggtagtaacaaacttttctccacgacgtgggctgtcggtttggcatggaatgttcataacgaggaatttataaagaaattgggatggatcaacaatttgaaaatccgggggtcgatcggtaatcccgggaacgagaatttcgatgcttacatatcgcaaaagacttacgtgtacaacgtggaattgcaaaatatgtttggggcgagtgcgttgattcagaaatacgggaataaggatttggaatggcaacgaacggtagataaaaatatcggggtcgatctgtctatcctgaataaccggatccgggtcacgtttgattactactttaaagacacggaccccttgctggtttctatcgggatgcccccttctgccgcggcgacgagcctatacacgaacatggggaggcaaatttccaggggatggacggggacattgaattatgtttttctgcggaaaaaggatttgtcttgcagtataaacatgaacgcccgggcgaaccattcggaatatcgtgacatcggggataaattggattacttgaacaagattggtagttctaccgtgctgaaccgttattacgagggtggcagtcccgatgacttgtgggccgttccttccttgggtatcgatccggcgaccgggcgggagctctttttgaagaaagatggtacgcaaacattcttgtattccgcttcagacgaggtcatcgtgggctcatcggtaccggatgtggaaggtattgtcgggatgtccttttattataaaaaattgtcggcttcctttagtttccgttatcaattaggaggcgaaacaatggcttcggcattgtatgataaagtggaaaatatcacccaagacaatatcggtaggaatcaggacaagcgggctttgtatgatcgttggaagaaaccgggggacaagtcgaaattcaaggcgattgataattatgcttccacgccgatgtcttcccgtttcgtggtgacggaaaacaccttttccggagagtccatttccatcggttatgatatggatgcggcatggctacgggtagcgggaattcaggggatgaatttccgggtttacatgaatgatattttccggatctcttctttcaaagaggaacgaggcttggattatccttttgcccgctcattgagtttttccttaggtgtaagattttaaaacaagtgtggatatgatacgaaaattgaaatttttagtatacgtggtgctaggagccctcacgttgtcttgttccgattggttgaaagtcagttcggaggaccggattatggagaacgatcttttccgtacaacccggggattcatgactgcattgaacggtatttatatagacttgttgaattccagtctgtacgggaaaactttgacatggggaatgtcggatattttggcacaatactatacctgtcgagagaaagatcacgcttccaagtctttggccgattttgataatgtggcccgaaataatgccgtgagtggttgctggagtcggtcgtatgccctgttgaataatatcaacacggtattggaacattgtgagtcggatcggggagtgctggatgatacctattatcacgtgatcaagggagaagctctggcattacgagcgttgttacatttcgagctattccggatattcggacccagttatagcaaagacaaggaaaaagagtgtatcccttatgccttgaattctgagacaaaagtaaatcctttactgccggcaaaagaaatcgcccggttgattatggaagatctgaaaagcgcggaggaatcgttggccgggtatgatcccgtgattgaaaccggggccgagtggggagatgacccggaaggtggcgtgaatgacattcgctatcgttccatgcgtttgaattattatgccgttcaagctttgatggcccgtgtggctctctattgcggggaaaaggacgtggcttgggagtatgctgataaaatgattcgtggaattcgtgaagagcatgagtggttcccttttgcaacccgggaagagatcgtgacaacaaacagggaagaccgtatttttcaaagcgagatcctattcggtctctataatttgaaaagaaaggaaagcgtttacgaggtgggttttggttccggtttgaaacagggaagtgtgttgcgtattgataaagatattatgcgggatatgtacgagggtgacgataatgattacaggctttcatactggtttgcggaaatggtcgatccggataataactcctatctccacgtgatcaaatacaaggaggtagatgatgttgatccggtaactaaaattagtaaagggtatagttatatcatgcctatactccgggtatccgaggtgtatcttatcgcggctgaatgttgtccggacccgaaggagggacggaattacctgaatgccgtccgtacggcacgtaacgtgaaaaatattcaagatgatgctgacttgacaacgtgtgtcgagcaggaatacaaacgtgaatttgtgggagagggacaattattctggctttataaacggaaagggaaaagcgagattgcatccggagagaaattggcagaggtgatttccatggaagaacgcttttacctgttcgatctgccgcaaacggaacaggattatagaaaagaaaacggtgtagataattagttaaaatttcgccatatgaaaaagtatatatttttattgtcagtagtcctgtcgtttcttgggtgcgagaaagagatgatggattacgaggggaaagacgggatttatttttcagttcaggaagtaccgcccagtcagtatggaaatccggagatatgggcgcatgtagatacgacgttgatacctttctcgttgttgttggaaaatgatagtacggtaaggctgaaagttcgggtgatggggaaggtggtgaattatgaccgttattttaccttatcggttgttgatacatcgactacggcgaccgagggggaagattatgctcccttggaaaagcaatatgtaatcccctccggcgagcgggatggtttcgtggagttcacgggattccggcaggaaaagatgttggattctacttattacgtgaccttacagctggtcgagaacgaatatttctcgttaccgatggacatttggcgccctttggagtatgaggattacacgaaggagaaccaaaatgcaatccgtcacgtggtgggactcacggatgaggttttccagccgaaggcatggacgttaaattattttggtccctattccaagaaaaagatgaagttattgtgtgaaatgtttggcttgcaaatggccgatttcgataacgtgagagatatggacatggaaaggcagcgtacttacgcccaaggactagataggtacttgcaggagatggaggcaaaaggggagacggtttacgaggattatctggacaaggatgggaatccggtgaaaatggctgtgggacctttaatttagtaatattgaataataaagactatgaaaaatgtaataggtttatccatcctgctgacgctaagtctatgtctgggatgttatgatgataaaggaaattacgattaccatgattttaatgaagtaacgattggtaaccggggattcgatacggcttatcttctcacgtcatacgtggatacacttcggatctctccggagttggaattcaaattggaagagaataagcatctaacctatgagtgggtagcccggtctaatgctgtgggttttgtggaatatcccattagtaacgaccgtaatttggtgtatccgatgagtttatcggctggggaatataccttgttttttaaagtgaaagacacgttgaacacgatggagtattcgaatgctaccgcttttcaagtacaagatttattaaccaaaggctgggttatccttggtgaaaatagtaacggggaggcacagatggatatgatcacgtattccgtcgacacgatggtactaaagaatatcctgcaagaaagtggacttcctgtcttaaaagatccggtgaaagtgtgggtggttgataattatgtggataacatgattcacgtgtcaacgggagatggaacatatcgtctgaatcgagaggatttcaaagggggagaccacacgcatttgaaatataatttctttgacccggggagtctggaacatttcacgcttcaggatgtggcacagatacgtaattataaccgggtggctattattgatgatgtgttgtttcacaatagttccatgattcaaagttctatctttcagaatccggcgaatcattacaagggttcctatgatctttttgatgtcggggataaaatcgcgtataatcctcaagcgatggcgttcatttatattttgtataataagaccgagcagcgttttgtttatgccgggggaagggcttacgggtcgcctgccgggcgttgcgatacgttaaaggatacacgggaggatgtggagattttttcctggaaaacaggattggattatgtcacgagtattaacagccgttttctggatgggtattcttacacgatattgaaggatgacgaggggcacaggtatttgtattcctacgtgatcatgtaccagtggggatgggagagtgtcgtgaaaaagaagaaatatttactggataaagccacggactttgataaagccaaatttttcggggctagtgcgcagcgaacatatctgatttacgctacgggttcgaaactatatgcgtatgattacgtggcggaaaaagtgcaattactccaggatttcggtgatcaggaaataacattgctgcattgtgacctgttggttgagacgggagccggtgatgatttcttctacgtgggaacctacgacccttcactgccgaaggagacgggagggacattgacaaagtatcgagttgtcaatgatcctaataacattatcgtggaaaaagtacccggctttagctggtccggattgtgtaaaattaagagcattgatttcaagaaaaattagagtatttgtctgatgtgtgagtgaagcaccatttgaacgcggttcgagcgggagaatggtgctttttgtgttataagtgtttggttaatagctaataagtaataaggagttctataacaactttattttttctacttgatgagattcggagtattaccactatgaaccttatagataccttatagaaaccttatatgaaccttattttatataaggtttataaagtattaatataaatttatgaaagtattttattaggtagtaggccggatctcatcatctattaagaatgaattcggatataatctctatcttaacaggtaaatatctgaagttgaatatttattttagttgtactttgggttgataaaagtgtcgtattttcgactattttcagtaaatttgtaaaatgccaaaacgacttatgaaaatgaaatcaattattatctgtttttgcttttgttgtttgggatcttgggggcatatgctttcagcccaggaacaggtgcgggcgttatgtccgttggaacaatgtattttggttaccgatctggcggatcggattgaggaaatacaagtgatcccgattaagcagtgttttgatgccgaatcactggaatggatgcgtaagaaattgttaattggccccgggggagatttgtttctcgtgtatgggcgggaggtaatgtgttttgatgctgccgggaaatatcaattttcaatgaaatataatcaagggaaagaatgtccttatcatcaggatgcctgtatcagcgtggatcagaaaaaattgttgtttgcgcatggagatagtgaagtcgtgttttttgatttgaatgatgggcgtgagattgagcgtctcccgatgaacaagcctctacaattgtttgaagagattgctccggctccggatggaggtttttattattattctatctcggctccttgtaccaataattttgaatggggacacctcttagtaacccggtttgacaaaaacgggaaaaagttggagagttcaattccgcaggtagggttcaccgtgaatatttttctcgtatcgcaggccgtaggtaatacttatctgatccgcacgcaaggaggtgataacgcatgttaccgggtgaatacgaaaggagagttggagaaggcctacacctttgattttggcaaacgggggataccggatacttacgggatgttaaaaggtgatttgatgttacaggattacatgagggcagattattacaagatgccgatttatttgtgtgagggtggaaaattcttttatttcacttgcagtggcccccaggccgtggcgtacaattttctttatgcccggggtaaggattcggggatttattggaaagcggatcccgatttggaaattcattttctctcggcagatgagaactatttttacgcgcttttagaatccgttccggaagagatgatccgggagacgcaagacccgttattgcgtcagatttttaaacaatttgcgttgtcgttgggagaagagacgtctactcggttggtgaaagttaagtttaaatagctggtgaatactaaaatttatagctaaattttcatggcgtatcgaaaaaatggcgaattttacgagataaaaggtttttatatggaagtatttttgattagacatacaaaaacggcggttattccgggaacgtgttacgggaattcggatgttgacgtggccgactcttttccggaagaagcagagaaggtgagggggagactgaaaggggagagatttgatgcagtgtattctagcccattacaacgttgcaggaagttggccgtttactgcggttatgaaaatccgattctggatgaccgattgaaggaattgaattttgggagttgggaggggcaacgttgggatgagattcaagatcctcgtttgcaggaatggtatgatgattggttgagtatgcctgccggaggggcggaaagttttctggaacagtataaccgggtgtcggctttcttggatgatttgaaggagacggaatacgggaaagtatgtgtgttcgctcacggagggacgattcgggcagcgttgatttatgctgggaaatataattttaatcaagcattcacggatgatgtggattacggttccctaatgaaaatgacgatatagggattatttttcttctttcagttttttgcggatgcctcgttcaatagccaagacgaggatgatgaccagcacgatgataatcacgctgatccaagattggtatgataattcggtgaaatcagtcatggctagtttggtgatagcagcaagtatcaagatatacaggcacgtgcgcacgtttcgcaacttcttttcagtggtgagttccgtagttttttcagttgctttcttttcggtttccatgacttggtattttaatgacgagtactgccttgtaaagatatgaaataatattcaaatttatttggggagagaaaataaataaaaaaaaccacccgaaggtggttttgagttattctatcgttttgcttcttctcttcctttcgttttcatcgaggtaaatcttgcgaagcctcatggatttcggggtaacctccacgtattcgtcctctttgatgtattcaagagcctcttccaagctgaaaaggatgggaggagcgatgtttgtcttctcgtcggaaccactggcacgcatattggtcagttttttggacttgcacacgttaatcacgatgtcatcctgccgggtactttcaccgatcacctgtccggcgtaaacctcgtctcccgggttgatgaagaatctacctctatcttgcagtttgttgatggcataagcgaatgaatctccggtttccatggcgattagggaaccgttcgtacgcatttcaatttctccggcgtagggttcgaaacctttcagacgatgggacatgacggcttcgccggcggtggcggtaagtagattacttctcaaaccgatgattcctcgtgaaggaatattaaaggtcagatgtacccgttcgtcacgatgttccatattggtcatgactcctttacgacggttcaccatctcgatggcttttcccgatacttcttccgggaggtcaatggtcagttcctcgacaggttcgcatttcactccgtttacttctttgatgatcactttcggttgacctacctgtaattcgtagccttcacgacgcatggtttcgatcagcacgctcaagtgaagtacaccgcgtccgaatacaacgaatgaatcggccgtcaagcccggttctacccgtaaggccagattcttttccagctcccggtccagacgttccttgatgtgacgggaggtcacgtatttaccatcccgaccaaaaaatggcgaatcgttgatggtgaacaacatactcatggttggttcgtcgattgcgatgggagccagggcttccgggttttcgaagtccgcgatagtgtcaccgatctcgaatccttcgatcccgacaagtgcgcaaatttctccacattgcacctcgtcaactttctgttttcccatgccctcgaaggtcattaaatctttgatacgggttttaaccagtgtcacgccatctcttttacagagggtgacaggcattccggattttaatgttccgcgggttagtttcccgatagcaatacgtccaacgtaagaggagtattccagagacgtgattaacatctgcggagttccttcctgtactttcggggcgggaatatctttgatgattgcatctaataacggggtaatgtctgtcgtgggtttatgccagtcggtggacatccatccttgtttagcgctaccgtaaactacggtgaagtccaattgttcttccgtggcgtctaaggaaaacatcaagtcgaatacttgttcgtacacgaagtccggacggcagttcggtttgtctaccttgttcacgacaacaatcggttttttgcctagggcaagcgctttttgaagtacgaaacgtgtttgaggcatagtaccttcaaaagcgtcaaccaataataatactccatcagccatgttcaacacgcgttctacctctccaccgaagtcggcgtggcccggggtatcaataatattaatcttgtaatctttataatgaacggatacgttcttggctagaatggtgatccctcgttctctctccaggtcgttgttatccagcaatagatcacctgtattttctgtttctctgaataagtttccttgaaaaatcattttgtcgaccaatgtggttttcccgtggtcaacgtgcgcgataatcgcgatgtttctaatcttctgcattttgctcctatggtattaaatccaaatagggcgcaaagttagcattttttttaaagaaaaggggctcaatgagcccctttttttattctaccctgttggcacttcctaaaacgtgtacggttttgtgcttgtataattcttttaatgcatctctggcggggcctaggtacttgcgcgggtcgaattctgccggcttgtttgcgaagacttcacgaacggcagcggtcattgccaaacggccgtcggagtcgatgttgattttgcatacagcagaagtagcggctttgcgtaattgttcttccgggatacccacggcgtcttttaatgcaccgccatatttattgataatagcaactttgtcttgtggtacggaagatgatccgtggagaacgatcgggaatccggggatacgtctttcgatttcttccaggatgtcgaaacgtaatgggggaggaacgaggattccgtctgcattacgggtacattgctccggtttgaatttgtttgccccgtgggaagttccgatggagatagccaatgaatctactccagttttctttacgaagtcttccaccaagtccgggctggtgtaaacgctggctgcggcaaccacgtcgtcttcgattccggccagaactccaagctcaccttctacggtaacatcatatttatgagcatattcaaccactttcttggttaatgccacgttctcgtcataaggaagggccgatccatcaatcatgacagaagagaatcccatttcgatacaagatacgcacaattcgtacgtgtcgccatggtcgaggtgaagacaaattggaatattgcatccaagttctttggcatattcaaccgcaccttgtgccatgtaacgtaatatggtttgatttgcatatttacgggcaccactggatacttgtaagataacaggagattttgtttccacgcaagctgcaacaatagcttgcatttgctccatgttattgaaattgaaagctggaatagcgtatttaccttccattgctttcttgaacatttctctggaattaaccagtcctaagtctttgtaattaaccatagctgctatattttatattcgtgcatcaaagttaagcattaaaaacagagatttgcaaggaaacgagagaaaaatttcaaacgtttgcggagcttgaaaattccctgaattttcaagttgcaggttgagcctgcggctctgcaagttgcaggttacaggttcgaagtgcgaaggtactgttttgtctgaacttgcaacttgttaacctgtagcttgtaacttgaaattacacgggtgaaaaaaatagagtggttaccactctatttcttttaagccgtgcgatttcaaataagcattcgcctgactgaattggtgattgccgaaccagccgccccggttggcagacaagggggaggggtgtacggatttcagcaccaaatgccgttgggtgtcgatgaaggcacctttgcgttgggcgtaggaaccccaaaggaagaaaacgaggttttcttttttctcggaaatgattttgatgacggcatcggtgaaggtttcccaacctttgttctgatgtgaaccagcctgatgggctctcacggtcaatgtagcgttgagtaatagcactccttgttccgcccagcgttcaaggttgcctgacgtggggatgggtttacccaagtcattatttatttctttgaaaatgttctgtaatgaaggtggttgctcgataccttccgggacagaaaaacaaagtccatgcgcctgaccgggaccgtggtacgggtcttgtccgagaatgacgaccttggtttgttccgcgggacaatggtcaaaggcattgaaaatgagctttcccggggggtatatcttggtggtcttgtactcgtttttcacgaattggatcaactcagagaaatagggtttctcaaattcatcttttaagagttctttccaagagggctctatttttacgtcaaccataaattcaattttaaattttagattttaaattctaaacacggattaattttagatttagtgattttagattcttgtcatttattattttagaatttcaagtatacatcaaggttgtttaatttaaaatctaaaattagaacgtttttatctcaaatagttttggccagtgttttccggtaacgtagatcgtgcccttcttttcattgtatgcgataccgtttagaacatcatcgttttggtccagtttggctctttcggaggcggtgagcaggtttggtagtagcagttcctctatcacctcgcctgattgcgggtcgatgatgacaatccggtctgtaagccattcgtttgcccagatataaccgtttatatattccagttcgtttaagttggtcaccggacctttgttgtcgaagacttccacggtttttacgacgctgaagaggttcggatccagatggtacaaattgtgcgaaccgtcactcatgatgagtttgtctcccatcgtggtcagcccccagccttgttccatggagtagtcgaatgtcgttaacagcgtgaaagaggccaagtcgtacacgaacgctttctgggaagtccaggtaagctggtatattttgtccttgtaaaccgtgatgccctccccgaaatattggctgtccaatcccaacatggacagtgtcttgttgttttccaagtcgatcttgcgcaaggtggattggcctttgattccggttccctcgtacataataccatctatatataccaatccctgcgtggaagcatccgtggcgtgggaataggttttcaccagttggtattgaagtgatttcggagccttatccggtttgacgataaaggattgggttgctaccccgcatttgttgttggggtggaacgcgatcactttgagcgtgttggtaccacatttttctttcgggattttgaacacgaattctcgggttgcgctgtcgagtgtagcaatctgttgctggttgaagaacaggtgggcggagtctattttatagtgcttgttgttcgcgtatacaattttaagttcctcgttgaaccgacaggtgtcgaatttcatgggatacacgaattgcacgcttttcacgtatttaggtcccgtcgtattgcggctttgggcgttgtctaccgtaatctggttctggtcccctttactctttttttctccttgacaggcggagagcaacaggagtgaaagtagtatgtagtagagataaggcataatgtataatattttaaattttaaattgtagatttaaaattataaaatactcgtctacaatttaaaattttaaatttaaaatctaaaattattcaaggctccattcgtagccgtccttcgtgtcttttatttgaataccagcgtttttcagctcgtcacggatacggtcggaggtggcccagtctttgttagcccgggcggttttccgcacgttcatcatggcgtcgatcaccttgcctagggcttggttgctggcactggagtcctcttctcctttgagaccgaggatgtcgaacacgaaaccgtggaataggtttttcaacatttccaaattctctgcgttgatcttttccgagcctgccgcgatggagttgatgatgcgaacaccttcgaacaagtgggcgattaatatcggtgtgttcaagtcgtcattcatagcctcgaaacagttcgcttgcaaagtggcgatgtctaccgtgttctcgttggacgctttcagcttgttgagttgtgacacggcagccatcattcgctcgtaacctttctctgcagcctttaatgcctcgttcgagaagtcaagcgggctacgatagtgtgcctgcaggataaagaaacgtacggtcatgggggagtaagcctgttccagcacgttgttgtcgcccgtgaagagctgatccagcgtgatgaagttccccagggatttacccatcttctgcccgttgatggtcaccatgttgttgtgcatccagtattttaccgcctcatgtccttgtgcggccacgttttgggcgatctcacattcgtggtgcgggaattgcaagtccaaaccgcccccgtggatgtcaaacgtttctcccaagtatttctggctcatgcaggaacattccaagtgccatcccgggaatcctacaccccaaggtgagggccagcgcatgatgtgttccggggaagcctttttccacaaggcgaagtcaaatgggttacgtttttcctgttgtccgctcagttctctcgtgttggcaaacaattcgtcgattttacgaccggatagtttaccgtagtgatatttctggttatagcgttccacgtcgaaatagatatttccctcgctttcgtaggcaaaaccgttttcgatgatctgtttgattaattcttgttgctcgatgatatgaccggacgcatgtggctcgatgctggggggcagcgtgttcagttgctccatgtttttgtggtaacggttcgagtagaattgcactacttccatcggttccagttgttccagtttggctttcttggcgatcttgtcttctccttcatccgcatcattcacgaggtgacccacgtctgtgatattgcggacgtatcttacccggtatcccatgaatttaagataacggaataacaagtcaaaggtgattgccggacgggcgtgaccgaggtgagcatccccgtacacggttggtccacaaacatataatcctacgaaaggcgggttaatgggttcaaataactctttttttcgacttaacgtgttgtatatcgttaacttgttttccatgatactataatgctttattgatatgattcaacaaaagtagaaattttctccttgaaaatgacgggaaagggtaaattaatgccttattcttgtcattcatggtttgtttttcgtttgttatgggcttgcatctgttcgttgaacggttcttgtggcgtcgataaatcttcgttcttatagaggagtgttttaacgagagtatatcgaagagataacgaatagatgtaagccaatgtgttgattatgatatgttttgtagttgctctagtttttcttgtatttcaatgcttccgggatggccgcttttagtttggcaatccgtttttcgtcagcaggatgggtcgacaggaattcgggttgcttgcctgctgatgcgtttgccatacgggtccagaaagcgacagcctcattcgggtcgtaaccggccatggccataaagattagtcccaagtgatccgcctcatactcgtgtttacgggagaaggggagagtgattcccacattggttcccatgccgattgcggcggctaggatggcttttcttgtatcactttggttgtgtcctagaatttcggtggcggcagcctgaccgtattgaatgagtgcctgttggctcatgcgctcgttactgtggtgtgccacggcgtgagcgatttcatgccccatgacaacagcgattcccgcatcattctggcaataaggtaatataccctcgtagaaaacgaccttacctcccggcatacaccatgcgttgggttcattgctggcaacgaggttgaattcccattcaaaattagcgatttggttttgcagtccgttagcggcgagatattgttcaacggctttcgagatgcgggctcctacatttttgatccgttgtttgttgacagcgtcagtagataatttgttttctttcaaaaagctactgtatgaggttaaactcatggagaccatttgatcttccgggaataggataagttggtgtctacccgtgagtggcacggtggcacaccgggtgagaaacagaattgctcctatgatgaatgtaatgtgtaaaattgttcttttcataaataggatcattgaaaggttatattttgaatgctaaaatataatacggatttgatatttgcaatgttttattgtttgcttgtttttaaatactctgcttcatgccattacttgagctatgtttactcccggacaaagtgacagttctaacatatcatcttctcaccatgaatacttgtctgtattcatgctgtgttgataccgtgttcatggtatgttcatggtgcagcgaaaggggctagaggcgatagcccaactatggggtattgtcggatggggagcggttataaaatatgtttcacggatgattggcgaaaactaatcggcaagacatattaatatgtaaccgtctccctcgtgatcaatttgtagcgagggatcggctttcaaataaccacgtaaccggctgatgtatttttttacttccggttctttgtttttgtctgctttgccccatgttcctatgatgaggtaggatttgtcggctatttcatggttcttcgcacataataattgcaggaaacgtccttcgttttttggtaatcttttggtaatcccgtctattgtcacttcccgggtgatattgttgtatgtcgtgtgtttcgatagttggtacaggtggggaatgttcatgcatccttttattctatcccgaaggcgtttcatgtgtgcgatcaatacttcgggagagcctttgggtatgaattcgtcggctccggcgtccagcacggcaatttctttagagggttccccatgagaggtatacacgatgatgtgggtttgccggtcattttcccgtatcattcgggttaattccagcccgtctattttgggcatatccaagtcaactaggagaatatccggtttctgctttttgtatgcatcccatgctttagcaccattcggggcaatctctacttcgaaattttctttttcgagaatcattttcgttaatttagctccgtctgcatcgtcttcggcataaagtattctgatcgtggtgtccatgtttttagtgtttatatttgtttttgacattagctcgtctgggtaagttgaccaatatcgcggttcctttgccctcttcgctttcaatattgattgttcccccgtgggcgagaatcacggttcgggcgtaatgtagtccttgtccatgacctttgatttccttgttctcttggtgatctccccggtggtaacgttcgaacacgtgttgtaaatttttagaagaaatgccgaacccgttatcctcaattttgatttgcacgtgtcgggcatccggttctgtacacgtgatatgtattgttacctgatccccggaatattttaaggcgttgtcgatgaaattttggaaaacggccaataaaaaatgacggtctcccgtgatcatcgggtcatctgattgaaaatcgatttgtatgtcgaatagtttatttgcactccagtgatctttttgttgcaatgtttccaacatttcctgaagattaatatccttgatgtttaatcgtaatccgtgagcatctgtcgattgaagcaacatacgattgatagattgtaatatattgtctaattttgctcgaccttgcttgagaaataatgtttgctcttcgggagataaatcacggagcaggtatagtactttaatcacgtcttcgatgggacgtttcaggtcgtgtactaggttgctgataaataattctcgatattctccgctctttttctcgtcacgaatcgttcggcagaggttgatgatgcaaataataagtagagcggtgatcataaaggttataagaatctgcccaatcgttgcttgaataagttcccggtaagaatagtcgtatccggcatatagtgtatcaccggaaatgaaaccgagagttgtttggtatttgggatgaaaggatagtgttgcgaggtgtgccgggtaggaatcttttattttcccggtactgtcctgaataacaaattgtatggaacaatcttttaggtgcatggaatcttgctttgccagcaaatggaggtagagattttttaaggtccatacttgtgggtttcgaatgtcatagtcactttgttctgtgatttgttgaacatcgtcttcttgacttaatcgaaagcttgttgtttttttgttaatataatatactaattgtttttctgaggcattgtaactgacaagatcgccttgagcaacattcgttgatagcatgttaaattcgtaaacggctctagtaattatgtcattttgttgatgtctatattgagttgttacttccttatataaatagtacaagtgaatgagctggttacttaggataatgcaaacagcaagaatgatgatatattttagatgccgattcatatttgagtttatattttcaaagttacaaagaaagcaacctccaagcaacctttttattcgttttttgaaaaagaatcacccatctttgtcgcaaatagaaaataaaatgtgtcatgcagaataaatgtttgaaaattgtggtgttcttgttgctgatggcgggagtcgtcgttggtttaaaccgaagtattcgtcaaaaaacgaattgggaaattttaaagatggaaaatgtcgaagctttgacttctcctgaagaggataacccgtattacccttgtgtacatgcaaccggattttgtattatagctggtgtcaagataaaaggtatagcattaactaaacaatgaaaaagtttttgtacgtgctattcggaggcatcttgctcgggtgctccgatcgttacatgggtgacgaaagcatgaatatggtaaagagcgagtgtgtaaaagtagttcgtttgacggatttagctcagaccggaatttatgatgtgagcgggtttatcaagcaagggaataaattaatagtagggacaacatacatgaaggaaggggtggcacgagctcttgatctagagagtcctttacaagaggatttgtctttggagaaaggtaattcttcaaggtgggttcgagcgttaagttctttcaattcgtttgacgggaaaagtgtgacagcgttggattttagaaccggagaattgatcgagaaccccatatccccgcttacacggggtacaacggaagagacgattgtacagcttcccgaaggtgagcaacatttaatagcggtgaagacagacgattttgttatctccacgggcttttacgcggaggggcgctatttgctttactctttggctgacggttcagcccgttattgcttgtcttatccggattgtccggaatatccggatttgcaggagaaaacgaaaggaatgttatatgctagtagtgttttacgggttcgtcctgacgggcaagcgttcgtgtgtgcggatatgtatagcggtgtgattgatttttgtcgattaattccgggaggcatcgaacgagtgaaactggaacgtttgagctatcctatgacggagatttcagaaactcccgttccccgtgttttgtataaacgagagaatcgttttggttttatggacattgcggtgacatcggagtgcgtgtatgcgctgtattcgggtaaaacttacgagagagacaggcagggagcttttgaagggaaccgtttgcttgaatacgattgggaggggaatttggttcgaactcttgatttcaatgttgctttaacggggatcacttatgattgtgatgaaggggcattgtatggaattgccggtaatgccggggtatctctggttaagttgagattgtaattattttgaaaaaaagatattgagctgaaaatatgaaattgattttcgctattttattattttcgatattaggtgtcacgatgacgggttgtcatcgagatgtggtcgtggttcccatgctcgtggatgtgaatagtgctttgaaattgagtggggataatcggggagaacttcaaaaggtgttggattactaccgtgaagaaaaacccgattcaatgaaattgaaggcggcagaatatttgatcagtaatatggtggcacattatgccgttgcgggggagacgatggacaggttaaagcgggatattgattccacgttacgggatcaaccttgtgcccttaaattaatgttttacttggtggcagcccgtattgttaaggaacgaggggattacacggttgaatatgatctgcataaaatcacgtcggattacttgataaggaatatcgagcgttcgtttaaaatttgggaagaaatcaagaatcattatgatttgtcgtgtgaagatttttttgaatatgtattgccttacaggattaacgatgaacctttaaccgagtggaaagatacggcttattattacttgtatgatttctacaaaggagagaatatgggatttagtttgagtagttatgcgagttatgtttctgccaaggtgaacacctactatggcttcgggacatttaaaagtcaactgtcggattcgttgttcaaaaagtacaggatggattgcattgataatacttatagtacgcgaattacaaatcaggtattcggtatcccgacagctgtggattttgtgcctcactacccgacgcgggaaaatcgccattactggacgattcttcgtgatcatcgtttcgtgaatagtaagtattattattcaaatactccatacacggctaaagtgtatcgtaaaactagttttataaacccgataccgaaagataaaaataattttatcccacattttattcgtgatccctacaaaatggatgtgacggaggagtacgagaatgtcactaatttggagtataaatttaaaatgtgtcggccggatacgaaatacggttacctgtgtgtgttcaataacttggcgtggaatgaggtcgcttggagtgagatgcggagagggaaagttgttttcgagaagatcggtcgtgatatcgtgtacatgccatgttactatcatggcaacagtcaggtgtttgctgactacccactgtgggtaaggtcgaatggcgaagttgaatctcttgttcccgataaagagcgtttgcagaaattacgtttaaatcggaagtttacttataactcgtcgggagattattgtggttcggcgatcatcggggtgcagatacgtgctaccaacgatttgtcgaaagaaccgtacgattcgatagccgtgatccggcattataactacatggcttacgatacgttacatgtaaacacaaccaaaaagtataaatactggatgttgacgaaagaacgttacagttatcccgagttcgcatcggttaagttcgttcagaagggtggggatgttttgaatgctgaaagtacttttacaattgatgctgcgggcaagatggataaggatggattactttctaaaaatatatttgatgatgatttactggattatggaaccttgcccaaaatagccggggtagaatttgaagagccggtatcggttgatgttgtaaagtatataacccggaacgacaaaaatggagtatatcccggaaatacctatgagttgttgtattttgatcaaggcgagtgggtgtcgttgggtaggaaagtggccacggcagattatatcgaatatgatgatgtgccttcgggggcgttgtactggttgcgtaatcggacagaaggaaaggaggaacggccatttaccgtgatgaatggacgagttagattctggtaaaatataatgtttaattaataaaaagaacggaagatagaataagaaataggaattaatttggacggaacggatgaaaaaaaggtagcctttccatccgtgactttatcgaaacaaggttttgaatcaagttgaatagaaaggactacacaaacaaacgtacaatgataacgaaaagaagagtcttttagttataaaaaaattgaaaatatgaaaaaggtaaaaattttagttgcatcagttttgttctgtgcaatggggtatgtgggttatgctgctcacgaaaaaatgacaacgaccgaggcggaggaatttatgaaagccaatattgaagcgctgacttcaggtgagcctggtggtggtgaagttgttaaatgttattgtaagactgggttattcagtggtaaaatttgttctacaaaaggtaaaggctcgtattgtggtggtaatccttgctctaatggtgatggtaattgtagataattattaaaatctactgtataaaatcatcaacaggagttagctacgattattttatgaaatagtcgtagctacaaataatgtgtaattacgattaaattatattttaaaaatatgtataagtttgtttgtttcgttattatattgtttttgagtgtttcctgtaaagaagaatgtaatgtgattcatatgggagagaatcattctaaacgttataatgttgaggttgatactatgtgtataaatgttggaaattcaagtggtatggggaatttttattttaaagactcgataattacttttgttgatgcgattaattgtacattttatgacttgaaccttcatggacagttgattaaaagctattttggaaaagggcatggagacaatgaaattagggcgataatgtatgcgtttccgattgaaaacgatccattgaatcgaggggtaattgttgataatgattatttgatcactatttttgataggaaaaataggagaatagattatactacaaaaatagattttggtaaggtaaataaacggcataatcaatacaaatctccgagcttgtatcagatagttgactttacagattttggagtgtcattttatttggattccgattccctgttaatatttccggttaatgttgatgatcatgtggcagttcgttccgatagaatagataatgaaagatatgaagaaggagcgatttttggtaagttgaatttatctacgatgaaagttgaacatgttgtgggcagatttcctgaaatttacaagcataaaccgatgccacacatggaattttttcaatatgcaatttcaaatggtctgttgtatgtgaatcatgccgtggactcgttaatatacgtttataaacatccagatgatttacagtatacaattggttacgagtgctcagggattgatcgtaactatacttctaccaagtctattgatcaaaatgaaagctttgagagcgatatgcaacatgtagggtttaattcgggcttactattttgctttgaaaataatacattgtgtcgtacatatataaaaagtgcagagacaggagaatcaggtttacagatatataaaaataatgatttgatcacagatgtagaaatgccctcttatttcaagttattggggtataaagatgggtattattacggggttcgtttaatccctatagaagaccttgattctacatatctaatcttgtatagattaaaaataaatctagatcattaaaataaagtcgaattaatatttttttaaatgaaaataatttgtttg

SEQ ID NO: 10763 - DNA, 11955 bp, Unknown
  gut microbiota DNA sequence
tagaaaaaataaaaataaagtttttacatttgcgatactaattacaagatgtttatatgttactgtcagaactgaaaaccggagaaagtgccgttattactaaggtgaaaggatatggggcctttcggaagagattaaacgagatggggttcgtgaggggcaaagtggtgaaagccgtgaagaatgcccctttgaatgatccgattgaatatgcaattatgggttatgaaatctctttgaggcgacaagaagcggcatttattgaaatcgtgtctttagaggaggctactaatattgtcagggtgtccggaagtgcccgcaatgcggaagaagctttcgccaagcactgggaaggtcgagataaacatatacatgttgcttttgtcggtaaccccaatgcgggaaaaacaacactgttcaactacgtgagtggttctcaggaacacgtgggaaactacggtggtgttacggtagatgcgaagagtgccacgtttcgatttgaaggttacgagtttaacgtggtcgatttaccaggaacgtattctatttctgcttactcgaatgaagaaaagtatgtgcgggaatatattatgaataacgcacccgatgtggtgattaacgtggtggatgcgtccaacttggaacgtaatctctatttgtccacgcagttgattgacatggacgtgaagggcgtgatcgctttgaatatgtatgatgagctggaacgttccggggcaactttcaattatcaggagatgggacggatgatcggtatgccgatgatgcccaccgtcgggtcaaaggggaaaggaattaaggagttgttacaggaagttatcgaggtgtacgagggaagaagtgaaacggtacgccatatccatataaattatgggaaagagattgaggacagtatcgtggccattcgagccgagttgaaagatgaaaaagatttgatctgtaatatgtctccccgtttcttgtctctgatgttattggaaggggataaagacgtgttggaattcgtgcaacgagatcattcacgggagaaattattgaaggtcgtaaaagagggtgttgaacggattgaaacaacctatggagagaaagtagagtcggttgttaccgatacgaagtacggttttatttccggggcgttgaaagagacgtacaaagaaagtcccgtgaatcgaaggcgtaaaacggagtatattgatgctattgtcacgcataaattgttcggattcccgatcttcttgctattcctattcgcaaccttctttgccacgtttagcttgggaagttacccgatggaatggattgaaaacggggtaggggctttgagtgagtttgtcgataaccagatgagtgccggtcctttaaaggatttgttagtggatggtatcattggtggcgtggggagcgtgatcgtgtttttaccgaatatattgatattgttcctgtttatttctttcatggaagatacgggatacatggctcgtgcggcatttattatggataagttgatgcataagctcggcttgcacgggaaaagttttattccgatgatcatgggattcgggtgtaacgtgccggcgatcatgtcaacgcgtatgctggaaaaccggagtgacaggatattgaccatactgatcaatcctttcatgtcttgcagtgcccgtcttccggtatacatactattggttggggcatttttcaaaaattatgcggcgttagttctttttgggatatacttgtttggaattctgactgctatcgtgatggccaagttgtttaaacgggtacttttccacaggcaggaagtgccgttcgtgatggaattgcccccgtatcggatgccaaccttgagaacgaccgtacggcatatgtggagtaaaggcgagcaatacctgaaaaaaatgggaggtattatcatgtttgcctccatactgatttgggcgttgggctattttcccgtggacaaagagctggaggctcagtatgatgaaaagaaggctgaagtgacgagagcttacgaggcaacgatcgcttccgggatcgggaacgtggatatgttgaaggaagaacaggaagcgaaattggagagcttgcatcgacaagaggtaagtgaacgtcaggaaaattcttatatcagtcgattgggacgaactttggagcctgtctggacaccgcttggttttgactggaaagctggcgttagtttgttgaccggggttgcggcaaaagaagtcgtggttagcacgatggccgtcttgtaccagggagaagagattatggaggaggatgacagggcgaatgcgacattggaaatgcgtttgcgtgaacatggttttaccccggttacagccattgtatttgtgatcttcgtgttgctttattccccctgttttgcggccttgattgctatcggtaaagagattggaatgaagtgggcatttttcgtgatggggtacacaacggtactggcttggagcgtgtgtttcgtgataaaacaggtgttggatttaattatttagagtgtccccatattatgaattattaatctaaaattggagaatggaaatgcaactaatattgacatatataattgtggcgatagcacttgtttttgcgggaagaggtacttatcgtttgtttcggaatgcaaagaaggggaaaggatgtaattgtaattgtggttgcgggggaaaaagaacgaataaaaaaagctgcttgtaaaagcagcttttttatattaatgcttgtgtctgcgctcgtcagaaacagtcaatttttttcttcctttagctcttcttctagctagaactgctctaccgttagcggtagacattctttctctgaaaccatgtttgtttcttctctttctgttggatggttgaaatgtacgtttcattgcaatatttcttatgttattattttctcacttcggactgcaaaagtaggtattttttttattgtgccaaagatttttgcaaaattatctcgattcaaatggtgttttattttaattattcgaatgatttctaaattactggcgtatgttttaattaaatggtgttttcagacaacaaagttaatatatccccgtatatttcttcaagtagatacgaaaaaaagagttctaatatttgttttactgaaatagatgattaactttaagccaattatacgaagagacctatgagacagttaaaaattagcaaacaaatcactggcagggattcgttctcgatagagaaatacttgcaggagattgggaaaatcgacgtgttgacgccggatgaggaggttgctttagccaagaaaatccgatcgggggaccgagcggcacgggagttattggtgaagagtaacctgcgtttcgtggtttccgtggccaagcaataccagaataacggtttgagtttgggggatttgataaacgagggcaatctggggttaataaaagctgctgaatgctttgacgaaacgaaaggattcaagttcatttcttacgccgtatggtggatccggcaatcgattttacaggcaatcgctgaaaattcccgcttggttcgattaccattgaacaaaatcagcagtattaacaaagtgaataaattctttttccggttggaacaggagtttcaacgagaacccacggcagaggaaatcgccttgaaaatgaatgttcccgagaaggaggttaaagacagtttgcggattgccaatcgtccgttatccatggatgcgcccttgtcggcagacgaggattcttccaacttgtatgacgtgatgattaccggggataatgccatatcggatgccgaacgggagatgaatgccgattcattgcggacggaaattgatcgttatttgacgattctggatgaacgcgatgctttaatcttgcggatgtattacggcttgggtggttatacagcaatgtcgttggaagaaattggcgatcgggtaggtctgacaagcgaacgagtacgccaaattaaatctaaggctatcaagagactgaaaaactcgtgccgtagtaaacggttgaaaacgtatttataagaggtcggtaaattttccttttggtagaaagttctttactccataaatttcatgtttaatttatggagatatgggggttgtttgagaaattttgactttctatcttttcttctgatgatacatttcatgtaaaatttttttgtgttagagggaattgtgagatgggtaatattcttttagattgttagtatctgtattttatctacttgcagtctgtaactaaaatatgtttataaagttagtttttccaactaaattgctatatttgttccccgttttagcgggggtgttttgagtgatcggaaacgtttgaaaaacgggtcttgtcagtcatgaatgtttggctcccaggagcgttagaaagagaggggaattattattatgaacacattaataaacgagaaccttatgggaaactatgaattgaacaaaaatttggcacaaatgctaaaaggtggggttatcatggatgtaaccaatgttgaacaggcaaagattgctgaagctgccggagcatgtgctgtaatggcattggaaagagtgccgtctgatattcgtaaagatggtggcgtggctagaatgtctgatcctcagatgatcaaggctataaagaatgccgtgtctattcctgtaatggcaaaagtgagaatcggccacttcgtggaagcgcaaattttggaagccattggcattgattatattgacgaaagtgaagttttaacgccggcagatgatttgtatcatgttgacaagactgcgtttaaagtaccgttcgtttgcggatgccgtaacttgggagaggctttaagacgtattggtgaaggtgcctctatgattcgtacgaaaggagaagccggaaccggaaacgtggtagaggctgtaaggcatatgcgtcagttgaacaatgatattcatcaggtacaagtggctccggtagaggctttgatgacgattgccaaagagatgggagccccttatgatttagtaaaattcgtgcatgagaatggtaaattgccggtggtaaactttgcagccggtggtattgctactccggctgatgcagctttaatgatgcagttggggtgcgagggagtattcgttggttccggaatcttcaaatcaggtgatcctgccaagagagcgagagctatcgttttagctacgacttattataacgatccggttaaattggctaaattgtcagagaacttgggagaggctatgtccggattggaaattagcaaattggaaaacaaatacgctgaaagaggctggtaagaatagtttataaagttcataaggtttgtaaggttcataaggtaacttgctttatagattttatgaactttatgaaccttatatttttttgtcatgaagaagattggaattttgggctttcaaggagctattgttgaacatgaacgccagattaaagccattggccatgaacccgtgatcgtgaagtacccggggcagttggaagagatagatggaatcattctaccgggaggggagagtaccactatgggaaagattcttaaccgcacggggcttatggagcttttacgcgggaaaatccagggtgggctgccggtatggggaacttgtgcgggaatgatcttgctggccaaagaactcgtgaacgattccgtgactcatttgggcgtgatggatattgccgttcggcgtaatgcttacgggagtcagatcgacagttttgccacgaaaaaagtgattccggaggtagattcaaaagagatcgagctggtgtttattcgtgctccttatattacaagcgtgaaggaaggggtaaaagtgctgtgtgagcttgatgggcatatcgttgcagcggaagaaaagaatatgttggtaacatctttccatccggaacttacagataatacggcattcttgaaatactttgtatctaagatttaaaaaggctgtttttaaaacagccttttttcttatagatttgcgtttaattcttctacgctaagagttgctgtcccgattttctgaacaacaattccggctgccacgtttgcgatgcgcatggcttccgtgatttcctgaccttgggttaaggctagtgaaagggccgccacaaccgtgtccccggctccacttacatcaaatacttcttgagaatgtgtggggagatgcaaaatattttgatcggaaatcaagctcattccctgttcgctccgggtgacaagtaatgccgataaaccgtagcgatgaacgatttccaaggctgctacggcaatctcctgatcgttatttttcaccgggtggccaatgatgtcacctaattcttttacattaggagtaatcaagtcggcccctgtatatttcttccagttttgccctttcgggtccacgataacacgggttctatgtgattttgccgtttttatcaaaaacgaacataattcttccgaaatcatgccttttccataatcagaaataacaagggtagggaactcttggaagagtgaagcaagatggatttggaaatcttctcttgctttttcagaaagctccaagtgttgctcgtaatctatgcggacaatctgttgcctaccaccgatgatgcgcgctttcgtgatcgtgggttgctcggttttgacaaaatcagttttgattcctttccggtgagccatgcgttcaatctctttcccgaaaaagtcatagccgatagccccgcataacgtggcctgcccgccgagactcgtgatgttgttggccacgtttgaggcaccgcccaagcgtgattcctctgtcacgatgtttactatcggaactggagcttccggggaaatacgttccacctttccgaaatagtatttgtcaagcatcacgtccccgacgatcaatatcttgcaactattaaagtttaaatccatctattcattttagattttagatttatgattttagattaaaaaaaaacagggttgtatatttgtaaatcgtaattcataaatcataaattaattgcttctattcttctccgccaccgaacatcatcaagtaggctttaatgaactcgttgatctctccgtccataactgcctgcacgtttgatgtttggtagttggtacgatgatctttcacccgacggtcgtcgaatacataactgcggatttgtgacccccactcgatcttttttttcgttccttccactttatcccgttcttcctgacgcttttgtaattccagttcgtacaattgggctttcaataaacgcatggcattttcacggttttgtaactgtgagcgcgattccgtgttttcgatcatgattccggtaggagcgtggcgtaaccgaactccggtttctaccttgttcacgttctgtccgcccgccccaccacttcggaaagtgtcccagctgatgtcggcagggttgatcgtgatctcgatcgtgtcatccacggcaggataaacgaagacggaagcgaaagatgtcattcgtttattggccgcgttatatggcgataaacggaccaatcggtgaacaccgttttctgatttcagatacccgtaagcatagtctccctcgaattcaagtgtggctgattttataccggcctcttcaccttcttggtaatctacatgttttaccttatagccgtttaattctccccaacgaatgtacatccggtacagcatactggcccaatccatactttccgtacctccggcaccggaattgattttcatgatggccccgaagtgatcttcttcccggcgcaacatgttgcgcatctcgatgtcttccagcacccgaatggtctcttggtattgggcatccacttcctcctcggttgcttctccctctttggcgaaatcgaagagtacctgcaagtctcccacggcggaggtcacctgctcatagccttcgatccaagatttcaattctcggacttttttcatcaaggcctctgcttccttgggattatcccacagagacggattttgtgttcttaattcttcttcagcgagttgtatcttcttgccatcgatgtcaaagatacctcctcaatgcttcacctcgctctgccaattctttgatatggtctattgtgatcattgtgtattaagtttataaataaaattcgtccctccatacgaagggacgaatgattcgtatatgttatctcacttgtcttgactagccatcgggaaatttttgtttacccgcttgctggttacaggtcgtccgcttagcgtgctttctaccatgtcctgaatttcttgggcaaaagcattttccccgtttcttctggccatgtccacgagcatctgcaaagcttgcatgcttcttctttcgtcattctccagagcttttctacgattcggagaaagtgatccgatatatctcaacgtttgcgcattgtcaagagccaaggcccaagccagatcgttccctttctcttgctcgccggcagcgtagtaaatcgagatgtaatttaacaagaaaaagtcggccggaacttgatacaatggaatttcttccagagacttgtctagcaccctaatggcttcttggattttagtagaatcagtgatttcattgataatcgtgtctcccataacacgtgtttccgtggccgcttcttgcattaattgttctgccaaacgcaagaatgtgttccggtatttcatcacggcgatggtgttatcatggaaatgatcgatatttactttcggatccttgatgtttccccagacgaatttattcatcaggttgtcatacaggatctccgtgttgattcgtccaaaatcatagtaagcggcgttgttttcagtcttgatgggtacaacccggtaagcagctccttccagttggaagtacttgtcgaagcccatgtaactgtcttgtcccattcccaccccgaagtatatcggacgttcccagttattggtggccaatatatccagtaccattaattgtgatttggttagggaatttccttttaattgaatctctactctgtcaacaatcaaggcagaatcttcgggttgtacggttccattgaccaacactttttccttgtccacgggaatatacaggttgcgtgtcggaataaagtccactgcacccccttgataacgattggatttagtttccggtctgtcactggcaacgaattccatgacctctttcatgctgaaaggttgttgcacccgttcttcaatagtgacaaaatcccgcactccggcatggtattggtctttcgtgaaagaaatgggtaccccgtcactttcgtaagctttccgtttcatctgatcgatgtaccagtctccggcaagcaaactcaagttcacgatgcgtacatcccggcggaaaccttccacttcctgtgcataccatagcgggaacgtgtcgttatccccgtaagtgaacagaatagcgttcggtgcacacgaacttaagtagttcttggcatgagcaatggttgcgtagcgtccgtcacggtcatgatcgtcccagttttgtgctgccatgtttaccgggaccgcaaaaaggcaaacagcggtgacaatgatcgccgcgttacgggaatccatcttcttctgaagtaaatcccacaggtagagaaccccgaaaccgatccagatagcaaaggcatagaacgatccggcataggcatagtcacgttcccgaggttgatacggatattggttcaagtagagtacgatggcaatacccgtgaagaagaagagtagcataaccacccagaaatctttctttccttgttttccccgttgatattgatagaacattccgagtaatccgagaatgaacgggagcatataatatttattatttgctttgtcgtgtttcaaggtgtccggcattaaactttggtcaccgaccaagatgttatctatgaaaggaatgcccgatatccagttgccatagcggaagtctccatgtccctgaatatcattctgacgtccggagaaattccacatgaagtatctgaaatacatgtgtccgagttggtaacggaacatgaaacttaggttttgtccgaaacttggtttctgaacgggttgtccgtccaccatgtacacggggcctttgggttgtcccacccactcatagtatacttgaggttcgcgagcttggctgtacatacgcggtaggatcgtgcagaagcgaggatcgtatttgacttcttttttatgatccacgatatcatatttacctgttttctcattttgataataaacaggtccggcatcctccacgccgataaccggggcattgaagtaaggaccgtaaaccaatggctcttgaccgtattgatcgcgactgatataagaaagcaacgagaacacgttgtccgggctgttttcgtcgatcgggggattgcttacggagcggataactaccatggcatagcaggagtacccgataagcatgaccacgaaacaggttaagatcgtgttcacaaccgtgtggttgtgttttaacgtgtaccggattccgaaagtcagtccggcgattaagagtaacgcatagatgacaacacccgtattgaaaggcattccaaagccattcacgaacagcaattcaaaccagccggcaacgataatcacgcccgggataataccccacatgatcacgcctagtatgacgatagaaagggctgcagatttgataataccccacttggtggtttcgtattttttgaaatagtatatgaatacaatggcagggattaccagcaagttcaacaagtgaacaccgatggatagtccgaccatgtaggcaataaagatcaaccagcggttggcgtaaggttggaatgcaacattttcccatttcaagatagcccagaacacgacagccgtgaacaaagatgacatggcataaacttcaccctcaacagctgaaaaccagaatgtatctgtgaacgtgtaggttaatgccccgataagtccggcacccatgatcccgcacagttgtcccatggaacattcttccccttcttttaccacgacttttttagccagatgcgtgattgtccagaacaggaacaggatcgtgaacccggaacatagagccgacatgatattgatcatgtaagattgtgtttcagggctcggtgcgaatatggcgaacaatcgcgagataatcatgaatagaggcgctccgggagggtgtcctacttgcagtccgactgaggttgtaataaactcaccacagtcccaaaggctggctgttggttcgaccgtaagaatgtaagtaatactggccaccacgaacgccacccatccggtgacattattgatcaacctgtagcttaatgttgggtgatttttaatgttgcacatgcttctccttcgtttgaatttgtatttcttattaatattcaaggctataataaaaatgtcatttttcgacagcacgaaaatagcaattttcttttaatttttctgcattttgttttggagaaataaaaaaatgctctacatttgcagcgtcaaaataacaacagcggttgttgaaacgacataaagattgtcccattgtgtaatggtagcacagcagattttggttctgtcagtcaaggttcgaatccttgtgggacaacaaacatgaagagggccttgcagcggggaagttgcaaggttttttcttccagttcttcgatattatgcccaggtggtggaattggtagacacgctagtttcagggactagtggccgtacggctgtgcaggttcgagtcctgttctgggtacaaggtggtctgataatcaagtgattgtcagaccattttttattttatagggctcacgtgaaaaataaggtggagcagtttcgaaagtattatcttcgcgtgtttactaaatatgacacgat

SEQ ID NO: 10764 - DNA, 19327 bp, Unknown
  gut microbiota DNA sequence
caacttttatcgctatgttcctaatattcaaataaataattttaatccttatatcgaactcacgttatttacatccttacgagtgataaattgtcgatcgtaaaagcggacacagtgattcaaaaatacttcaatattagcggtaatgatggatcgactatgtttatcgatagcgtgttccaattcctcccggatctcttgaaaacaattaatcacgatctctcgttcccggtcagacatatgaagagcctcgttcgcctcgtaagagaaaaaagaatagtccttcatcttgcgccccaaagacgtccccaataataaatcgggatggaaaagcaacgcccatcctttcacctgtatcctagttccattatcatcatcccccacgatttgaccgggtgcgataaaaactaaagtaccttcctgataatcgtacatcttgcgtccataacgaagatccccacacttgacatctttcagaaagaccgtgtaaaaaccaaaatttttacgagccaaacgaaccggaggcacttccgacaggtcaatcacgctcaccaaaggatgcaacgtttttactcctaaaaattcatgataatcatgaatcgtattcattttcaatatttcacccataacattcaaggcttttgtttaaaacaaaaataacaattctcattcaagttttttcactggatattcaaaatcagtaaaaatggtacacatatctgtaatttatctacacacaatccccgccaccccctatatatttgtattacaaaataaatggacaactttataatatatcatgatgaaaacaatgtattttttaataattgcaacagttatggcaacatttagcatgaatgtagaagcacaaaagacttctaacggaaagaaagtactggtcgcttatttttcacgtagcggaaataccaaagcgatagcgagtcatatcaaagagctgacagggggagatttattcgaaattcagacagcaaaaccatacccggcagattatcacgcttgcacggaagtagccaaaaaagaaaaaaatgacaacgcccgccccgaattaaaagagaaagtgaaaaacatagaagaatacgatattatcttcatcggtttcccgaactggtgggggacaatgcccatgccgatccttacatttttggaaagttacaaattggaaggaaaaatcgtgatcccattctgcacgcacggtggaggcggcgagcaaagttgctttagagatttcgtgaaaaacacgagcaaagccacgaataaaaaaggatttatcactagcggaggagcggcaagctcggcacgtccgcaagtagaaaaatggttgaaagaaattgatattataaaataaaaaatcattttaaacttcctcccccttcggggtgcttcccctcaggcaggagaagaaggagatgtccgaaggtcggaggagtttacatagcgacaagcggaactctaccgactttacgaatcccatagccatgaccatccccccacagaaaatagaatctatcagtcagctaaacacgctaatcgggcaaaagacattgcacccgctcctaagcattattgacctagccgaagctacacgcctcgatcaactctctatttccggtgatttctacgctctattcttcaaacaagtacaatgtggagatttcagattcggccgcaggtgtcatgattttcaatcctgcacgttagcattcaaagctcccgggcaaactattgacatcaaccgacatgacgctccggaacagaccagcattttaggcatcacattccaccccaaggttttcaacgaaacaccattgatctgtaagaaatccgaatactcgttcttctcctaccaggaaaacgaatcccttcatttatccgaacgggaaaaacaaattatcctgggatgcatgagcaattttcagaaagaattacaacgagacattgaccggttcagcctccgattgctagccgtacatctcgaattactcctagattattgcctacggttttatgaacgtcaattcatcacccgttgtaatataaataatgatattttggcgtatttcaatcaacttttggaacaatatctccaagcggaacacggggtaaaaacggaattacgctcgatcgagtacgttcatgaaagaatcccccaatctattgcctatctcaatgatctcgtacgggtagaaaccgggaaaactctccgggaacacgtgcgtctgaaaaaaatagacatggcgaaacacctcgtaacaagctcgaataaaacaatttcagaaattgcactcgcattaggctttcccaatacccaaacatttctctgcctgtttaaaaaacttgtaggttgctctccaaacgaatacagacagcaagggaacaataaacccaattagtccctacacgcactctttaaaattgattctcagagaaataatcatatttttttgaccaagccgttggtttttatcttaaaatttcataatttaataccgcaaattcagaggcggtgacagatatttattttcgactacgtaaaatgattctcaataaagaattatttccgtttttgtgttgaaaatatttcatttattgcccagaatgatataaatttgacaaatcaatgcgaatgtgttaaatatttaactgaaacaatataaaaatgcttcctatgagtaaatttatttctatcgaagaggctgtatcaaaagtaaaagatggtatgaccatcatggtaggcggattcctcgcaaacggaacccctaacaaaatcgttgatgcgttagcaaaatcaggtgttaagaacctgacgttgatctgtaatgacacggcttacccggacaaaggagtcggtcaattgattgccaacaaacaagtaaaaaaacttttcgtgtcacacatcgggacgaacccgcacacgagcgaacaaatgaatagcggagaacttgaaatcgaattctgcccgcaaggttcattggcagagcgtgtacgtgcaggaggttgcggtctgggaggaatcctaactcaaaccggaatgggaaccatcgtggctgaagggaaacagatcgtcaacgtggatggcaaagactatttgttggaaaaaccgttgagagccgatatcgcattggttggtgccagccttggagacaaagccggaaatctggtttaccggggaacatctcaaaatttcaacccgttaatggcttctgccgctgacttggtaattgcagaaattaacgaactggttgaagtcggcgaaatcgccgcagagaacgtgaagacaccgtcaatcatggtggacttcatagttaaataattgacgatttttgattaaaaattatcaaatcgcccgattaataaaattcaaaattcaaggaaatggaaaaatcaatgataagattaagaatgagtgcaaaagacgctcattatggtggtaacttagttgacggcgcacacatggtacatttgttcggggatgtggccacggaattattaatcatgcacgacggtgacgaaggtttgtttgttgcttatgacaacgtggaattcttggctcctgtttatgccggagattatatcgaggctaccggggagatcgtgaaagtaggaaacacctcccgcaaaatggttttcgaggcgaagaaggtagtcgctgctagacctgacatttctgcttcagcagcggatgtactggaagaaccgatcgtggtttgccgtgcaagcggaacctgcgtggtgaaaaaagaagaccagagaaagaaataatctaaattattattatggagaaattaattatcacagcagccatttgcggggcagaagttaccaaagaacaaaaccctgccgttccttatacagtagaagagatcgtgagagaagcaaaatccgctgtagacgcaggcgcagctattgttcaccttcacgttcgtgaagatgacggaaccccgacccaaagcaaagcacgcttcaaagagtgtatcgacgctatttataaggtttgcccggacgttatcttgatcccctctaccggaggagccgtgggaatgaccgcagaagaacgtcttcagccgacagaacttttccccgaaatggccactctggattgtggtacctgtaatttcggagacgaggttttcgagaacaccatgcctatgatgagagatttcggaaagagaatgttggaaaacaatatcaaaccggaatacgaatgtttcgaaatgggacatcttgacaccgtattagccatggctaaaaaaggtcaggttcccggagccccaatgcagttcaatttcgttctcggcgttcccggatgcactcctgccacggtaccgaatctttgctggcttgtaaacgcaatccccgcaggttctacgtggacggcaaccggaatcggtcgtcatgccttcactcttgcagctcccgctatcgcaatgggcggtaacgtgagagtcggttttgaagacaatctttacctggaaagaggtgtactggcgaaatccaatggagaattagtagcaaaagtagttcgtatcgccaaagaattaggccgtccgatcgctacctccgcggaagcaagagagattttaggattaaaaccgttaaaataatcgatttataaattttcaaatttaattatactatgcaaaagaaaggaaataaatacggaacccaccgtgtaatcgaacccaaaggagtattacctcaacccgctaacaagattgataacaacatggacgagatctacgataacgaaatcttgatcgacgttcagacgttgaatattgactctgctagcttcacccagatcgaacaacaagccggtggcgataaagcaaagatcgctgagatcatgatggacattgttgcaaaacaaggaaaacatcgcaacccggtaaccggatcaggcggtatgttgttaggtacggttgaaaaaatcggtgatgccttgaaaggtaaaattgatttgaaagaaggtgataagatcgcaactttggtttctctttctttgactcccctccgtattgacaagatcaaagatattcgcccggacatcgatcaagtagacatcgacggtaaggctatacttttcgaaagcggtatctacgcaaagatcccggctgaccttcctgaaaacttagcattgtctgcattagacgtggccggggctcctgctcaaaccgctaaattggttaaaccgggcgataccgtgttaattatcggtgcaggtggaaaatcaggtatgttgtgctgctacgaggctaaaaaacgtgcaggcgttaccggtaaagtaatcggtttgtgccacagccaaaagagtaccgaacgtttacagaaacttggtttctgcgactatgtattctctgccgatgcaactcaaccggttccggtaatggagaaaatcgaggaattgaccaatggcgaaatgtgcgacgttacgatcaacaacgtgaacatcaccgatacagaaatgacttctatcctttgcacgaagaacacgggagttgtttacttcttctctatggcaaccagcttcacgaaagcagctcttggagcagaaggtgttggtagcgacgtgaccatgatcgttggtaacggttacacgaaaggacacgcagagatcacacttcaagaactgagagaaagcgaggctttgagaaagatctttacagaactttacgcttaataatttaagatttatgatttacgattggagattttcaatcgtaaatcataatccgaaatttaaaatctaaaatttaaaattagtcgatggacaagggttgtagatacggaacacacagggtaattactccggaaggcacacttcctcaaccggcattaaggctggataacacgatgagcatttatgacaacgaattgttgatagatgtgcaaacattaaacatcgattcggccagttacacgcagatcaaaagcgcttgtaacggggatgcgaacaaaatgaaagaaatgattctttctatcgtggcagagagaggtaaaatgcaaaatcctgttaccggatcgggtggtatgctcatcggaacggtgaaagagatcgggcctaatttcccggacaaatcactgaaaatcggagacaaaattgccacgctggtttccttatccctgactccattaaaaataaacaagatcaaacatcttgatccggcatcggatcaggtagacgtggatgcacaagcgatcctatttgaaagtggcctatacaccgtgctaccgaatgatattccggaaaaactggcattagccgtgttggacgtggcaggagccccggctcaagtagcccgtctggtaaaagaaggagatacggtatgtatcatcggagggggtggaaagtctggagtactttgttgctaccaggccatgaaaaacgtcggaccttacggaaaggtcatcgtggtggaatactcggaagagaacgcccgaagaatcaaagatatgaatctcgccactcacgttattgtcgccgacgcgacaaaagtgatggacgtgtataaaaaagtgactgcgattgcaggggaaagaggttgcgaggtaacgattaacaatgtaaacgttccctcaacagaaatgacctcgattctagtcacgaaaggacaaggatgcgtttatttcttctccatggcgaccagcttcacgaaagcggcactgggagctgaaggagtaggaaaagatataaatttaatcgtgggaaacggatacgccaaaggacacgccgaactgacactgggtatcattcgggagtcggaggaaattcgggaactatttaacagactgtacgtgaaataaaaatgtagaatttagaatttaaaatgtagaatgagctattttttaatctaaaatcaaaacgccggaagcgcttgctgtgcactagggcaatttaaaatttaaaatctaaaatttaaaataaataaactgagatggctgaaagcagacgaaaagaattttttccagaagtaacagatgaacaatggaatgactggaaatggcaagtgaaaaacagaattgagactgtggatcaattaaaaaaatatcttgatctggatcccagcgaagaagagggtattcgcaatgcattaaaaatgttgagaatggcaatcaccccgtattatttaagtttaatcgacaagaacaatccacattgtcctatccgcaaacaagcggttccttcagccttggaactacacaaagcgagtgcagacttggaagacccgttacacgaagacagcgattctcccgtaccgggattaactcatcggtatccggaccgggtgttattcttgatcacggatcaatgttccatgtattgccgtcattgtacccgcagacgttttgccggacaaaaggacagtgcctccccgaccgaacgcattgataaatgtatcgaatacatcgccaagactccacaagtaagagacgtgctgttatccggtggtgacgcattgttggtaagcgacgatcgtttggaatacatcatcagccgcttaagagccatccctcacgtggaaatcatccgtatcggtagccgtaccccggtcgtatgcccgcaaagaattaccccggaactggtaaatatgctgaaaaaatatcacccgatctggttaaacactcacttcaatcacccgaatgaaatcacggaagaatcagctgccgcttgcgctcgtttggcggacgcaggtatcccgttaggaaaccagaccgtattattgagaggaatcaacgattgtacctacgtgatgaaaaaattgatgcacggattagtaaaaatgcgtgttcgtccgtactacatctatcaatgtgacctttccatgggtatcgagcatttccgtactccggtttccaaaggtatcgaaatcatcgagaacttacgcggacacacttccggatatgccgttcccacgttcgtggttgacgctcccggtggtggaggtaagactccggtaatgccgaactacgtgatctcacaatctccgaaccgggttgtattgagaaactacgaaggtgttatcaccacctacacggaaccgacagattacaaggaagagtgccactgcccggaatgtgagcaagctcgcaaagaaggtgttgccgcattgttacatggcgatatgctctctatcgaaccgaaacatctggctcgtaacgagagaaatcatcacgaataaaataattttagattttaaattttagattttaaattctttccggattgacaatctaaaatttaaaatctttaaatattgaattgaaagagcgtcgtattgtgcgtggaaatttaaagtttaaaatctaaaatttaaaattcaaaccgtgtttatcgaggagattctaaaatacaacagtatagcaatcgtgggtctggccaaaaatgccggaaaaacggaatgcttgaactatattcttcggaaagtgaagaatacgggaaagcgtttcgcccttacctcaataggcatcgacggggaaaacagagatcaagtttgccaaacgcccaaaccggaaattgaaatcttcgaagacatgattttcatcacgtctgagatgcattaccggtccaaacgtctggtggcagagatcatggatgtcagcacacaacaaacctcgttaggacgtctggtaaccgccagagctgtcagttcggggaaagccttgttatcagggcctgccgacacgggatcattaaaagccctcatccaagagatgaaacgttttgacgtggataccaccattgtcgacggggctctctcccgactcagtctcagctctccggctgtgacggaagccatggtgttagccacgggagccgcagtatcctgtaatattcctcaactggttagaaaaacaaaatacgtgtatgacctcatttgcttggagacagcagaaccggagatgatccggcaactgattgacatcgagcaaggcatatggtccattgacgaaaacgggaaagttcacgatctgaacattccttccgtgtttatgcttgaaaataacaaagacgaagttttcaagtacgggaacacgttatacgtggcaggcgccatcagtgacaaattattgcaattcctacgacaacagaaacaaatcaaggagatcactctgatcatccgtgatttcaccaaaatgttcgcctctatggaaacatactatgctttcctcaaaaaaggcggaaccatgaaggtattgcaaaaaagtaaactactggccgtttgtatcaatccccaatccccggaaggatattgtctggattccgacgaactgagagtagccatgcaagagagcttgggtattcctgtttatgacgtcaagagaattgaaaattgaaagttgaaaattgaaaatgaatttagattgaaggaattaaaaagcgaccgccccgtgcggctggaatctaaaatctaaaatcattaaatctaaaattaataaggtgtttttaagaagtgccatagaagaaattaacgggttcagattcatgatcgacaaactggaaattcaatccgggctggcgaaacgaatcttgaatacactaccttatttgcatagcccggaaacgattgcccaggaattggacaaaaccgaggtcacgcgtaatattctacaaacctccgaactaacagacaccattactaagatcaaggtcaagctgatgcaagtgaaggacatccggggaacagcaaaccgggtgacggaatcacaggtattggatgacattgaactatttgaattaaaagccttttctttgttggccgtggagatacgggaattactcctatcagcaaatatcacggttgtttcactcccggatttggagccggtagtaaacattttagatcccgaaaaaatgcgtattcctcatttttacgtgtacgatgcctattccccggaactggcagccctgcgggcaaaaatgaaaacgcttaaaatggatgaaaaaacagaagaacgagtactggaccaacttcaattcgaacacacggaactagaagaccggattcgggaaaagttatccgaacagattcatccctataaaaaagaaattaacgaagccttggtaaacacggcgactttagatattctgttggccaaagcccaacagaccattgatatgcagttatgcaaaccggaaatttccactagcacgactcgctatataaaaatattcaacccacaggtaaaagaggtactttggcaagaaggcaagaaattccaggcgattgacattgacatcgagcaaggagcctgtttgattaccggagccaatatggccgggaaaagtgttatactaaaaacagtggcactggcacagacactattccaattcggtttttacgttccggcagaacaagccgagattgccttggtggacgaagttctcctttgcatcggggacgatcaatccgaattaagcggcctatcctcgtatgcctcggaaatgctacgggtaaatgccattgttcaagacgtgaaagcaggtaaaaacgccttgattctgattgacgagctagcaagaaccaccaaccccacggaagggaaagcgatcgtgaatgccatgcttgacttcctgacggataaaggagcccgttccttgattaccagccattacagcgggatcaaagcccgttgcaaaaagatgcgggtaaaaggatttgtcaaagaacacgtacaaggtcaattaaccatcaacaatataaacgagttcatcgattactcgctaatcgaagatactcatgactccgtgccgcaagaagccatgcgcatcgcccgtattctgggcattgatgaagaattgttggacaaagcagaggagtttttggatgacgaagagaagaagaacagaaattaataacagaacaaagatatgcagaacagtaaactagggcttgatttcaccaaagtggcacacgcaaaggacgtggcccggaagatagccgacgatgtacaaaaattcgtggaacaatactctaccgttgccgttgagcgtacgctatgccgtttgctcggtattgacggggttgacgctaacaccgtgcccctacccaacgtgctggtagacgagatcaaagacaaaggcgtgttaggtgaaggtattttattcttcctcggaaacgctatcgtggaaaccggtatgaacccgcaacaaatagcagagaaggttgcagtgggagaactggatatcaccacgttacccgttcacccgacagataagattaaagccgcattaaaacctcacgttgacgcaagtatcaaacggatcagtgatcgccgtgccaagaaggaaaactacttaaacacgatcggggaaggtccgaaaccttacctctacgtaatcgtggcaaccggaaacatctatgaagacgtggtacaggcacaggctgccgcacgtcagggagctgacattattgccgtaatccgtacaacagggcagagtttgttggattacgtaccttatggagctaccacagaaggattcgggggaaccttcgctacacaggaaaacttccgcatcatgcgtaaggccttggatgaagtgggcgaagaagtaggccgttacatccgcttatgtaactattgttccggtctgtgtatgccggaaatcgcggctatgggagcattggaaggattggacgtgatgctgaatgacgctctttacggtatcctgttccgggatattaacatgcaacgtacactggttgaccagttcatgtcaagagtaatcaacggattcgccggagtaatcatcaacaccggagaggataactacctgacaaccgctgatgcagtggaacaggcccacaccgtgctggcatccgacttgatcaacgagcaattggccttgatcgccggactgaaagaagaacaaatgggattaggacacgctttcgaaatggacccgtctcttgaaaacggattcttgctggaattgtctcaggctcaaatgacccgtgagattttcccgaaagccactttaaaatatatgcctccaaccaaattcatgacgggaaatattttccgcggacatattcaggatgcacttttcaacatgatcggaatctggacttcacaaggtatccaattattaggtatgccaacggaagcgatccacacgccgttcatgtccgaccgttacctttctatcgagaacgccaaatatatcttcggcaacatgaagaatatcggcgacgaagtagaattcaaaaaagacggtatcatccagaatcgtgccaaggaagtattgaacaatgctatcgcattacttgaaaacattgaacgtgaaggtcttttcaccgctttggaaaaaggaatcttcggtgacgtaaaacgtccgaagaatggtggtaagggacttgacggagttgccgccaaaggtgccaactactacaacccgtttattgagcttatgctcaataataattgaaaattgagaattgaaaattgaaaatgaaaggggttaccttatcattttcgatttcagattttcaacagagtgaataaaaataaaatttaaaccaatgcgattgataattttcaattttgcattttcaattttcaattcattatgagtggaggattatattctaccgaaaaaaatgatttcgaccagacgctggatctgaaaaaaataaaaccctacggggacacgatgaacgacgggaaaacccagttgagtttcacgttgcccgtgcctgccggggatgaggctatcgaagccgcaaaacaattattgaaaaaaatgggtttcgagaacccgcaagtggtattccacaaagagttgaccgaaggatacaccttcttcaactgttacggtagctgcacgcacaccgtggacttcacgagcatccatgtcccgaaagtagaaggaacgaaatgggatatgcacgaaacggacgagttcatccgtgaaaacatcggacgtcctttgattgttgtaggtgcaagtaccggaaccgacgcccacaccgtgggaatcgacgccatcatgaacatgaagggattcgccggacactatggactggaacgctacgacatgatcgaggctcacaacttggggagtcaggttcccaatgaagagttcatcgccaaagcgatcgagctgaaagccgatgcacttctggtatcgcaaaccgttactcagaaagatgttcacatcaaaaacatgatcgaactcgtggaaatgttggaagcagaaggcttgcgggataaagtaatcctggcttgcggcggtccccgaatctctcacgagctggcaaaagagcttggttacgatgcgggattcggcatgaatacctacgcggatgacgtggcttcatttgttgcccaagaatttgttagaagaaagaataaataattaaatttacgatttatgattcatgatttacgattcgctatttaagaatctaaaatctaaaatctagaaatctaaaatcaaaacggtatggataaagatcaagtaagagaagttatcgcgaaacgggtagctctcgaattaaaagacggcgacgtggtaaacttgggaatcggactgccaacaatggtaccgaactacttgccccaaaatgtacacgtgatcctacaatccgagaacggattattaggtatgggtccgaaaccggaagaaggtaaagaaaatccggaactgacggatgccggtggtggctacatcacggctatcgaaggcgcctgcagctttgacagcgcaacctctttcggacttatccgcggcggacacgtggatgtcaccattcttggtgctttacaagttgacgagaaagggaacttggcaaactggatcatccccggtaaaaaagccccgggcatgggtggagccatggaccttctggtaggtgctaaaaaagtgatccttgccatggaacacacggcaaaagggaatcacaagattctgaaagaatgcaccctgccgttgacggctgccggagaggtggatatgattatcaccgagatgggtgttatgaacgttacccccgaaggtatcgaattggtagaattaaaccctgaatttacgttagatgacatcaaagcagctacaggctgtgaacttataatttccaaaaatttaaaagcaatgcctcaatgacaaaaacctatatcgtagcagcaaaaagaacagcgatcggcaaatttttaggaacaactctttcaatgacagcagctgacttgggtgcagccgtaataaaaaacattatcgcagaaaccggagtcaatcccgccaacattgatgaagtgatagtcggcaacgtattatccgccggacagggtcaaggtgtagcccgtcaggcatccatcaaaggagggatcccacaagaagttccggcttacggaatcaacatgatatgcgggagcggtatgaaagccgtgctcaatggtgtaaccgctatcaaatcgggactggcgaacttgatcattgcaggaggaaccgaatccatgtccaatgcgggctatatccttccggcacgtgtacgtgacgggcacaagatgggcgacgtgacagtcgtggaccatatggtgtatgatggtctaacggacgccttcgagggataccacatgggcataacggctgaaaacatcgcggagaaatacgcgatcagccgggaggaacaggatgagtttgctatcgaatcgcaacaacgggctattgcggctatcgataacggtaaattcaagtcagagatcgtgcctatagagtacaaggtgaagaaagagactcacgtgttcgacacggatgaattcccgaaccggacgacctccctggagaaattatcgaccttacgtcccgctttcaaaaaagagggatccgtcacggccggtaacgcttcggggatcaatgacggggcatcattcgtactgatcgcatcggaagaagctgttaaacaaaacaacttaactcctctgtgcgagatcattggtgtcggacaaggcggtgtagatcctgccatcatgggtatgggccccgtgcctgccattgccaacgcactcaagaacgccggtatcaaactatccgatatcgacgtgatcgagttaaacgaggctttcgcggcacaatcgctgggagtgatacacgaactcatggcacaacacggcgttacgagagaatggataaatgaacgtacgaacatcaacggtggtgcaatagcactgggacatcccatcggggcatcaggaaaccgcatcgttgtatcattagtacatgaaatgataaacaatgaagcaaaattaggtcttgcatccctctgtatcggagggggcatggggacggccttaattctgaagaaatgttgatttaggattaaaaattagcttcgatcaattaaaacatttaataataatggatttcagtctatcaaaacaagagcaactcttcttacaaatgataagagagtttgcagaaaaagaggtaaaacctctggcggcggaagtggacgaatcagagagattcccgatggaaaccgttcaaaaaatggcaaaacttggtattatgggtatcccgttcccggtggaactcggtggagcaggtggtagtaatatcctttacacgctggcggtagaggagttatcccgtgtatgtgccacgaccggcgtaatcgtgtctgcacacacctctttgtgttgcgcaccgatcatggaacacggaaccccagaacaaaaagccaaatatcttcccaaattagcttccggtgaatggatcggagcattcggtctgacagaaccgaacgccggaaccgatgcttctgcacaacagactatcgcggtaaaagagggagatcattacgtgctgaacggatctaaaatcttcattaccaatgccggttacgcacacgtgtatatcatcatggcaatgaccgacaaatccaagggaacaaagggtatttccgcattcatcgtggaaaaagatttcccgggcttctccgtgggtaaaaaagagaaaaaattgggtatccgcggttctgcaacctgcgagttaatcatggaaaactgtatcgttccggccgagaacttactcggacaagaaggtaaaggtttcggtattgccatgaaaacacttgacggcggacgtatcggtatcgcttctcaagcattgggtatcgctcaaggagctatggacgagaccgtgaaatacgtgaaagaacgtaaacaattcggtaaagccatcggacaattccaaaacacccaattccaactggctgacttgcagactaaaatagaagctgcccgtttgttagtaagacaggctgcctacaagaaagacttgaaagtaccttattcagcagatgctgctatggctaaattattcgcggcagaaacggccatggaagtaacgaccaaagccgtacagttccacggaggatacggatatacccgtgaatacccggttgaaagaatgatgagagatgccaagattactgaaatctacgagggtacgtcagaagttcagagaatggtgattgcagcaaatttattaaagtaaaagacagttgacatgaagatcgttgtttgtattaaacaagttccggataccacggaaatcaaactggaccccgttacaggaacccttatcagagacggtgtacccagtattatgaatcccgatgacaagggaggacttgaatttgcccttcaattaaaagatcaatatggagcacatgtaaccgtgatcaccatgggacctcctcaggcagaggctatcttgagagaggcatacgccatgggagtggatcgtgccatcctgttaagcgaccgcaaattcggtggagccgatacattggccacttctaacaccattgccgcagccttgagatctctggaattcgacctattgatcaccgggcgtcaagctatcgacggggataccgcacaggttggtccgcagatcgctgaacacctggatttaccgcaagtaacctacgtggaaagcttaactttcgacggaaacaagactttcacggtgaagaaatccatggaagacggttaccagatggtacaggtagacactccttgcgtattcacggcattggcatccggagtgaaaccccgttacatgtctgtaagaggaatcgttgaggcttacaatcaccccatcgaaacctggacctacaacgacattaccgtggatgatcagaagatcggattgaacggatcaccgacccgcgtattcaaatcattcaccaagggtgtaaaagctgccggacaaatctacgaagtagaccctgcagaagctgtagacattattatcagcaaattgaaagaaaaatttattatctaatgaaagaggatagatttagagtatttcaatctaaaatctaaaatcattaaatctaaaattagaaatggataaggcacaatataaaaacgtttacgtcttcgttgaacaaagagaaggcgttatccaaaacgtgggtctggaattgttaggcaaagccagagaattagctgatgctttaaatgaaaaagtatatgccatgttattgggacatgacctgacaactcaggctcaggaatgtattgcttacggagccgacaccgtgttgcgtgtggatgccccggaactggctacttacgttaccgaaccttacgcacaggctatttaccagatcatccgtgacaacaaaccgagcatcgtattgatcggggcaaccaccatcggtcgtgacctcggtcctcgtttgtcagcccgtgtagaaaccggattgacggcagactgtaccggtttggaaatttccgaggaacgggacctgttgatgactcgtcctgcattcggtggtaacttgatggcaaccatcatttgtaaggaacaccgtccgcaaatgtcaaccgttcgtccgggtgtaatgcgcatgggccaacgtgacgagaaccggaaaggaactatcgaagatgtaaaaatcaatttcgataaatccaaattccgtgtacgggttcttgaaacggttaaacaaaccaagaacttggtagacatcaccgaagcacatgtattgatctccggaggtcgtggagtaggtaatgcagaaggtttcgatatgttgcgcactatggcaaataccatcggagccgaagtatccgcatcccgtgccatggttgatgcgggagtattaggccacgaacgtcaggtagggcaaaccggtaaaaccgtacgtcccgacttgtacttcgccatgggtatctccggagccatccagcacttggccggtatggaagaatccgaatacatcatcgcaatcaacaaagacaaatttgccccgatcttcaacgtggcagacttgggtatcgtcggcgatgttcgcaagatcgttccgcttttaactgaaaagttgaaaagataaaataaagggaagtgtcgcattgacacttccctttttacctaaccttcatcaaaaaatcacgaatccccagatattgtatcccctcgtaagtattcccatgaaacaaatcttgcgagacgacaatcttgggataattatcttctatttttaaaagattaccaaattcccgttggatagttgtctcatcatttagctgtaaagcgacctgcacatacaccttttcaccctcccgctcaccaataaaatcaacttcttgtttctccaatactcccacggaaaccttatatccttgatataacaaatgattataaacaatattctctaatatcttcccctgatcttgaagtttaaaaccggttataacatttcgaattcccagattttcaaaataatatttattccctacctcaaaaatacgtttccccacaatatcataccgatcaacacaagaaataataaaagcgtttgcaaaatggtctatataagtcagaatttgatttacccccaacgtaactcgttgtgatttcaaataatcacttatccctttagccgaaaatatacttccgacattatctgcaagaaacagaagtaacctctccaagatatcagtattccgtaaagcatatcggctaaccacgtcccgataaacaatcgtagaatatatactcttcaaatattcaaaaacaatttcatcttccaatttcaaatgcatcaaataaggcaaccctccatatctggtatataacccataactttcatccgaattttccagttcatgaaactgtaaaaactccggatatgacaaactatatatcgtgaactcgatatatcggccccctaaataagtggccaattccccggacaacattttcgcattgcttccggtcacatatatatcgttattttcatccaaggccaacgagcgcagagctttctcgaattcactcacctcctgtacttcatca

SEQ ID NO: 10765 - DNA, 14146 bp, Unknown
  gut microbiota DNA sequence
cggaataggggaggaatgggagtagaatgggagcgggtaacaatatgaatacaataaaataaatgtaatatagcaaatatttatatttgttaaaggtgatttggatgcgtcccggggcataccttgtgcttgtttctttttcaaggcgaagggtatgtttaagccgggctttttctttgatattccgatgtttttttgtaattttgcggttcgtaaattacaaagagtaataactaaaagaaagcagaatggtaaagattaaatttcccgatgggaatgtaaaagagttcgagtccggggttaccggcatggacatagctaagtcgattagccataagctggctaaggaagtgttgtctatatccgtaaatggcgtcacgtgggatttgatgcgcggtataacaacagactccgagattaagctgtatacatgggacgatgaagagggacgccatgctttctggcactcatctgcacaccttatggcagaagctttgcaggctatttacccgaatatcaagttcggtatcggtccggctattgaaaatggtttctactatgacgtggacccgggagaaggtgttgctatccaagagaaagatctggtggagatcgagaagaaaatgttggaattggcaagaaagaacgaggagtattgcaggatagacgttagtaagcaagaggcgttgaatcatttttcatcgctcaacgaaacatataaagtagagttaatcaacgatttggaagacggaacaatcacgtattaccgtcagggtgatttcacggacttgtgccgcgggccgcatttgcccaatacatcctatatcaaggctatcaagttgacttctgttgccggggcatactggagagggaatgaacataacaagatgttaacccgtatatacggtatcactttcccgaaacagaaaatgttggacgaatggttggtattgatggaggaggcaaaacaacgcgatcaccgtaagattggtaaggagatggagttgtttatgttctcacaagcggttggttcgggacttccgatgtggttgccgaaaggggccatgttgagagatcgtctggaagcattcttgcgtaaggtacagaagaaatacggttacgagcaggtgatcaccccgcatatcggtaacgtgaacttgtacaagacttcgggacatttccagaagtatggtaaagatagtttccaggtaatcacgaccccgcaagaaggcgaggaattcatgttgaaaccgatgaactgcccgcaccactgcgagatgtacaagttcaaaccgcggtcctacaaggatcttccggttcgttttgctgaattcggtaccgtgtatcgctacgagcagagcggggaattgcacgggttgacaagggttcgcgggttcacgcaggatgatgctcacttgttctgtacgcctgatcagttgaaagaggaattcaagaaagtaatcgacattattttcacgatattcaaagcgttgagtttcgaaaatttcaccgcgcaggtttctttgagagacccgaataataaggagaaatacatcggaaccgatgaaaactgggagaaagccgagagtgctattatcgaggctgctgccgagaaaggattgaaaacaactgttgagttgggtgaggccgcattctatgggccgaaattggacttcatggtgaaggatgccatcgggcggaagtggcagttaggaacgatccaagtagattataacttgccggaacgtttcgagctggaatacacgggtgctgataaccagaaacatcgtccggtaatgattcaccgggctccgttcggaagtatggagcgattcgtggccgtgctgatcgaacatacgggtggaaaattcccgttgtggttgactccggaccaggttgtggtactcccgatcagtgaaaaatacaacgattatgctcaaaaagttgtaaatttcttaaataattccgacattcgcaccgttttagacgatcgtaacgaaaagattggtcgtaagatacgtgataacgagttgaaaaagattccttatatgttgattgtcggggagcaggaaatgaacgaaaataaggtttctgttcgtcgtcaaggagagggagacaagggatctatgacaacggaagaattcgcagaaatgataaataaagaggtagaagctcagttgaactctatctacaatgaataataataaaaggaggattaattatagcaagaacaatggaaattaggggcagaggtcaaaatgacaagccacagcacagagtgaacgagcaaattcgggctgcttctgtgagagtcgttggtgaaaatgtagaagcgggtgtttatcctttaaaagaggctttagccatggctgaagctgccggagctgatctggtagagatatcccccaatgccgatccacctgtatgcaggatcattgattacagcaaattcctgtatcagttgaagaaaaagcagaaagagattaaagccaagagcgtgaaggtcgttgtaaaggagattcgtttcgggcctcaaacagatgatcatgatttcaatttcaagttgaaacatgcgatcgggttcctgcaagaaggtgcgaaggtgagagcttacgtgtttttcaaagggcgttcgattctgtttaaagatcagggggctgacttgttggaacgctttgtcaatgcattggaagattacgggaaactggaatccgctcccatgcttgagggaaagaaaatgatcgtggttattgctccgaaaaaataatgaaagtttaaaatttagaatgaataggtttctaaaatcattgaatttttcaatctaaaatcattaaatttgaaattaataaggtattttataattacatatattctgaaacaaattaaaattagaacaaatgccaaagatgaagagtgtgagcagtgcaaagaaaagatttactttgactgctaccgggaagattaagagaaaacatgcttttaaaagtcatattttgaccaaaaaagcaaccaagagaaaaagaaatttgactcatacagctatcgttgacgtggctaacgacgcaactgtgagaaaaatgctttgtatctaagaaattaaaaaaacagtaattaaccaggatgttacgccagttaagttccttgagggacgctaacattcaaaaaacaaaagattatgccaagagctaaaaatgccgttgcttcaagagcacgtagaaaaaaggttttaagtcaaaccagaggtaactttggtgcaagaaaaaatgtctggacggttgccaaaaacacgtatgaaaaaggcttaacgtacgcgtaccgtgacagaaagaagaaaaaatcagaatttagagcgttgtggattcagagaattaacgccgcagttagaatggaaggtttgtcttactctaagtttatgggcttagttcataaagctgaggtaaacatgaaccgtaaagttttggctgatctggctatgaatcaaccggaagctttcaaagcaatcgttgcgaaagtgaaagagttagcttagtaattataaaatatcagaaaaggctgccctcgggtggcctttttttatttttaaatattacctttgtaagatagtggtacattattttttaattcaatataatgaagattgcattacttggatacgggaaaatggggaaaacgatagagcgtgtggctcgtgatcgtggacatgaagttgtgttggtcgtggatgagaataaccgggctgtatgtacggatgagcaattgaaacaggctgatgttgcgattgaatttacaaccccgaccgtggcagtcgataattataattggtgtttccgtaatcatgttccggtggtatccggtacgacgggatggctggaaagatggagcgaagtgatgatgtcacgagagcaattagggggagcctttttttatgcgtccaattatagtatcggggtgaatatattttttcatctgaatcgttggctggcacagaccatggctcgcttttccgattataaagtttctgtcgaggaaacccatcacatccacaagctggatgctcccagtggaacagccattactctggtaaaagatattttggaagagcatccggaatactcgtcttgggtactggatgaaggaaaggtcggtgcgggagaattgcccgtaaaagccaaaagagaaggtgaagtcccggggattcacacggtaacttataaatcgaacgtggatgaaatccagatataccattctgcttattcccgggatggttttgcccaaggagccgtgatggcggctgaattcctgatggggaaaaaaggtgtttttggaatggaagacttgttgaaaatttagaatgaaaactgaaataacaaactccctcccccctttggggtactccctctataaacagagggagagttgaatgctccctgtcttggggagaagttaccagctcctcctctgtttatagaggaggtggcagcgaagctgacggaggagtttaatttaataaatcaagaaatatatgagtaagatattgacaaataaatggtttaaattagggtgtgttcttttcgtgtacctactgtggacgttatggatcgggagctggtggttgttattaggtgtacctgttctgtttgatatttatatcacgaagaaggtgcattgggctttctggaagaagaaaggagtggaaaaacagaccaaaacggtggagtggatcgatgctttgatcttcgctattattgcggctacattgattcgtatgtttttcttcgaggcgtacacgatcccgacttcctctatggagaagtccatgctggtcggggattatcttttcgtgagcaaggtggcttacggaccgaaattacctaatactccgttgtctgtaccgtttactcatcataccttgcctttcacccagtcaacaaaagcttattcagacttgattcaatggccttacaaacggattgccgggttgggagagattaaacgtgaagatattgtcgtgtttaacttcccggcgggggatacggtagtcgtcggaagagaaaacccggattactattcgcaaattaggggacaggaggctgctattcggtacgtggcacaagagaagggattgagtgtaaccccagaggaggcttggtctatcgctcgtaaacagatttggcgggagaacgagattattgcccgcccagtagataagcgggagaattacatcaagcgatgcgttgggatcccaggggatgttttggaaatgaaggatgccgtactttacgtgaacgggaagaagttggaggataaagataagatgcaatataattatgatattatcgtgaatgctccttttaataaggtaaaattgcaagagatggggatttccatggaagatattaatggtggttatatgggaaataatcattacgtgttgcctctgacggttgaaatggtggagaagattaagaaaatgccgaacgttctgtcggtgaatcatcaagaggatgatggacaaatattcccgtatagcccgaattacccgtggacccgtgataatttcggaccgttaccgatcccgaagaaaggggaaactattgacctgacgttagagaatttaccgctttatgaccgtattatcggggcatacgaggagaataaactggaggtaaaggattccgttatatatattaacggtgccccggcagataaatatactttcaagatggattactactggatgatgggggataaccgtcacaattcggctgactcccgttactggggatttgttcctgaagatcatattgtcgggaaagcttattttatttggctttctctggataaggataaatccttcctaggtaagatacgttggaacaggatgtttcggtttatacattaaaaaaagcggcatatgccgctttttttgttattatattttgtaacttgtcattgttttaaaaattacattatgactaaaactaaaaataagaaaacatttgtattagatacgaatgtgattttacacgattacagatccatctacaatttcgaggataatgatattgttattccaatcacggtattggaggagttagataagtttaaacgcgggaatgaccagattaattaccatgcccgtgagtttgtcagggaattggatcagatttccggatcagatttttttctaaaaggagcgccgttaggtaagggaagagggcgtttgtttatccagacaggagtgcctttctctcccaaaatgaatgattcttttggcgaggatattcccgatcatcggatattggctattgctgaatatataacagagaagagagaaggagaaaaggttgttttggtgtcgaaagatatgaatttgaggatgaaagcgaggtctctggggattttggcagaggactacaagaccgatcaggtgaaggatttggaagtgtcgttaaacaagtgtatagaaacaaaagaggatttctctcaagagttgattgcaaagctttacgagagcggggaggcaggaattccggtagagacgtttttcccgaaggaagaaattaaaggaaataattactatatattgaagaatggtagtaattcggtattggcttgttatgatcccgtccggaaagtggtgcggaaagtggagaagctaaatactttcggcatttacccgaagaattcggagcaggcatttgctttggatgccttgatgaatccgaatatctcgttggtagcattgagcggtaaggccggtacgggaaagacgttattggctttggcggcagctttgcaacaaaacaaggcattcgagcaaatttacctggcacgtccgatcgtggccttgtcaaacaaggatttggggtatttgccgggggatgtgaacgagaaggttagcccgtatatgcagcctttgtttgataatctggccgtgatcaagcatcgttataatatgcatagccaggaaaaccggttgatagaggatatgttgaaagatgaacgtctggtgatttcggcactggcctatatcagggggcggagtttgtcaaatgtttttttcatcgtggatgaagcgcagaatcttacgccacatgaagtaaagacgattattactcgtgcgggagagggcgtgaagatggtattcacgggagatattgaccagatagactctccttacttggatagacaatcgaatggtttatcgcatttgtttgatcgtatgcaggggcaggatatttttgcccacgtgcatttggagaagggagagagaagttacctggcagaagtggcaagtaacttgctgtaaagataaaaactaaaagataaaagctaaaagttcaatgatttaggactgttagcttttatcttttgggctaaacttttatcttttagttttcaacttttagtttttcaagtgaatatactgggttttttaagtgcggccattttattgactttgatgccggggccggatattttgttcgtgatcacgcaaagtattacccggggaaagaaagcgggaattatttttgcttgcgggttgtgtacagggttaatcgctcacacggcagctgtgagtctgggactttctttgattttatataattctccggtggcattcagcgtattgaaatacatgggggcggcttacttgatttatttgggagtgaaatcctatatccaccggaaggaaaattcattggctttgccgagtgctaccggggtagaatataaattgtaccgcaagggaattctgatgaatatactgaatccgaaggtgctgttgttctttattgcattttttccccagtttgtaagtcctaccacggagaacccggcaggagagttactgatactgggattgctttttatggcgcagggcattgttatattctcgttggtagccttgctggcagaccggttgtcacgtcggttgatgcaaaatgctcgattttcgttgatcatgcatatcatcgaatcgttggtctattttgccatcggaatcagtctgattttcgtgactgtctgatcaaaattttcttaaccgaagtattcgaggtatataggtcgagatgtgacgggctttcttggtttcgtatacatctgcaatcttgatcagaatggctgtttcttccacaccaccaaagcccgggtttatggcagtcccaaaggatttcatggaaggtgacaggctcatgtaggcatttactaagggagggatattttctccatgttcccgaacataacgagaaaggattcgataatcctcgtcataattatttccgcagagtattctcccgagtttattgtcatcaatatgaatttccaatggagtaatcggctcaacaagtctttccgtgtccttaaaatacttccgcataaagaataagatcatgtcacgcgcctctatattgaaactggtgtacatggttactttcccgaagaagtattccatacccggattctccacggtaagagcgcctaggccgtcccacaagttatccaaagcgaacagggatttgcgtcccatttttgtagattggtacaaaggttgtacgaaagaacgacccaattcgatcattttagtgagatattgctttttgaaggcttcggagaaacggaataattcagtcgtggccaagttgggttctccctcttggtttaaaggaaggttgtcacataaaatataccggtaccctcctaggatttcctgctctttcgggtcccatacgattaattgctggtagggaacctgctcgtcaacatcaaatggatcaatgtctacctcttttccagtaccgcccccggcagttctgaaggttaattcccgtaatcttcccacctctttcatcaggttaggactgttgaaagcattaaacgagtaaatctcgtttccccctttattggttttacgaatgaatctttcttctgtcagttctgctaataattttgctttgtttacaggatagatgactggttgcatagtttatgtagatctataattggtagacaatattctttatctcttccgcccattctttcggtgttttacttttatctagggtttcccatttaatgggtttcccgatgataagagtaaaagttgaacctttcttgttgaatgtttccttggggagatacatcatttccagattaacctttagccctattttggtacgaaagtttgctaaattataaaagaattttgaattttctgcttttactcgtatcggaataatgtcccgttggtatttaacagctttaactacgaaacttttttgccattccaaatctttaaccacgcctttaactttgcggcttaccattccggcagggaaggtgatgacctgagcatcggaggcaaaggcgttttctaggtctactgcggcttctttggctaaggctccgtgtttgttaactggtaaaaagatattattcagatttttgagattcatcagtaaatcgtttaccgggaatttaagctttttatatattttccccaagaaggagatcagaatgataccatccggccctcctagagcgtgattcgcggcaaaaatatagcgtccgtcgggggctggtaaattctctttaccttcgatgatgtaagaaatatcaagatattccaagattccttcggcaaaatccaagcctttttggtctccgtatttagagatgaagtcgttgatctggtcttggcagatcacacgttttaaaaatgaataaacgaatttcggaatccagcgggctaacttcggattcttacttttgaaaagttgttcgatatatatcggtttaacagtttcttccataataaatgtgaattgaatctccttgtttcaaaacttttgacaaagataaaaaaccttattcaataaaattcgttagagaggatatgaattgaaaaatatgaacatttttaatggatagaataagttaaacgcaaaaaaagagaactatgagaaaattatctttgataacgagtggagttattttgatgctctctttcttgatggtggggtgtaataccatgaagaagttggagagagaggccatcgaaacggcaattgtggggaaagtttctcctcagcagttgactgcggtggatggggttgtgaattttaattataatattgcttttgcacccaggcagttttataaaaagttaattttgaaagtgactcctaaaatgcaatatcccggtggggaagaagcgatggaaccgctttatttccaaggtgagagggtgaagggaaccaattacccggtggtggaatacaaaggaaacacgctgggaacttataatttatcattcccttatcgtgatggtatgcaaaaaggggtactaatcgctgatatagaggcgatcatggggaataaaactgttgcgtttactccggctatattaaatacgaatggggtgaaggaatggaaaacatatatgtattctctaccgaacaatccgaatgcaattcctttgtttaccgaaacttttgtgaaagatgttccggcaacaggggtgggtatcattagcgggtacgtgttattcccgttatctaaatccgtgattacagatgcgcagaaaaaatcgtctgtcatggcacaggctgcccaagaaatgaagaaaattctggcagataaaaatgccaagattaccaatatgttaatgtacgtttccagctccccggaaggaccggaaagattaaacaagaatttaaccacgaatcgtttcaatacggccaaggcttatttcatgaaagatttggggttggctaacacgccgatggcaaaagatactaaatttatcgtttccaacacggtgagcgagaattgggaaggtctgtatatgttattgaatgattccaacttgaagaataaggcacaaatcgtgaaagatttgcagaatgccccgaatttacagaaacggggggctgttttagaatcatatattaagactgtaccggaattgaaagatgtgattcttccgacattgcggcgagctgatttttatattttctataccgtgcctgaagtgatgcaggtggaggatcagatgacgacttattacgtacctcaattacaagagacttcagttttgtcagctcgtacggatgtaaatttgttgaatgatttggctgtcattgctatccgtaacaaggattacaggaaagctaaaaagttattggaatcagcagctgtaattaatcaaaaaccggaagtgctaaataatcttggtattgtttatcaaaatgaagggaataatactcaggctaaagatatgtatacgaaagcttctataaagaatgaggcgaagtataatttgggaatgttgttattgaaagataaagagtacagtaaggctattccttatttgaaagcgatgccgaatgtgaatctggcttacgctcagttgatggctaatgataatcgtgccgctttggagacattgaagaagttgaatctgacggaagggtacgagtattacatgatggccgtggctgcagcaagagtaaaagatgtacaggcaatggctgttgctttacagaaggctatacaacttgacccgcaattgaaagagagggcaagtactgataaagaattttatccttatgctcaagaaagtatttatttggatattgttgattaaaattgtttgactttgcattttaaatcgggccgtagcgagagctatggcccgatttgttacaggttacaagttatgacgaacctgtaatctgttaactttgttaaacaattcatggtttcacaaaatcttgtccggattctgtttgatgaagtcaccccaatccttgcattttgggtttcccgtggtgggtaagttaccttgtaggtggtgacaataggcgatggcgatggcatccgtttcatccaaggttgaaatggtggttggtatcgtcatgaatttgcctagcagaagagcgatctgctctttggaagcctctcctgttcccgtgatactcattttaattttcttcggggcatattcgaaaatggggatattccgttgtagggcagcagcgatggctacaccctgtgcccgtccgagtttcagcatggactggatgttcttaccgtagaattgtgattcgatggccaattcgtccggatggtaagaatcaataacttgcagcgtgcgttgaaatactctttgcagtttgagatatggatcactcatttttttcatgtcaacgactcccgacacaacaagttccggtttgcaattctttccggttgttttaagaattgcatatcccatgaagtttgtaccggggtctattcccatgattagtttttccatctatcagttttagattacaaatatagcgaaaatctgtcagaatctcgatttatccaatttcttcaagagtggtactgaaatataaaagatcctcaccgaatacatctaccagcatatgtaataatctgtccttgtagttttctataaagatggtgtattcttcggcagaagggaatatgagttgtagggagagggataggccttctccttcacgaatcaagacacgggtaaatagtatgtcattacaaaggtttttgcctttgagataagcgatgtaaccaccccggataacctgaatgaattcctctgcaatgttttcgtcaatactgaatgtcgtgttgtatataaatcgcatattaagctaaaagataaaaactaaaagataagagataaagttaaaaactaaaagataaaagttaatccttcatggatcttttatcttttagttttcagtttttatcttatatagtcggtacccataaacccgcggagtacatccggtacccggataccttccggagtctggttgttctccagtaaagaggccacgattctcggtaatgctagggcgctaccgtttagcgtgtgtaccatggtcgttttcttgtctcctttatcccggaaacgtagtttcagacggtttgcctgatactcttcgaaattggaaacagagctgacttccagccaacggtcttgtgcttttgaatacacttcaaaatcgaaggttagggcagaggtgaaactcaaatcaccaccgcatagacgtacgatacgataaggtaatcccaacttgattaatagtccttccacgtgtttcaccatgccgttgagagcttcgtaagacatttccggacgggtgatctgcacgatctctactttatcgaactggtgcaggcggttcaacccgcgtacgtcttttccgtatgatccggcttcccggcggaaacaagcggagtaagccgtgttcttgatcggtaactggtcggcgtccacgatcatatcccggtaaaggttggttacaggcacttctgccgtggggataagatatagtttgtcctcgttcacgtaatacatctgtccgtctttatcgggcaactgaccggtaccgaagcctgaatcttcattaacgacaagcgggggctgcacttcttgatagcccgctttggtgttttcttccaaaaagaagtagattaaggctctttgtaaacgggctcccatacctttgtagacggggaatccggcacccgtgatcttcacaccgacctcgaaatcaatcaactgatactttttcgccaagtcccaatgaggaagttgtccttcttcatgggcaggcacgttatcactgattttcacgattacgttgtccgcatcactctttccgggaggtacggagtcatgtggtaaatttggtaaacgaacgatgagtgagttcaactcgttctgggtgttattgtgttgggcagtcaaggctgcaatctcttctttcagacgggttgtattagcccttgcttgctcggcttcctcttttttcccttctttcatcaaggaaccgatttgcttggagatgctattcatttcggattgcttgttatccgattctttttgtaaattctttctctcgttgtcgagagcgataatcttctcaactaattccttggcatcaaagttcttaacggctaattttcgaatcaccgtgtctttgttttcctgaataaatttaaggtttagcatctctggtaattttaaattttagattttaattttaaatcatcgaaacaagaatatccgtattctcatttcgaggtgtaaaaataaaaaaaa

SEQ ID NO: 10766 - DNA, 12199 bp, Unknown
  gut microbiota DNA sequence
tcaatagaaacgtaagatttgttgtcttgtttttttctgaaaacaacttttccgtcgatcaatgcgaataaggtatgatctctaccgatacccacgtttaatcccgggttgtgtacagttcctctttgacgaacgatgatattacctgctttagcaaattgtccgccgaatacctttactcctaatcgtttactttctgattcacgaccgttcttagagctaccgactcctttcttgtgtgccatatcgttttaaattttagaagttacaaaataaattaagcgttgatagcttcgatttgaatctgggtcatacattgacgatgaccgtttttcttacaatatccttttcttctctttttcttgaaaactattactttgtcagctttcacgtgagataatacctttgccgtaactttagctccttctacaaccggagttccgattttaatgtcaccttcgttgtctactaaaagcaccttgtcgaattcaacttgagcgccttcttctgcagtcagtctgtgaacatagactttacggtctttttcaactttaaattgttgtcctgcgatttctacaattgcgtacattgttctatttcattattaagttaataccgtggggtgggattcttccacttgttgtacccctgaggttaaattttcgctcggcaaaagtaataattgtttttgtacgaaccaatagtttaccgaagttttatcaataattttatctttcctcaaaaaacactaactttgacgggatttcagaaaacagaatggttatgaaacatattgcacgactgatattgaagatattcggatggaaactcaagggcggcttgcccgcagataaaaaagcggtagtcatatccgtaccgcatacttccattatggattttatctggggaaagttgacttttataagtcaaggtgttcctacttatattttaatgaagaaggagtttttcttttttccgttaggaccgatattgagggctttgaacgtgattcctgttgatcgggggaataaggagaatcatatcgtggagagaatggtggaggaattcaaaaaacgggatgttatgtatttgactataaccccggaggggagccggaaaaaacggaagaaatggaaaaagggatttctggtgatagctaaggaggccggggttccggtgtatctgggacgtattgattataaggataaatattgcacgtggggtccccgctttgaaccgacgggtgatccggatgcggatttgaaatatatcatgtcaacatataaggatgcgaacccgcgtcacccggaaaacttttccgcgggcgattaacagaaatcattattgtataataaataatagtatatatgaatgttgcgatcgtacaggcgcatttggaatgggagaatgtaccggtgaacttgaaactttttaacaagcggatagcagcgatagaaggagcaaacataatcgttttacccgagatgtttgcgtcgggatttaccatgaaggggaaagaacgggtagcgcctttttacgaggctgtttaccagtgtatgcaggaatgggcaagggaaaaagatgcgttgatcatgggatcgaccgtttattttgaagacgagcattactacaaccgtttgctggtggcctttccagatggtaaaatcttgcattatgacaagaagcatttgttcacgatgggagaggaaaaagagcattttacggcagggaatgagttgttggtgtttgattaccagggagtaaggatcgcaccgttcatttgttatgatttacgttttcccgtgtggagtcgtaacacgtgtggttacgacttggccgtgtacgtggccaactggccggaggcaaggaggcaaccgtggcaaattttattaatggccagggcaatcgagaatcaatgttacgttattggggtgaaccgagtgggcgaagacggggtaggattgaattattccggtgattcggcagttatttctcctaaaggggatgtattggttgcttgtgaaccttttgccgacgaggtgaaacaggtagatattgatttgaaagctttacgggaatttcgtgtgaagttccccgtgttggaagatcgggatgaatttacaattgaagattaataataacagctaaaagtaaagcatgaaaaggatgtttttggcaataatcggattaagtatgatgttcgatttaagcgcgcaaaagaaggttttaaccatggaagaggccgtggttgggtatcatttatatccccggtccaagtatattcaatggcaaggcgacaagaatcagttgacctatctggaccgggaaggtttgatgggtgaatctgtcgataaaggtgaaaagagtgtactgctcacggtggcggaattgaacaggatcttgggagccgaattgagaggatttcctaatttttcttggttggatgataatactctggtgattgctcgtcaagggagtatttaccacattgacgttgccaagaaacaggtgaaacagaaatttactttcccgaaaggggctgctaacgagacttattctaaagcgggtaatatgtatgcgtacacgatcgataataacttgtattacatggacgagcgtgggaatagttataccgttactgcggacgaggacaagaatatcgtgaacgggcaggtggttagccggaatgaattcggaattacgggtggtattttttggtctccggacggaaagaaactgggattttaccgtaaagacgagagccaggtaacgaatttcccgttgttggatatcaatactcgtacgggtgagttaaaagagattaagtatccaatggctggaatgaaatccgagttggtgagtcttggggtttatgatatagcttctgctaagacgacttttctggatgcgaatgatttcggacgcgaacaatatttgacgggaattacttgggctccggagtctgatatggtatatattcaggtgcttaaccggggacaaaatcatatgcgtttgaataaatatgacgcgtcaacgggtaaattgatcgctactttattcgaggaaaagtccaatacttacgtggaaccgcaaagcggtttggtattcttggctaacaacccgaaacaattcatttattctacgaataaccgggatggtttcatgaatctttacttgcacgatgtgaacggtaaattaattcgtcgtctgacagacgtggatgcggacgtggaattcgtggccgctgatcctgccgggaaatatgtgtattatctttcatcggaaatctctccggtggagaaacaacttttccgggtagaggtaaaaagcgggaagaaaagccgcttgacaacagaagagggatggcacagtatcatgatgagtggtgactgtgcttatttcgttgataattatagtagcatcaaagtacctcgtaacgtggatttgacgactaataccggaaaggttgtacgtcgtttgcaggaagtgaagaatccgaataaggattataatttcggggagattacgttgggtaagattaaggcggatgatggtagtgatttatactatcgtttgattaaaccgatggattttgacccgaacaagaaatatcccgtgattcattacgtgtatggtggacctcattcacagttggtaaccaatacatggaatgcttccttgcggatgtgggaaatgtatatggctcaacatggttacgtggtattcgtgatcgataatcacggtacgccgaaccgcggtaaggctttcgaggatattattcaccgtcagtgcggacaggttgaaatgaaagatcaggtgaagggaatcgagtggttgaaatctttcccgtgggtggatgcgaatcgtatcggggttcacggttggagttacggtggtttcatgaccatttcgttgattaccaattatcccgatatttataaagtggccgtagccggaggtcctgtaattgattggaaatggtatgaagtgatgtacggggaacgttacatggataccccgcaggagaacccggaaggatatgctaaaactagcttaatcgccaaggcaaaagatctgaaaggtaagttgttgatctgccaaggtgctgttgacccggttgtggtttgggagcagagtttgagctttatccgggagtgtatcaagaataacgtgcaggtggattactttccttacccgtgtgcggagcataacgtgatgggacgggatcggattcatctgatgcagaaagtgacgaattatttcgaggactacttgaggtaattgaaaatggagaattgaaatggaggtgtggtaaaatcattttgccacacctcttatttatagtatcttttcgtagaggcggaatctgtgtagtccgtagtctcccaagcctaaatcaatcgtgtcgatataattgaaaccgaatttttcatacagcctgatggcgggaatgttgttctcgtatacatcgagccggatagctttcatgtgtagctcttttcccagctcacaggcaaaagagatcagttttttccctacacccgctttcaggaaatcgggatgaaccacgagtgtgtgaatcacgaatattttgctgtaatccgattctatcccccaaggtgccttattgtatgctggttccggatgatgatttaaaatgattgaaccgataatccgtccttccagccttaccacgtaaaggttctgttcgttaatcccggtttctgcgatttgccgaacgggatatactcctttgatccatccgggatgatttatatccgagtccagaaaatcatttaaattatcgtatagtcgtgccaattcatcaatatctgcgtgtacacctttttcaataaccattttcgtcatttttaaatatacagacaaagataaataaattactatctttgtgccggatttgaaaagtcattttcaattttcatttttcaactttcaattgtttagtcatgcgtatcgatatattaagtgtagtgccggaattactggaaagtcctttgaatcactcgattattaaacgggcgaaagaaaagggaatcgtggaaatccatattcataacattcgggattggtcgaaagataaacaccggaaggtggacgattattctttcgggggtgatgccgggttagtgatggcagttcagcctatttttgattgtatcaacgagttgacttcccagcggcattatgacgagattatctatacggctccggatgctcctgtttttaaccagaagacggcgaacgaattgtcgctaaaagaaaatatcatgattctttgcggacactacaaaggtgtggaccaccgggtgcgtgagcatctgattacgagggaaatatccgtgggtgattacgtgttgacgggcggtgagttacctgcctgcatcatgacggatgccgttgtacgcctgttgccgggagccatgggggatgaaacttctgccttgactgattcttttcaagataacttgttagccccgcctgtatacacgcgtcctgctgaatttaacgggtggcgggttccgaaagtcttgttatccggtaatcatgccttgattgacgagtggcaggagcaacaagcattagaacggacaagggctttgcgtccggatttgcttgatgaatagttgtgggctttgtgtgtaaatcccgcttattggggcagaggtcgtctatattcaaggagtactattgcatcaaaaaaacgtttttacacaatagtaccccttctggtaaactccttctatttaataataaccataatcatagaatccagcacaacactatatccttcgttgctgattcgcagggatatggcatacttaccttgaggaacggaatgattccatggcaactgaatgacgcctttctgaaccgaggaaaattggtttaaaatttccgggctgttatgatccgagtcgattcgttcaatcgaataacggatcgggttcgtgccttgtactccttcaagagattgactttgccacgggatttcgaatttcttcctatgagcatcgtcgtcattggcatcatcaagatttgccttgaataccactgaatcgggattgtattttgcattatgcgtgaacaagtacccaacttttacatcttgacatccaccatatagtagggtggcaagtaatatcatcatccatatatatttcatacgattcattttataattcaacccatgtaaacctgtttgacagggaatgtaccaccccgttatttgtctctatgtcagccgaggcaatgcttgccatctgcccgctgacttcggcatgaatttttagcccctccgctccgatgtcggggattccgttaaactcggattgcgtgcgatatacccggagcttgacgttattcagggaatacacttccgttcctcccgtgagtgttccttttatttcgtagtcaaaagactctttcatctttttcccttcgaccagataagcgaggatcatattcctgacgagttccacgggtatttcccggattgattggtagattttttctccggtctgttcgagaaaaaattttcggatactcatgttcgtggggccgaaaaacgtgatttccttgtaatcgggatttgtcccctcgaaaattccggttaatcccgcgtattcaatggcgacgacaatggaatcccagttgttatggtcacttctcaggtagtccatcatcgagcaatcgtgataaccgtctgccagcccggtgtcatgctggtaatctttttcacagctcgcgagaagggtgacggtaatgcatataaatagtattgttttcatcttgtacggtttaaattgcgaatccatttcttttccagtaaatattttgtgtcattttggtattattttgaaaggcgtcaaaagagattgggaagaataaagccccgtctttcacgtcttggtcggagagggtcttgaatttacccctaagtttttcacggaatgtcctgttacggacaatatcaaaatatctcgtgcatattccttcgagaaataattctttttctctttctagtgcaatcgcttcttccaagttttcatccggggtatattcctttgctccagctcgtttcctgatcacgttcaagtcggctattgcccccggggtatcaccggatttcgctctcatttcagcccggagcaggtatatatccgcgagacgaatcaggatttcattcaggtcatatcccaagagcttaccgagttggctaccacttgtgtgcagcagtggtctcctgaatttgtaaatatacgcggcaccttgcgtgatcgaggtcttgacccctgccatggagtccaacttatagaaatattcttcccgcctcttgtcattcctatccgggaacatggccatggcgctctcgttattcaaacggagtaaggttctccttgtcgagggggtagcgttcggatctgccggccatttttgagtgacacccggtaaaccgcttccggaccgattgaccgcttcggggttcagaaaatctatctcgagaatgccttcttgactgttaccaggtaacacgatctcgcaaatttcatggggattattcactagcgagtagtcaccggattggataacctcggtggcagcatcaatgcctttttggtaatattccggttcctctccgaacccggccagccaagcgtatgcatgggcgagaatggcaaatgccgttccccttgaaggtatttgtttgcttgtaaccggggtgttattggcatctttcatctcgttcaccgggggtaataatttcgtggcttcaacgagatcatctatcacgactttcatgatttcccgccacggggttactgctttttccccaacatcaccttcagccgtaattaacacggcatcgccccacgtgcgtaaaacatagaaatacaggtaagcccgtatcgtcagcgcctgtcctttgtagtaattgatgcgttcttcgggaatcttcgcccgatgaatattgcctaaaatgaaattgcacatcccgatcgcttggtattccccatgccaacttggagccctcgttatgtccatatccttctgtaattcgttgtctgagatgtttctccaggtcaaaccgagataatcgaacgggagtcccctgtcccggtaaagtcgtgtttcaacgtatccgccccaagacctgaacatgacgtgaagttcatacacggcagactcgacgtctttttccgttttccagaaattcgtgtttgtgacgagagtttcgggttcttcattcaaaaaattcttgaacatatcattgcaactcactaacgggagcaacagcaaaattagatagattcgttttttcatgtgtttataaatttaaagttaatcctagtgtgaatcttgtcgccaacgggtagttgttgttcgagtcaaccccggtaacgatgtcgatggattccggatcgggactcgaagagttggtgatggtgaacacgttctccacggacatgaatacacgggcgtaatgttttgattgcttcgggaatacgggtagtatgtacccgatagagatactttttagtttcaaataattgattttctccacgttacttttcaaattcgtggcgaaattattcttcccgttctccagctcgttgattggaaagtcggtattgtcaccgggtttctgccagaaagaaaccttgtcaagatcggctagaatcgggaccatcatttctgctgtatttgctcttaggatagtaccgaccgaagcacctcttcctgcattcaaaacgtgtcttcccagcttgtaagagaacaacaggtttacatcaatccctttccatttcagcgtggaggcaatcccaccaaatgcaagcgggaggggagagcccccgtacacccggtcttccaagagcggtaccatggttgcaacctgtccgtttccgtcgacatcctgtatccgtcggtcgccgggagagtaaatctggtttcccaaggacgataaatatttccgtctgccattgacatagtagagtggcacttcatcttgtgaattatagtacccttcatcgttatagacataaattccattcaacggtttcccgataatgtttagattatgtttgcttgcgaggttcgtgaagtccatgccattgttacttttttcaaatcggttccagttacgggcgatattaaaactgaaatcccagtgcagtttctccgatcgaatcaagtctgccttgatttgtagttcaattccttgattcgagatcgcgtaagcattttgccattgggccgtgtaggcattataatctcccggcagagtgacttgtgccaataacttatccgtgtatcgataataatagtcaagctctaaactcagcctgttaccgaaaaactccaaatccagtcccgcatcgaattgtttggtttcctcccagcttagtttgggatttattaacccgttcggccagtaaggggttatagtttggttgccgtggaaagggatgttattgactattagcactccgaaagcgaaataaggatattcaaactgtttcccggacttcccgtaactcaatcgaattttcccgaagtccagaaaatctcgggcccaatccatgtacggttcctcggagaacgtgtaggcgatagcgtatgacgggaatgttccccagcgtgtgttctccccgaactttgagctggcatcccttctgagcgtgacggagaggaaatacttctgcttgtagttgtaggctacccgcccgaacatacctaccatcgtgcttctttctaggtcggagttgaaatcctttaattgtaggtctttctctgtgtcatacacgttaccgctccacgtgacgtattgtatcaggttacttggcgcacctttgccgtacccgctcttgtctttagcgatgtctccctggaacgagagcccgagaaggagatcaatgctatgattgtctgcgaaaatcttgttgtaggagagcaggttctcgtttaaccacatcatcttgatcgtgttgttgcctgccgagtaactattgtgatccacgttcagatcggagggaatgaatatattttggtcttgcatggagaaatcgacagcgagagacgatttcagtttcaagccttccacgatcgtgtacgccaaatcgaacgatgatcttagcctataagattcgtttttctccttaatctcgttgaaacgtcggactgtttcatcaaaagccttcgtccccggaccgggcatgagggtagaggtcgagagtaattcatccggaatggtttccaagtcactcctgtcattggagaaattataggcatcatgtcctttgcccgccctgttccgtccggtacgggccaagtaaaaacggatgttgctttcgacgctttcggagggtttgataaacaagttagtgatgagtttaaccctgttgaatcccgtgttgcgtagcacgcccgtttccgaataatatcccagtccgacatgataagcgatcgtgttagaacctcccgatatttggatattggcatcggttactttcccggttcggaaataatagtcgaacaagttcgtggaattgttatagaatttgttcaagctatcttgcacgatgggaagatccagtccgtcaccattgttccaaaataaattgtagttcttgttgttcttataagaatcttcataggattgaaccgggcggtacatgttcgttgcttcattataaacggactcccggtaattttccatggcttgcatcctgtgtcttcgttccctgtttcccgtggtaatatccggtaaagaggggcgagtaacccatgtttgcgatatatttaccgtgaacgtgggagcttgattccggtgtccttttttggtggtcacgatgatcacgccgtttgccgcacgggaaccgtaaattgccgcggagactgcatcctttagtatttggatggactcgatatccttggtgtcgatctcggcaatcgtgtttagcccggtaagctcggaggtgtaactgaacatgggtacctcgtcaatgatccataacgggtccgaggtaatacgttctttctctactgccaacgagttataccctcggataacgatgggggaaccgccaccaccgggtgcccctgtcatgttcgtgacatccaccccggcagcccggccttgtaaaaggttattgatagaaggggaggggagatccttgatctcgtcagccttcacgacagacatggaaccgacacgattacgacgtgattgttccccgtaggcgatgacttgtacttcatcgagctcggacacgtcctcttccagaatgacattcagtaaggtgtctgccttactaaaaggaatcgtttttgttttatacccgataaaagaaaaaacaagacgccccttgttgatcgggaggaacatccggtaattcccgttattatccgaggaggttcctatcagagtgctatccagtcgcacggtgacaccgggcaatggcccttttttcttgttcaggattttcccctttataaaatgtttgacaatagaatcctgttggatcggattcgcttgtaaaggctcgctttttaccatcaaagggacgtaagcgaagaacgcaaaaaacataatactgactacacgcaaattcagaatagatttgcgctgacaatccatttttttcatacttttgtatttaggttaagtgacaagcgtattcgcttgtctcgtttttataagagggtgttcgagcaccctcttttttaattcagagtgagatcttaccctcgcttggtggagggcgaatttttaaagagtttgacaatttgtgttgatactgcattttatgtaatattttgataaataattaattcgtattaagttaaaacttttatataatatcttgttgcttcttaatttaattgataatactccctaatagctgggtggatgaagcctaaaatatccctttattcgtacgttaatttcaaaatatgaaaacagagatagatttatatgtaattgctaaggtacgtgaatacagattaaaggctaagcatacccaagaatctctttcttatactttagggtatactcgaacatttattagtaatttcgaaaatggtcctaagaaatataatatcaatcagctgaataagatcgctaaagttcttaaatgttctcctaaagattttctgccacaagacccattgtaat

SEQ ID NO: 10767 - DNA, 19600 bp, Unknown
  gut microbiota DNA sequence
atcatactcattccaagggctatcgcagtaagccacatcacaagcccggcgcaaaggatcgattttatctaactggtttaatgccagattacgaatagaggtaaacaggtaagatttcaacgtttccggaagtaatgcggaataaggtttttcccaaagtttcacgaaaaagtcctgcacaatatcttcggctcgctgagtatcatgtaaaaaagtcgtggcccaaaccaccaacggcttatagtattcacgaaacagaagttccattccgccaatcttccgcacttttaataacgagcaaatttcttgatctatcggacgcataacttttccacacttgaactatacaaatataggagatttaatttccggaacaaaagataatatgaagttcttgtttccgtatacaacgaattaatgccgcaaaagctgctgaataaacatctgcaatagtctcggttccaataacacgggaaaaatcaagccgaacaccgctccatagaagtgggcgttatgattgatgttatcaccatctcgttttgccatgtattggcaataaagcaagtagataaaaccaaacacgataccgggaatcggaacgatcgcaaagaagtagattttatcccaaggatgcagaaatatcgccgtaaacaaaacagatgaaaccgcaccggatgccccgatggaagaatagtattgattgttccggtatttccacacatcatataccgaggctgccaccattcccccgaaatacaggatcaagaaactagaactaccgaatccccatgcaacaaactggttctccacgtataacccgaaagagagaaaggtaaacatattcacgatcaagtgcgtccaatcagcatgaacaaaaccgtgagaaataatccggtaccactctctggaatgtaccattcggtagggattacacgacaatttattgaacagggaataattattaaaacaagcaattgacacgacaaccgtggcaataagtataatgtaagtcatcataatctactctaaaaaataatgttattaaatatcctcccggttctcctgcatctcatcttgcctgatgaacgtactccgactcgcgtaagttttgtcatctccatgaatatacagaagagtcccgcctttaatcgtatctataatttttttactcacggctaacggcaaagccggacatcccaggctgcgccccaaacgaccgcatgaccggatggttgacggatcagcataagccgccccatgtaccacgattgcccgttctttcgccttgtcattaattccccgctccagaccgttcaacaccaaagaataaccgttcttcccgtaatacgtgttctccgtttggtaaaaacccaacgaactcttgaaagaaccttcctgattggaaaacgaggtggcatacttttccccactattccgaccatgagccacgtaagaaataaacagaactttcttcaacttcaaatcaatcacgaacaagcgtttttccgtggaaggtttcgtaaaatcaattaccgtaagtatatttttgtcgaaactgcccatccggttataccccgcgatagcccgctcgaacacagtgtaatcaatcgttccctctaacgccatttcgtgataaagcatccgactattgggcatagacggcctctctgccgctatccctaatagcgatccccaacaaattcccccgataatcaagataagcgataacgcacgcataaagtcattttttcatcaatcaaacacaattaccaacgtcttttccacctccgcccaatcgtacatgaacttggcatgtgatgtcgcattcctcacgcacatatgagaccggggtgtcgttccgagcgtccagctatattcaatcaacttgttatcgggataattgaccggaaccccgtgtaaataggctcccccggtaaaacgactagcataaggtgcgaaaccaccttcttcgtctgacccatccttcaagaaaagcatctccaacaatttccgctgtataaaataaattcccggcggtgtcggttgctggtaaggcggtcggttagctcccgtcgttatcgggttcatacttctcaccaaccaagtcgctccttcttgttccaaagttgcaatattctgattcgttcggtcaacaaatataacttttttaatcgaaagaggccctatcagtttcatgtattttttaggaacatgccatattcctccaaatgttaccggaataacctgaaagtaatcggcactatcgctgatcacggaaacataagccccgtcccgtccgtaacgttccggcacacggacatcatccagccggtagaggggaattccctgataacgattcactccgaaggaatcctgaatctgcttgtatctattggtcacgtattttctcgtgagaggcgattctccgtttacattcttataattccgcagcatcccgtacccatcattcctttcctgaaaagcctccagcgaatccaaaaacatcgaaattttatcccattgaaaacgcctctcctgcttcccgtatttataggtatcctgcaacgtatgtttatcatacagtaatttcttttcgatcttcacggcaaaactattccacccccaccccatcaaaaagagaattgtaatatagtgtcttaatatcatcatttttcattaccttttttaaaaagatacgctggcaaagaaaaatggtttacatacggtattcaaaattcatggtttccgaataaaaataacaacgcctggcaaaaatttgccgggcgccgtcacgttttataattgaaatgttgaaagtaacttatgcaggaatcaatccggtaatcaagatcaataccagcaatcccaagatggcgtacaactccgggaacacggccagtaccatcgtggtaccgaacacgttataaccgctaccgattgccacaataccattagcacatacctgagcttgacggattgcagagaagaaagcaaccaaaccaagacctaatccagctccgaagatagcagaagcagggccccaacccatatccacgtttgtcaagaaactacttaataagaaatatcccacaaaaccatacaaaccctgagaagaaggtagcgcagacaaaccgatatactgaccggatgcggtcggatttttcttcaaagcacctactgcagcattaccgcaaatagtaactccataagcactaccgattcctgataatgccaccatcaatgcaacacctagataagctaataaaattggttccataattctaatctatttaatttgttatttttataatctttatttttaatcatttactttttttctaaagggagcgtattgtttaccaccgccttcaaacccggcattcttgtagaattccacgaaagtcaaacgcatcggatggacgaacgaactgatcatacacaatccgaagttaatcgaatgaccgataagcaggatcaagaacacggctatgaatttcacgataactggcaatccatccgtgagctgaaatgccagagtattgaacactcctcccaagatacttcccgtcaaaccaatcgcaaacaatcggatatatgaaagtgtgtcacccagtaatcccgttgccatattgtatgttccccacaatccggacccgaaattcgaaaatattcctttgcccggagaattgtagaaataaatcgtaagcgcagcaagccccaacagagcgtaaagcacatacttcaaaccttccgggatcactatgcttaacatcggcaaaccgatcaacacccccaataggataatggcaaccacccaacctagcgtcgatattgcatatttaaatccgaactgtttcgtcaatcttgcagcattcagacacattccgtaaaggatctggataatacccacggcaaccgcaacaatcatcatcgggttatatcctcccagatatttcccgtaattcgcttctgtcaggaagagagacttcacgccagccagccaaggccattccacggaatccaacgcgataccaaaaaaagaacctgtcagcaaaccgactatcactgtcataattcccaaatattgccccagcacaagataccctttcaccgaaggcgaggctttccgaccgataatgaaacaagtcagccaaatgatcaatccgtaaccgccatcgcccatacacattccaaagaatagcataaagaacggggccaagaaaggtgtcaaatccaactctctatactgcggcagagcaaacatctctgtcaccggttcaaagagcttggaataagcattatttttcaactgcacagggacatcatcctccggagtcgggcgggtaaattcaaagtacacctccttcgtttccaagaaacttctcatttcagcctctctctccaccggaatccatccttccaaagcaatgactttctcgtcgatcagatgttgagcggcatcctccactttaatcttgtctgccacctcggtaatcttcaaacgatattttttcagccgttcaatcgcatcctgcgaaacagcatccaactctttcccgatgttcacggattcctctcgcaaagccgtaatttgctttgccagctcttctgccgtggcttgagggaaaagataaggatcagcctccaggttcacgcttgtcccggcaggagtaacggtaacaaaatatttctgtcccatcatctcgctgattataacagcgtcatacatctcttcccattccggctgatacttctgttccggcacggaaaagaaatgaaattcccaaccggcaatctccaatttttggatcatctcccgggaaaattttccccaaggacgataagccgcatggtccttctccaaacctaccaattgttgctcgatctgatcctgccgactatacaaaccttccagataatccagcaaatgctcatcgttcaccttcactttttccacctgctccacgtcattccgactctgcatatgcgtgatcatctccccggtccgcctaatcaacatcaatttcgcctgtagatccgtatcttctgccgtacgttccgtattctcatgaatatgaaccattcccttttcccggagttctccgagaaatgtttgatattccttgtaaaatatcaacagggataatttcatcataggtactatcataggctattcctccatcaatttacgggttttcacgatcttctgtgacgacttagaaagattttcctcgtcttccaagaaccgtttgatcttgcgaatcgcctcctggaatcccggaatctgcactttctcgtacaaattcaccttctgtgtcgttttctttctcgccctatccaacagctccattttccgggtgaaaaattccctctccaaagcgatacttactacctctttgatgtattccacaccatcgagtagccacccgggttgattaaacaagctgaaatccttcacctcataatccaccccgtcgagaacaggcgtctttactccggcaatctttttcaccgacattctgacatccttcacgacaagtatgtcttccttatactcgtcataaagttgcagcatatcgttcaatgaattcagcgtttcctccaacttcacattaaactcatccgccacctgtttcgccttcttcacctccgaacgcaaagccgactccttatttttgatggtaggcaatgccctcactcgcatcttcaactgcttatccagcccttgaagcgatgtcttattatattgaaactttatcaccttaccaatgttttaattttaaattttagattttagattttaaatttcagatttctttgatttcaaatttttactcattgtatttatagaagctacaatcatcgctagaatttctttcgcctcccttttcaaaggagtaacgacctcaattttagccaaccccgactcctcaataatttccaaccaataaatcgtttcatcacattcctcctccacgatcttcattttattgataaaatctttatctgatttagccctacaaaccgcccgataattagcaccgacagacaaagcacaacgaagaatctggttaacaattacccgtgaggtataattctgtggaagaatctccacaaaacgaatcacgtgcaatcctaacctcttcgttttatcttgaaattcagtactattcatttctcaatttaaaatttaaaatctaaaatttaaaatccgggaaattctcactcggagaatttgccgaactcttccacgatttcctgcttaatccccaattccgccttgttaaagtatttgcggaaaagatcccaagcggtatccaacatctggtcggtactgatgttgacatcaatagcaagcagactgttggaatagtctttggcgaaatccagagtacggcggtcgtagtccgtcaggtcgaaaccgttctccatcttggtccgggcgttagcggcatcggcatacagacggatggcagcattcatcacttgcgggtgatccttacgggtcttcttaccgatcacgagctgtttcaaacgagacaaacttcggaacggatcaacgataaccttaccgatctccgtatctttacgcaggaacagctgtccctccgtgatgtacccggtgttatccggaatagcatgggtaatgtcaccaccggacaacgtagtcacagctatgatcgtgatagaacctccggctgggaactgcacggccttctcgtaaatcttcgccaaatcggaatacaatgaacccggcatggagtcctttgacggaatctggtccatacggttggacacgatactcaaagcatcggcatacaacgtcatgtccgtcaacaacaccaacactttctcgttcttatccaccgcaaaatactcggcagcagtcaatgccatatccggaaccaacaaacgctcaacaggcggagcctccgtggtattcacgaaactaacgatacgatccaataccccggcattgtcaaacaaatttttgaaatacaggtagtcatcattcgtcaatcccattcctcccaagatgatacggtctgtctgcgctctcaacgccacgttcgccatcacttgattgtaaggctgatccgggtcggcaaagaacgggatcttctgaccggatactaacgtgttgttcaagtcgatacccgcgataccggttgcaatcagttccgacggttgtttacgacgcaccgggttcaccgacggtccaccgatctctctttcttctccgtcaacagccggtcccccgtcaatcgggtctccgaaggcattaaaaaaacgcccgcataaatcgtctcccactctcagagtaggcgcttttcccaagaatgtcacttctgcattcgtcggaatcccttctgtcccggagaacacctgaagggttatatcatttccccaaatcttcacgacctgcgccaaccgtccgtctacaatagccaactcgtcatttccgactccttgggcattcaacgtacacgttgctttcgtgatctgggtgatctttgtataaactttttgaaaagcagtcgtcatataattttagattttagattttagattaaaactcttactctttagattaagaatcttaaatcgtaaatcataaattaattgttttttctttcgttaatgatctcgttcacttctgcttcgtactttttaaacgcttccgattgatattcggaatagttcatctgtttgaaaccattaataatacgtttgaaataggggttaatctcctcgaacgtatcaaaattaaattcggaacgaaccacacccagtaccatattcagcatatacttctgacgctccatagcagtagaaccgtcaatattgtcaaaagcatcctgttgcaggatcacgaagtctatcaactcggatttccaatataccacgtgatattccaaaggcacaccgtcatcacccaaaatatcgatctgctctgccgtctcgcgaccacgcaccagcatattacgagcctcgttcacatcggcaatccatgtatcggaaatattcttcttggcgaactcgataaattccggatattccaagtatttagaatatgattccaacgtatcgatggccgggtaacgtttcgcatctgcacgagcctgagacaaggcgtagaaacaacgtgccactttcttcgtggactccgtcaccggctccttcaagttacctccggcaggagataccgtaccgataaaagtaacagaacctgtctttccattattcaagtaaaccattcccgcacgagcgtagaagtttgaaataatagccgacaagtccatcgggaacgcatcctgtcccggtaactcctccatacgattggacatctcacgcaaagcctgcgcccaacgagaagtcgaatctgccagcaacaacaccttcattcccatggaacgatagtactctccaattgtcatagccgtgtacacggacgcctcacgggctgccacgggcatattggacgtattagcaataatcgtggtcctctcatacaatttacgaccggaacgagggtcttccaattccgggaactcggtaaaaatctccaccacctcgtttgctcgctcaccacaggccgccatgataataatatcagcatcggcaaaccgagacaaagcgtgttgtaacacagtctttcccgtaccgaacggccccggaataaaaccggtacccccttccaaaatcgggttcatcgtgtcgataacacgtaccccagtctccatctgacgggaaggacgaggtttatccacgtaattacggatagccactttcaccggccatttctggatcatcgtaacaggaatctcttttccggcctcatctttcagcacggcaatcgtatcctttatcctgtattccccggcagcaacaatcgaagcaacagtatactctcctttcagcttgaaaggaaccataatcttatgatccagccagttttccttcacgttacctaaccaatcggcaccggtcaccttatcgccgaccttcgccaacggggtaaaactccattttttatcttcttccaacgggttcgtgtattctcctcgtttcaagaatacacccgtcatcttatccaggtcattttgaagaccgtcaaaattctttgacagcaaaccgggacccaatgtaacttccaacatatggttttcgaactccacgagggaaccgggtttcaatccccgggtactttcaaaaacctgtacataagcaatatccccgacaaccttgatcacctcagccatcaaccgctcgtttccaagctggataaagcaaatctcattctgagataccggtccttcggtacgcacaagtacaaggttggaaataatactatgaacttttccttgtgtcttattcatgtctcaattttaatttttaaattcttccgcaaactcgaaactctttctgaacttatccacgacttccataaagacttttcgtcccgattcggaactcatcttgctccatctctcaacgatcatcagctcaagcatgaagctcaacaccttctccatggaaaaatactcgtaaaccacggcctcttcgatataatccccaagaagtaaatccagccctctctcccgttcgacaaggtttgtatttcccatcagagaaatcaccttctccgcatacgggaattccatccccaaaccgaaatccttcgagttcgaagttctcagcgccttagaaaacacgttatcaccaataatctccggggcaacctctttcccgtacttccgacaagtcaaggccgtctccagattcttcacgttcatcacgaattccgcataattccggacaaacttactaccactcttcatcaagtgatcgtaatacatccaactcagcacattctccggagaaacatcatatttcaaatgttcccctttaaaatccgctataaatcgattgagataaacaggtaaagaatttttcggttcggtgatttcgtcttccagacattgtaatggatatactgtttcaagattggtatcgggagccattttatttagcaaccgcagaacttgtttattatcggcaggtagaaaaaacaactccatcaacttcacatcctccttcttcagagcctcccgagccaactcccgaaacccgttcacggacaacgctagtttccgatcatccagaaagacctccggtagtcctgcaataaaacagtagtaattattttttaatatcatcctttccaaaatctatttattaccttcaaaaaggagttttttcgtgaaacctttcatgtactgattaaagaaggcttcaaatagtttctcggagaaggcaatttggaaacctccgtctttaggctgaatcacaaacccttcttctaaattacccacctttacatcaagacctttatccaacagatccttgtacttagccgcaacaaacgattcgaactttgccttttcaccctcggaaagaagaatttccatgttcaggtttccaccggcaacatcccacttcttcacaatcgtcatgagcaactcctgaataaaagctttttcctcaaacccaatcttggcaacatccccggcaacatccccggcaaccagattcgtgattgcctgttttaaagccgtgatagcttggcgcgcacttaacgtcatttcagactcggccttttttttcaagttagaaacctctgtctccgcatctgcattcatctgtgctgctttcgctttcgcatcggcaataatcttttcggcctcttgctttgcctggttgatgatattctctgcctcctggcgagccttatctaccccctcattgtaaagcttttgggtcaaaatatctaatttattctccatactaaaaacgtattatatattaatttcatcttacaaactttcattaaaactaagtgtcaataaatgtgccagtaatccagaaaaacggcgtcaagatattaaaaaacattgacaataacaaataaaaattatacaataggacacttgaaaatatccccataacagatacgaattccgccgtcaagggttccattcgaaccataaagaggcaaaattcatagcagtacaagcccatgataaaagccaaagaagtggcaaaaaatctttgccactcccattcacatcaatgttgttcccatcgacgtttgcaccaagccaccacgaccgagctgatcactcctcccacgatgcttaacactcccgcgacaaaatcatttgccaactgcgtgaagaaagcattcaaactcagcgtgaaaaatattcccgtgaaaaaatacaaactcatcataaccataggatcactcaaccgcaagatacaaactaggcgaaatacttttcccattcttcgaagttgcaaaacaatacaccttcacgttcgcctgctcccaatttttcgggagacccacactggtattcccgttctcccctcggcttcttaacgagatcaatttcacccgcattaacacgctctcgaatagcacggcatacaccaaatcgtcagccaacgcaaaaccattctcctcctccaacatctcctgctcgaaagaatacatcttactctcagaggaatacgagaccgagacttccgggatatcttgaagtcccattgccaccttcaaacgctcgtaatccacggtggccgtatgcatttcatccacgtctactgacttcatgtttttcgcgacaaaagcattcgatgtggttccgttcccgatccccacgaaccctttctgtacaaccggcaacaaaaaccgggacaactcgatcaacaccttcatacgggctcgctgatccaacacgtccgaagtcggtttatcctttctcgagaatatcctcgccctagcgatattctgtttgttcatgtaacacatcgtcacgttaccaagagttttcgttaccttacccaataaataagaatcaaattttgccataacattaaaatttaaaaatgaataaatcaggaaatttaaaatgatcccgcactccccgcatgggccctacacgaagaatgaaatttagaatgtagaatttaaaatttagaatggaaagcttcccccaaacagcgagtattccaactctccctctgtttatagagggagtaccccgaaggggggagggagttcaatctaaaatttaaaatctaaaatcaataatactgaatccactccgccaccctcaaagccggtcccggatccacctttctcgacgtcacctccgaatgccccacgatatccccgatcgggtaagcatccaccagcacgctacacacctcgttcaacacccgcatctgccgatccgtgtagtcatgccagtacgtcggctcctctcccgaatcttccgtgtacacctccttcacggggacctctttcccacactccgccacgaactttcccccttcctgccgcaactgtcccaagttatccagctcgatcccgaccgagtaatgattcaaaccgctccttcccccgtaactactccttccggcatgccacgcctcgatattaaacggcaccatctgtatcacctgcccgtcccgcccgatcaccacgtgtgccgatgccttcacatccggctttaccaagaattttgctgaagacatggcatccatacctgccgtgtaatgtaaaataatcatgtccggctctcctagcccacgtctattcttcgggcattccagatgaatcaccccaccacccattaaccggtgattgacaattgaaaaagatgaattagaacttgaaaatacatccataacaaataatttagaatttaaaatgtagaatttagaatgaaatcaaaaattgatcagcttttagtttttatcttttagttttcagtttaaaaatggcccccgccattttttccccactcctccccaccacgtaccctcccaacccgatctccagcaaatcccagaaccgggaagtatccgacaacatgggcaaactcgtgaaagtgccgataagtacgataacagcaaagatcaacatcaccaatggccgccacgaacgctgtagccaattcccggcagcctcggctcttatcacaccagcacgagcttcaatcatttcacgttcccgctcgtacaccagtctcagaatctccgcctgtaactctttcttctcccgtgccgggagcgtcaagccattaatcaccccgctaatagcattgacaacatctgctaccggcttcatttcctcccctgtaaacgtacatactgactcatagataactgcttctcatcaggcgaaataaagagacaatacaaatgcaacgtttcccccttccacccgtcaatcctaaagctcgccatgccatctttccgcacacccccagtattctccaacacccttggacaaaacgccctcccttcatgtaacacgaccaccatcaatcgatcatcatcctccacaaatcctcgtccacccaccttttcccattgtaataaaacacgaccttccaaatcaatctgtcctcttaaatgaaacactcgttgtctctttcccgcagaaaactgaagttgagagaaatctccgatacgcccatccgcacagaacaccttcatatttttttcaagataaaacgtataaccattgaaactgtttccttgagcagacaccttcaatattcttcttaacgaagtctctttcaacttctggtaaaaccggattgcaactaaaaatctcgccctcacttcctgttgttttattgtcttcggattattcgctcgaaacgttcttcttgcatacgacttgttacctatttgataaataatcacatcccccaatttcccgcttaatccaaaatcatttttaaatgatgccataattcctcgttttttttaaatgaatactctctctcacttttctaacgacaaaactacaatacccccgaaacttcatcactacacaccatcccacgtgtgttttcattttcccacaaaccactgattattagcaacaaaaaagagatccaagcacatcactcagatctctttttatcaagcctcctttttatcccgttcctgttcaatcaaaaatatcaaccgtttcaggaatatcaccagctcgttcgtccgtttgaaaatatcccgtttcaactccctgtgattcgaaatcttcaccccgaaagcccgttcggccaatcggataacctctcgatactccatcaacatcccgtccggcgtgcgtaacaccttcgcaagataaattcccagcatcagttccgctatctccatcttgttattgttcgatgtccagaccgccaacggcccgtcatccgaactcccggcatacctctccggatactcctgccgctctcgggaaaaccggatctcggcttctacccgttgtaacacggcctccacgcaatacccgagcattcccttttttccccgatccgtcactcgcttggcacacttcatcccaaacgtgcaggcggattcgtactcgttccaacacccgcacctcttccttgtagttcttttccttgtcacacatccgttccaaatccgccacgaactccccgacgaccagttctacctcatctttcgtgacatctttcccactacactcttctaaccaagagaaaaaccttgcgtttaataactctttcataacttaaacattaaaattcataaactaaaaaaacctcggacactctccgtccgaggttatatctccaattaaatacgaatttgcaaatcttaaatcagtaacttttccgcttccttcgacttcaaaaacttctccaacaactccacctgtttcaccgaatgtatgtccccggaaaaatgatcaatcaaccttgccaccaacaattctctcgctcccgccatggcctccttcccgtaaaaaccggtaaacgccagcaaattcacctgcacccggcacccccgtcgtttcaactcccacacccgttccgtcagatgtttcatgtaaaacgggtaacgctccgggtgtgccaacacgggcgtgtagcccttgtcctgcagacgaaaaatcacctcctcgaaaaccggagacggggccacgaaactatgttccaccagcacctttcctccgtgaaacgaggcgatattcccttgacgaatcaaatctatcatgtattcaccgatcttgtattccgccccggcatccgcctcgatctcgattccctcttttaataaacgttctttcagctcgttcagtttcccaagaatcatctcaggcgtgttcatcggcgacgggaaagaaatatgaggagtaaaagagaaccgtttcactcccagttccagcatctttttcacgatcaccacggaatcctctacccgtttcaccccgtcatccaatcccggtaaaatatgagaatggatgtcatggtcgtaagaaaaatattgcttgtcctttcttttaaaccagtccatgatcgttattttttcttctttttatccttgccatcctgcccgtaaccgtacccgtagccgtaaccatagccgtaaccatagccgtaaccaccggaacgactgaccttgatcccgttcaccacgattcccaggttcgccaaacgaccacccttctccaggtcggcaacaaccctcagaccttttttatcaagcacgttcgcgcgaaccacgtaaacacaagcatccgcgtactcgctcaacgagaaaccgtcagccagaatacccagcggcggcgtgtcaaggataatacacgagaactcgctcttcaaacacgccagcaactctcccatccggggactggctatcaactgtgtcgggttcgggggcaccgttcctccaaatatcacgtgcaggttatcgtttaccttctcaaccagcatccccgggtcatcaaccatcccggccaggtaagccgataatcccttccggccttccctcttgaagtactcgtttaacctcgggttacgcaagtcacaaccgatcacgatcacttttttccccgcccgggcgtaagcactcgctaaatgcgccgcaaccaaagattttccttcactaggtatcgtcgatgacaccatgatcacgggcgtgtcctttcgcttgatcaggtaattcaaattctcccggatcaactgcatcgactccgccatcatccagtcctcactctctatcgacgttttctcttccggcaattgcggcaaagttccaagtaacggggcgttcaccaccttttcaacttcctccgctcctcgtaccttggtatccagcatatccatgatcaaaattcctcccgctggcaaggcgaaccccagcatcaagccgatcaacatgatcaacgccttgcgcggggcgataggcccctctcccgcgtcgggattctcgatcatcttcgccatcggcacgtacattaacttggctatctctgactcttcccgtttttgcatcaagaaaaggaaaaggttctcttttaactcctgttgccgggcgatagaacgatactgcttttcttgtgtcggcacggatgtcaacttcgcatccacagcctcgttttcccgctgcaaactcttgatcttgatatccaatccattctccacgttagcaatcgccaaccggatattatttttcatatcccgtaattgcatctccagaccggtaacgatcgggttactttcccgtgccgagagtaataattttcccctccggagaaccatctcgttatacttgctgatcccgctgttcaacgactcgtccgtcaaccccagttgctccggcaataaccggaactcctcgccttcccggctatccaggtaatcccgaacactcttcaccacgtccagctccgttgccagtttcaacaattccacccccgccgctttcttacgttccatcacgaaagccgcatccgacgtgatatccgttaactggttctgtttcttgaaaagctccgcatcactctcgatatcccctagttctcgattaatcactttcaaacggtcgttgataaactccaccgtcttggacgacaccagttgcttgtccgtgatcccgttattgttataccctcgtatcagggcgtccagtatatcctttccccgtgccgggatggcgtctttcacgcttacccgaacggcactcgtgtttttttccaggatactaacggccagttgcttgtaaaccctatttgttacggtcttgcaagataacaagtccacccggatctcgtctccttccctcgccagtgaatccagtttctcgatcgacacgttatacatcccgaaagaaatcacttccgagaaccctccctcgaaaatcacttcccggtcctcgttacataccttcactccctccccgacaaggctcacgtacaaaacagtgtccttcacgtgctccggcatatccaccaagactttgatgggcgaatccttgtacaacttcctgtcacgaggaaacctttctcgtgtataatcgacattcaactccagttcccgtacaacttcttgcaccagatttttggatttcaactccacgatctcgttctccaccgccatgtttccctggaacaatcccagctccttcatcatcgggtttaccccgatctccccttttttggtatcactgatcatgaccttcgtttccacctggtacacgggagttgaacttaaacaaatataaaaagcaatcattatacagagaggcacgctgataacaaaccaccaccaatgatccagtaatttgagaaagaaagcccgtaaatcaaaatactccccttcacctgacggtgaaaactctctattcatgttattctcgttattcatcgttctttcctcgtttaattatcttgtaattaatgatatcacggcgatcaaggtcgacaggcttgacaacacgtaaggcaggaatgtcccggcatttcccccggcaatccgtcctttgttcggctccacgtaaaccacatcattttgctgcaagtaaaagaaaggagtgtttatgtaatcactcgaagtcaagtccacccgggcaaataccttctcgttcccttgctctcgcatgatcaacacgttcttccgtttcccgttgatttgcaagtctcccgccatacctaacgcgtcaagaagtgacacgcgttcgctggacacttgataacaccccgggttcttcacctcccccagtactgtcaccttgaaattttgaaactgaatcgtcacgatcgggttcttcaagtaaagcgataatttttccttcaacatctcggatagttcgttacgggatatcccttccactttcaactttccaagcacgggaaaatcgatttcccccgctttgtcaacgaggtaaccccgtggaatctgttgagatgacgaggtaacttctctcccaagcccgatcatcggggtattaaacgggactgctgactccaagtcatcacacgataccacaatcgacagcaaatcatccggatggatcactgtcttgtactcaatctccgttttcactcgtctattcacgtccgcatcttgcaggtaaaccacctttttactggaaccacaagaagacagtataattaatcccgttaaaaacaaaataactttatcccaatatcgcatccttctcaaaataaaaattaattacttgattcatataacgtatcatttccaatattttcttcccaaccgaataataacctgtcctactctttctatatcttcgtccgtcaatgtcggccccgatggtaaacacaacccaatctcgaacagccgttcactcgtcccgttcccgtaaaatggtgcatccttgaacaccggttgcaagtgcatcggtttccacaacgggcgactctctatattatccgtatccaaagccaacctcacgtcctctctcgtgaaacctgccactcccggctccaccgtgatacacgtcaaccagtaattcgagtcaaaatctcctccttccggctggcacatcaccttcacccccttcacgccctccagtaacttcacgtacaaatcatgaatctcccgccgccgggcaacgtgatcctccaacacgaacatctgcccccgaccgatcccggcacaaatattactcatccggtaattatacccgatcttctcgtgctggtaatgtggtgcctgctctctcgcctgcgtggcgtaaaacaaagcccgttttgctcgttcctcgttcgggcaaaccaacgcccctccaccggaggtcgtgataatcttgttcccattaaatgacaacgccgcgtattccccgaaagtcccacacttccgtcccttgtactcggaacccaacgcctcggccgcatcctccaacacgggaatcttgtaatgattggctatctccaaaatctcgtccagcttacccggcataccgtacaaatgtaccgggataatagcttttggcaatcgtccggttttctttagacgatccttaatcgcctcctccaacaactccggatccatgttccaggtatctacttcgctatccacaaacaccggcgtcgcccctagataggcaatcgggttcgccgatgccgaaaacgtgaaactctggcaaataacctcgtccccctcgtcaacacctaaaagtatcaaccccaaatgtaacgcagccgttcccgcgcttaacgccaccacttgcttcccct

SEQ ID NO: 10768 - DNA, 148 bp, Unknown
  gut microbiota DNA sequence
cttgttattcagcacgtacttgaagaaaatctctctcgtggtgaggacctcttcctgtttctcgctgtaatttttcgggtaatcgttccgccatttctctatcgtcggtaacccgcaggactgcggggtgtcacgaatcaacacgtac

SEQ ID NO: 10769 - DNA, 145 bp, Unknown
  gut microbiota DNA sequence
caaggacggtcacggcggcaagggaaccctcgttgccatcatcgagggtgtaaaggccgtggaggtatccagtatcttgaggaagctcccccgtcaagcccgccaccgggtgctggagattactcttgacatgtccagcaccatg

SEQ ID NO: 10770 - DNA, 11767 bp, Unknown
  gut microbiota DNA sequence
gaagacgatgtcagctgagttacagtcagccccagttggccactttggtatctcccctttgttcaaagaacaattatttcgggtgcaaatatactgctttttgggtttgtcgcaatagttttgggcgattttttgcgtgtcgatatttaatttctttaataatataaaggagttcagtgagttgtttaacagagtttgtggcgtaaacagtattcttacctttgataattgtaggtatggatgaaataataactacatttgtaatgggttataaatattattattatgcaagatttaataaacggacgttgcggttggtgcggaacagacgaactgtatgtgaaataccatgatcaagagtggggaaaattggtgaccgatgataagaaattatttgaatttctagtgttggagagtgctcaagccggattgagttggataacgatccttaggaaacgggagggataccgcaaggccttttgtgattttgatgccgaacaggtggtgcgaatgacggatgaagatgttgaacggttaatgcagtttgagggcattgtgagaaatcgtctaaaaatcaaatcgacgatcaccaatgcaaggctatttcttgatatacaaaaagaattcggtagtttttatgactatacattatcgttctttcctggcaggaaaccaattgtcaatactgtgcgggctttaagtgagattcctgcattttctcccgaatctgatgccatgagtaaggatatgaaaaaaaggggatttaaattctttggaactacgatttgttacgctcatttgcaagcagcggggtttatcaacgatcatctggtggattgtgtttgtcgaaaagggttataacaatataactttagaaagaggagataaaagaaaaccgcccgaaggcggtttgaattatttctttttatatcccacgggttgcgtgtagataacaatgtgttttgccgggagtccgatgactttggctaattcttccttattcacggaaccgatgagaacggttgccatgtcttttgcggcacataccaggtaaacggattgtgccatgtagccaacatggtggtaagagtattctttttggtgttccgggttcgtgattcgcccttccttgttatggtcggccgtgtagataaaacacacgggagcgacactcatgaaaggttgtggtccacattctttacggaaatctcctttcttcacaagttccagttcatgtttctcggcgttataacggtagataccatctgctgtggccacataaagtaccatttcctgccagttggtggcggtgggaactgttcgtttgccgctttccgggcggttaataccatttgccgcccacacgaggtcggaaaggtcctgtaaggatagttgtttcgtgtcgaaattccggtctgtttgccgttcgttcaaacagtccatgagagctttccccccgctctttttcggggcgggtaatttaatgttttgtgcgctgattgcgccgcataatactgttagaaccagcattgtgataattgttttcattaatttacaacattagtgggtgtaccattaaaaaagttcaggatgttatcaactgcttcctgcccggtggcaatgcgcgtgtcgatagtgcctgtagcgttgtgcggtgcaaggatcacgttatccaagccatagagcatttctgtaacatggggttcatcctcgaacacatccaaggcagccccggcgattgttttattttgtaaacagatagctaattctttttcattgatgacagcaccgcgagccgtatttaccagaatagcggtcggtttcatcaattcgatttcccgttttccgatcatgtgacgggtttcatctgtcagtggtgtatgaatggagacgaaatccgatcttttcaacaacgtgtcaagatcaactttctcgtatccttccacagtactccggcgattgtagtaaataacattcattcggaatgcttctgccagtttagccactgttttgccgatatttcccatgccgataattcccagcgtgcgcccttccagcgtgaatccaagatttttcataacaccccacatactttctttttcaacccggatgcgacggtcacattcggtgattcggcgtgcggcactcagcatgaggcccatggccatttctgccgtcggaaagcacactgctttcggggtgttacaaacagcgatgcctttggaacgggcaaatttgatgtcgatgttgttgtaaccgacaccgaaattgctaattacttttaacttttttccggcttcgataacggcgttatcgatcgtgcgggtgaagatgcctagaataacgtcgtaatccggaacaagtttaattaattcttccgtggtgaaatactcgccttccggcatggtaatcgtgtgttcttttcccagtctggcgaatgattcgcggggaatgttgtaagtaactagaactttcatatttttaattttaaatcttgttaatcacgttttcgctagacatttcattctaaatttttctcaagctcatacgggcatctgccggggcttctaagccgataaactgtgatgccaggtatttgtaatatcccgtaacggcaaccatacctgcgttatccagcgagaatcccaatcggggtatgaaaacctcccaaccaaggcgggctccttcatcatacacggctttttgtaacccggagttggctgatacaccacctccaatggctatttgtttgattccggtttgtttagcggcttttttcaatttggccatgaggatatcaacgatcgttttttgcaacgaggcacatagatcattgaggttatgttgtatgaaatccggatcatttttgatttcatcccggataaagtacaggaacgaggttttcagcccgctaaaactataatccaatccgggaatattcggtttgttgaacgtgaatctttccgggttgccttcttttgccagacggtcgattaccggccctccgggataggagagtcccattaccttggcgcatttgtcataggcttctcccgccgcgtcatcaatggtttgcccgataacttccatgtctaagtagtcccgtacgataataatctgcgaatttcctccggacacgagtaaggttaggaacgggaatttcgggtgacgggattccacgcccggttctttaatgaagttcgcgagaatgtgtgcctgcaaatggtttacctcgatcatgggtatttgtttggcgatagcgaatcctttggcaaaggacgttcccacaaggagagaacctagtaatccgggacctctggtaaaggccactgcatttacttcattttccgagatgccggcctgttttaaggcttgcgctaccaccgggataatgttttgctggtgtgcccgggatgctaattctggtacgactcctccataggcctcgtgaaccttttgactggcaataatattcgatagcacaaccccgtcttttagtatagcggccgaggtgtcgtcgcaagaagattcaataccgagaattacaacgcccattttaattttagattttagattttaaattttagattccaatcgcacaaatcctattttaatttcttgattttagattatgaatgacagttttttcatattcaactttccatttttaattttcaattattaagatgaaatgtcctgcaatattaataaatttgcgtgcaaactaaaataatgacagcataaaaaaaataatctccatattatcccggtgtgtgataggattggtctttttggcctttgccgcatacatggctttaatgaccccgtttgtacagacgaggttagtagattattttacccgtattttagaggagcggacgggaaccacgatttctatcggacgagtggaattccgcccgattgagtcactgatcctgaatgatgtgtttgttcgggattgtcgacaggatacgcttgtgttttgcgagcggctggtgatgaaggtggattccgtgagtttcgtgaaaagacgtttcacgattacggaggctgctttcgaaaaagccaagtttaatttatggattgaacgtaggcaagatgggggagagagtcttacaaacgtggaacagctcattaattctttttcgtcttctaaggccgataccgtgcctcaaacctcctcgggatggaacgtgaatctgacccaggtaatattgaaagactgtcgtttccggtatatcgagagcgattatgaaccgatagattacgggattaactggacggacgtggagtgccggaatttgaacgtgcgtatttttggtattgatttttcgaacaagcaatacagggccaaaattgatggacttcgtttcagggaaaagtcaggtttcgaggtgaccaatatgggaggggaagtcgtggcgagtgatgataatttgttgataacaaacacgtttatacagacgaaacaaagtaaggtttacttggatacgttggagtataactgggtcccggaacacgattactggcgtaattttaccacgaggatgcaacagcgttacgtgtttaccgattctagggtaaattttgatgatttggcgtattttaacgggaagttattggggatgcataatactgttttcggtagcggggtggtttttaatacgataaacaatctggaaggacgtgatttagaggtttacctgggcgataagagcgtgcttcatggttcattcgcatcgcacgggttacctgcttttttcgagacggatttcaatattgattttacggacacgaaggtgtctccaccggaattagaagctatttatatgccttggcttgaaagccattacgtaaagattccggaaatcttgcataaatatgacatctttactttcgatgggaattttcagggaaagattgaagactttgctataaaagctcgtaccacgactccagggatggtggggagtgtgctttttaattgcgtgatggacaatatcggggatattcgttacgatggttggttcggtttgggacaagtccaatttggattcctcacgggacaatcttttttgggaagagggtcgtttttcggaaagttcgatggtgtactgggcgattcgatttctcgattcaatttatcaagcgatatacgccgtttgcagttatttgatcgggaaattcggaatcttcgtttgacattgggaacggaagacgatcatttatatctactttcttccgtgaaaaacgatagtttgcaggcagatatccttttagattatgttatgggcgacacgttgagtctggcaaagaccgaaggctatgtgaacgtgcgtcagtgggatgcgtgggccccctctgtttttggtgaaagtgagtctgttgaatttgattttagtggtacgctgaaacaaagcgaggataatcgttgggtggaattactggtgccggggttgaaatacgagaatagcaggggaacgtggagtaccgattccttgaaattctccacgactatactgggtgagtacagtttcactcaattacagtcggatgtggcggacgtgacgatggaaggttttttccattccttggaagtgaccgatttgtggaatagttttttgataagttatttacccgactataagtatgctgttgacaagactttgccggaaggtacgagcctgatgctggacgtgcatttaaatgatattaatccttttttgaaagtggcttacccgcaactgaagctgtcccggggaggaaatttggcctgtgagtatcattatgcagatcatcaggtcgagttgtctttggtggcagatacgatttcctatggtgattttaaattacgtgattcccggatgaaactgaatggagacgggataaacttacactgcacgtacacggctgatgagttgaaatatatgaatttcggaaagttgtataacgtgcgaaacgtgatagaagtaaacacgaataacgtgagtgagcgtctaacttggtgtaattgggagagggagagttatagcgggtcattttcggctaacttgcgtttgttgaaatatggggatcgtcatttgacccaggtgtttattcatccgagtacgtttgtcatggcggatagtacatggcatgtggcgcgttccatgatcttgaaagaggataatgacattttcgtgaataattttgaaatcagccggggagaacaacgttttcgtttgtggggacgggtgacggataatcctcgtgatgttctttctttggagtttcatgatttcagtttgaccgagtttaataagattctttttgataataaattacaacttttcggtcaggtgaatggtgaagtgagaattcaagatttgtataaagataatttgatatatgcgaacgtgaatgtgaatcagtggggagttaaccgggacaccttaggtgtactagatttgaattctcgttgggatgcctcgaatagtgctttggaaataagcatggtaaatcggatgaaagagagaacccctataggggtgttcgggtattataaaccttcgacagacagtttgaatgtgaatttggaactttcccggatagaggtgaattatctggcaggttatttcccggatatgttgaagggtggtgagggtgcgatctctggtaatttggttatgaagggaacgacacaaaaggcttcgatagacggttttttggaaatggattccgtatcgcttacagtagccgggttgaacacggcttttaaagtcgatgatcgcttgcctgtgaaaaataatcgggtcgtgctggataatttcaagatatatgatgccaagggacacgcatctgtttgttcgggatattacgatctgaattcgaatttatacgacgtgtcgcttaaatttaataacttccgggtgttgaatactaaagcaaaccagaatgatacgttttacggacaattatatatcacgggacaaacccggatgaataatttgtccgggggcggggctttgtccgtgaatttgaaaccggaggcacattccgtactttatattcctttaacttcggcattgatggaggaagacgggagtttcctgcattttataaacaatcgtcagccggatggagggcgtcgtccggctgaagaacgtgtttcgttggtttccaattttgatttgaatgctaatatcgagatcaataataatctggaagtgcagattatttttgaccccacgatcggggatattttgaaaacggtgggaagtggtaatctgcgtttcggattggggaaagataacgagttggatatgttcggggagtacaagattgaaaagggggattacttgttcacgttgagtaatttgattaataaaaagtttgtgctgaaccctgggggaagtatcaggtggaatggttcgccatatgatgccacgatcgacgtgagcgctatatataatttgcgtacctctttgagtgatttgcttgccggaaccacgacgacggtggataagacgacgaaagtacctgttgagtgcgagttgaagttgggggagaatctgatgaatccgaacgtgcagtttggcattaatttcccctctctcgacgtgcagatgcgaagtctgatgcagagctttttttccagtcaggatgagattaataaacagatgttttctttgctgatattgaataaattctataccccggattatgttgagaaggatgccgaattggaagaacggaacacgggataccagatgggggtgacaacggcgagtgagttgttgtccaatcaattatcccgttggttatcacagatcagtaataattttgatatcggtttttcttatcgtccgggtgatcaggtcacgacgaacgagttcgagctggctttatcgacccagatttggaataaccgagtgacgatttctgctaacggtaacatgatggagaaagcaaagactaattccaatacatcaatcacgggtgattttgacgtggatgtgaaattgaatcgccaaggaacactccatctgaaggcctattcacatacagatgagaagattacctacaatgcgaccgaaaccgtgcagggtgtcggtgtctcttaccaggagacgttcgataccttccgggaattattccgtaaatatctggctatttttaaacggaaaaaacgaccgtcaaccttcatgcaatcctctgataataagcaatgatttccattttttaactttccattctcaattttcaactctttatcattgtttttttgattttttttcgtcaaattgtgctcgttacgtgaaaacgtcgaacctaactaaaattatatcatgaaaaaaatgaccgaacaagagtacatggaccgagaggccaaatacggtgctcacaattaccatccacttcccgtggtgttagaaaaaggagaaggtatttacgtgtgggatgttaacggaaaacgttatttcgattttctgtcggcttattctgccgtgaaccaaggacactgccacccgaagattgtagaggcaatgacggagcaagccaaaaagttggctttgacttcccgggctttctataataacgtgttgggtgaatgggaagaatatattactaaatatttcggctacgataaggtgctgccaatgaatagtggtgccgaggctgacgagaccgccttgaaattatgccgtcgttggggatatgacgtgaagggaatacccgccgatcaagccaagattattgtttgcgataataatttccacggtcgtacaatcacgattgttacactttctaacgatccttcttcttatgccggattcgggccttttactcccgggttcgtgagaataccgtatgatgatattcctgctttagaagaggcgttgaaagacccgaacgtggcgggattccttttggaaccgattcaaggagaggctggtgtttacgtgccacatgaagggtatttaaagaaagcatacgatttgtgtaaggctcataacgtgttgtttatggctgatgaagtgcagaccggtattgcccgcacaggtaaaatgctggcgtgtgaccacgagggggtgcgaccggacattttgattctgggtaaagccatttccggaggattgatgcctgtttcctgcgtgttggcagatgacgagatcatgctgaccattaagccgggagaacatggttcaacctacgggggaaatcccattgcggctaaggtgtctatggcagctttacaggtaatcaaggatgagaaactggaagagaatgccgaaagactgggtaagattttccgggagagaatgaaggcgattaaatccgatatggtggaaattgtccgcggtaaaggtttgctgaatgcggtggtaattaccccgaagaatggcaagacggcttgggatgtatgtttgaagttgcgtgataatggtttgttggctaaaccgacccacgagcatattatccgtttcgccccgcctttggtaatcaatgaagagcaattaattgaagcgataggtattatcgagaaaacattaaaagagttcgagtagtcggacttgaatgtattattaggcatcttttcatgatcacgagtttgatcttgaaaagatgcttttttattgcctttgggataatccatactaaatcttacgtatatcgtgttatttctctgttatagtttcgatatgtcttcgttcctataaaggaaaatatatcgaaactataacagagaaataacgaatagatgtaagcttaagatgggagtaagacaaaggcatttatggggcaatattatcttatattatttctttaaattgtgaaaagtttatttttctgcatatatttgttttattaaatatccctcttatgtcaatagattttgattcattactagaaggcgttaataaaaaagatatgcgggcgtgggaagacctttatgcagggtattatgccgtgctgtgttcttacgtgaacaatatcttgcgagaccgggatcaagctcaggatatcgtgcaggatgttttggtggctgtctggaaatcttccaaacagtttggggatatgaaggaattgacttcttatttgtatcgctcttgttataacaatgcattgatttataagcgtaatgttcaaattcgtaagggaatagaacagaaaatcattttggaggcagaagtggaattttcagacgaaatttttgctattaccgtgagagatgagttattgagacaattatattgttatatcaaggaattgccggatggtgcccgggaaataatggaattaagtgttttgggattgtccgggcctgaaattgcagaaaagttagggatcacgattcatacggtgaaaacacagaagaatcgaagtttcaagtatttacgagagaggttgaaaggttcggttctgttgtttttaatttaatcaaaactttttatcgtttttgtcatactctttatgacttcatgtattatacgatcaaatgatctattgttgatgtttcgtgttttttaccggcataacggtaaatacgtggatgaataaaataacaggagatgaaattggatttacatagagtgatagaattgtttcaaaaatctttttcggcttcgctttccgataaagaaaaagaggatttggatgatgttttgcaaaatgattatttgaaagaggcatacaaccaattatcagatgaaacttttgtgctggataaatttcgggagtttgaagagtatgagtacaaacctgcttttgataagttaaaagcttatcggtatcgtacccatattagtcgatggattgcgtggggatcgtccatagctgcggtcttgatccttatgtttgtttgggttcgctcttgggaagatcgtggtgatatgcaggagttagttaaagaaatgcaacataatattatacccccaggatgtaatgcggccattttgaagttggcagatgggagaatgatcgaaatcgggaaactaccactggaacttaaagatatccaaggatgcgtggtaaaatatgaaaatggtcgtctttcttattcttttggggaagaagatcgggtaacggaggcttacaatgaattggttgtgcctgttggtggagaatgtcatgttcttttagatgatgggacggaagtttggctaaatgcagattcaaaattgaaatatcctattgcgtttagtggggaaagtcgtgaagtgatcttgtcgggagaggcttattttgatgtgaaaaaggatgctcgtccttttgttgtaagtttggaatgtggtgatataactgtattaggaacctcttttggcgtgagtgcttacccgggttatccgaattatacgactttggtcaagggaagtgtccgttttacttctctacgacaggaacaagttgttttgactcctggagaacaggctatagttgatatttccggaactctggagaaacggaacgtggatgtggaagagtttgtcgggtggaaagatggcatgttcattttcaaggataaaccattggctgaaattatgaaaatattggagcgttggtatggagtaaacgtgatttttcagaatgaaagattgaaagaattggagtacacgggtagtcttgaaagatatgattctattaatacattcttgcaattgttggaaaaattaaaagaaattcggtatgagataaagaaaaatacaatcatcctatctaaataaaaagagaaagacagacaacaaatttctcaggttcggtgtctgtcccttctcgatttatatta

SEQ ID NO: 10771 - DNA, 1465 bp, Unknown
  gut microbiota DNA sequence
aatatgaaaaaaaaacgattaattaggtttcctagcctattaaaaaggtacaagaaaaatttaatgattatgaagtggtgtattgcttttatctgcttgttcactttgaacttgtctgcgaatgtgtattctcaaaagaatattgtgtcgctggatttatctgatgtatccgttgaacagtttgtgaaggcggttaagcagcagacgtcacttaaattcatgtataattcgtctcttattcgtcagactgggaagatttcggtgaaagtcgaaaacaaagagttgaaggacgttctgagcatggtgttgggtaaagtcaatctagagtatgagttttttaataacgtgatcttgattcgagcaaaagatgaaaagaaaagcgaaccattacaaaaaaacgttagagggtgtgtgaaagatgagaaagggactcctttgccgggtgtaacggtgatgttgaaagatgcaaacttgggtgttgctacggatgttgacggtaattattcactttcttttttggaccaaaagaatttgatcattctattttcatttgttggaatgttaccggtagaggttaaatacacgggacaggatacgattaatgttgtattgaaagaggatgttgagaagatcgatgaggtagttgtgaacggttattttactcggaagaaagaaagttatacaggggtgtcgacaactttttccggaagtgaacttcgtaaagtgtcgacgggaagtattttgaataccttgtctatgttggatccttcttttgtgaaagttgtaaataacgagatgggaagtgatccgaatacaattccgagttttgaaattcgtggttccagtagtctaaaatcaacatttgaaggtaatcccaatatgccgacgtttattatggatggttttgaggtttctgcacaaaaagtgtttgatttggatccgactcgtgttcgttttataacgatattgaaagatgctgctgctacggcaatttatggatcccgtgcggccaacggggtggttattattgaaaccgaattgccgaaagcgggaaaattacagttttcgtacaatggaagtgccaatttcgaggtggcagacctttctgattataatttgatgaatgcagaagaaaaattggaatatgaagtgcgttcgggcttgtataaaactgaaaatcaaagtcctgaatatgctgacggtaacttagcttcttataatcaaatattgaaattggttaaagagggcaatgatgtggattggttagctattcctgttagagacgtcgggattgggcataaacattccgttatggctgaaggtgggaatgaaacattccgttatgctttagatctttcttattcaaatacggtaggggtaatgaaaggttccaagcgcgataattatggaggaggtgtgcgtcttcaatataatttgaagaaattgaaatttatgaactatgcat

SEQ ID NO: 10772 - DNA, 64422 bp, Unknown
  gut microbiota DNA sequence
aaacaagtattatgctttataaaagcaatcaaagaaaagatggaagttgcccggtgtgtttaagagttacgaaaaacgggaaaagaaagtatattgatttggggttagccgcaaacgacaaggaatggaacgaggaattagcccggtataaaaaggataaacggcttaatcctaattacgaaaactataacgctttgcttactcactacgaggaaaggaaagataaattgttaagaaaattcgcggaaaatagggttaattggacgttgaaccagttcgaggaacaatttcttggagcgtccaagcggggaaagatttatgattattggctaaaacagattgaacatcagaatgaaatgggaaaatatggaaacgcacgttgttataaggcaaacttgcatatactggaaaagtatgacaagaaaataaaggaacgtttgttttctgagatagatttgaaatacgtgaacgatttaaataccgcactgataaaagatgggtgttgtggaaacacgaggtttggttacataaaagcgttaaggctcatgtggaatagagcaataaaagataacgaggctccacaagatatgtacccttttggtaaagggggattctcggtaaatagcctgaaagaagaaacccgtaaaagaaacttgccagatgaagatttgttgctaataaagaacacgccccaagagtcctcctttttggaatgcactcgtagattgtttttgttttcctactattgtgcggggatgagttttcaagatatggcgtatttaaccacgcaaaatatagaaaagttcgagggaggttaccatatcgtttataaaagaagaaagttgaaaaaccagaaagaggctaggcatttgaaggtgttgataactgacgagataaacgagatgctagagtggtttaaaaagaatactattttggtaggcgattaccttcttcctattataacgatagaccacgagggtgaaaaattgtacaaccatgttctttcgaggtctaggcgttttaacttgaatcttactgcattgggaaatatactgggaataaagacattgaaattaacgagttatgttgctaggcacacggcggcaatggtgcttcaaagaaagaaagtagctagggaggtgattagtcaagtattggggcacactaatcttgaaacgactaacgtgtatcttgatagttttgaaacaaacgtggtggatgaagttgtaaaactcttgtaaattatggtattacagaatgatatgcccttgagtgacgttataacgatgttgctcaagggggaagaacgagaattacacgagagagatttactaggttacgtagaaaatctgtcacgtggaggtaaagaagcgcttcaacaagcgttgaaagaagtggaaacagccattacggggtgggatgactcctattttatttcaacctatgaaaaacgggtggatgaatttaaacaaggaaaattaaatcgtgatgaatattatttggaagacctgtttttcaaggaagatttattaataaaagagggtaaagtggggctgaccgtggattacttgtacgatgcaatagaaaaactaggttttattgacggcaaccatcaagacgcaataactagtgcttgggcgttagatgatattgagtttttaaaaactcaatgggaggaattgtcattaggtcaaattagagcgttactggcaataattaaagacgcccttaaagcggtatcccctaaagtaggtaacgaggtacagaacgctaatagaccccaaaaacagctaactgaataccccgaagcgtttggggtggacgtgtgttgtgaaatgacaggttataaaaagaacacgatttataaattgaccgctaggggagatctgccgtgttgtcgttctggtaataatggacgaaaacttatgtttcggcgtgaagaagttttagcgtggatgacagcccggcggcaagaaaccaatgacgaatttataacacgcatggacgagcggttagtggctcgaaaataaattaactataataacctaagaatgtatacgctacttgtatacaattaaaaattgatagttatgtatgatacgataatgttatggttgggtaagaaagatataggtgatgagtacaattatgaaaatgtattacgtaagatatataaaacttgcacgtttgagaaagtacggggtggttgtgggtattatgaaaaccttagaatatcggtaacggaaaatagggttttgtgtacgggtagtttctctaaatttcaaaaaggtaataatgttaatcctatttccatggaacaacttaaaaaggtaataaattatctaagccgtgtgctaggtgtacctatggagaaagcggatgtattagttgttgatattgcagaaaattttgtcatggaaaagtcaccagaactttatatagaaaagatgagaaatctgggtacgttcagttcgaataactgggaaagtactaaatacttctcttcaagagatacaaccgtacgtttttacaacaaaacgggggaactccggcagaagaatcatcatcgccccaagcgagaaagatgttctctgccggagagggaaaagaaaaatttgttaaggtacgaggtgcgcttcaaaaaagggaagattcggcaaatgtttggacgtggattaaaagcttgtgatctctataataagaatatttattggaggtttatttctgaatggttggggtgttatgatgatatagataaattgccagatagtgtcctaaacattacctttgagcaaataaaaacgcagagggacatggaagattggtgtatttgtcttgctaacacttttgttaatatccctgaatttatcaagggacaagtattcaagcatagagaaaatccacaggagggagatcgtcagtatcataaaaggttacaggatcgacttcatgaggctcttgcgcattatcaagattacatgacgccctctgatctgatacctgaactcaccaagaagattgaagatcgtctaacatggttatacgaggagtcttcggatgcttacgagaaagactagagatagtgaatagccgggtggattgcttattcagggaagtggtgttagtggctgtaaagggctaaaagaggaatagaatttaggttggtgggtgtgatgggggtaatgagcgctatggtaatataggattgtgaacacgtgtgatatatcctaacaaataaaatgaggagtgaaatagagcgatacagggattaacgggtattgtcatggtgttattattccctaataaaatgcttgtctaatagagcctaaaagaggaattatagtaacaaggaaataaggggggatggatacttttgtagtaggtgtctaaaaagaaagaatggtgggggtacaagtcaatgaatggtacaatgtgggtgatgaggcgggtaatgtgcgtcattttgctagtgtaataaaggaatggaagtgtatcaagcgtgtggtatatgggagattaacgtgtttgttgtgagcggttttgttacagggggtatggtgataacggtgtggctggcaaaagaggatgtaaataatttgaagcccctcatcggagtattttgcctaaaatcttgttgagtgtcaagttttatataaatttgttccacgacacccctaaaaacgtttgtgaaacgttgaaaattaactatatttgtcgtgctgataaagtaatttgtcggtgacatattggttattaggaagcgtttagctttgtcccgtttttagaaatctggacaatttcgaatcacacggggattggcgatacaaacgttcatgcttgccgtatatatattcattatatacatggtttgcgtggggtgtcgttttatctcgtgtgatgggtttgtccagaacctctaaaacagataatcctaacagtcccacgctttcttttttgtataaaatcctgttggggctaggggtattaataattagtccaatgaaaaaatatttattgattcttttcacggttggattgtttacagggtgtgacaagtatgacgatggagagctatgggacaatattaacaacttggaagcaaggctaaccgcacttgaaaagcaatgtaaagagatgaacacgaacatcgaatctatgaaggttttagttgatgttttacaaagtaatgattacgttactaatgttacagtggtgtctgaaaatggggtagagatcgggtacaagatagattttcatgttcacccgtctataacaatttaccacggggaaaaaggtgaggacggtaaggatggtcaaactccttacgtgggagaaaatggtaattggtggataggtgaagatgatacacgggtaaaggctgccggggaagacggacaggcaggtgaaacccctaaaataggttctaacgggaattggtggataggttctagtgatacaggtataaaagcgcaaggtgaaaacggaaaagatggagaagcaggaaaagacggtgtaactcccgtgataggcgtaaaacaaaatgtggatggggtttattactggacgcagaaagtaggggatagcgagagcacgtggatactggattcggaagggaagaagataaagactacgggagaaaagggagattcgggacaaactccatatattggctcgaatggaaactggtggattggtacaagtgacacgggtgttaatgcgagaggagaagatggacagaatgggataacgcccgtcattggttctaacggaaactggtggataggttcccaagacacgggagtgaaggctcaaggggaaaacggtaatgatgggatcacgccccagttgaaaatagagaacgataactggatgttgtccgtggataacggtcaaacgtggcaaaaccttgggaaagccaagggtgacaagggtgatagtggagattcgtttttcaagagcgtggtgaatggcgagaaggatttaacgctagaactggaggacgggacggtgataaaattacccaagcaacaagtgttctcgatcacgctggataaaacacgtttttcggacgtgcttccctctacctcttacgaggtgaattacaccatagcgggggaggaaagccaacgctcgaacgtggaaattatcgccccggctgactggaaagctgttgttcagagaactaatgaccggagcgggaaaattgttgtgacaacgccctctttcgtgacggatagcaaggtgctcgttcttgtttctgacgagaatggtggtaacacgttgatgaaaacggtaacattcttgaagggtaaaatatctgtggagaagaccagttacacggttgaatctggcggggaggtgatagatgtcaaggtggaaaccagcattgattacgaggtgagtgtagccacgggggatcaatcgtggatcacttgtgagacgtacccgcttgacaagggaagattcaccttgactattcagccaaacagagacccggttttccgttacgccacggtggagctggtgaataatgacgggttcgtgctggagaaaatttctatcacccagaaatcggctgttgttaaggagattcacgtggaaacagcgggaacgttggaaacgttagttaccacggaagagttaaatggttacgagaacgtcaaaatcacgggacgattaaacacgtttgattacgactacttgaaattagcagggaatttgaaagaagtggatttgtcggacttggacatgaacacaattccagcgagtgccttctccggtagttccttgcaaaccgttttgttgcctaaaaaattggtggtaatcccggacagggcgttttaccagagtaaaatcacttcaataacaataccggaaactgttattgaaattggggagtacgctttttatcgatgtgatcaaacgagtggaaatttggtgatcccgggtaacgtggagagtataggtgcttatgcgttttacggttgtaggtttgatggggagttaaccttatcgagcttgaagttgaaagagataaaggagtacacgttctgttctaatggtaaattcacgggaaggctggtgttacccttgaacgttgaaaaaatcggggggtacgctttcggttcctgttccgggttctctgggttaaccttgaacgaaaatttgttatcaatcggagaatatgcttttaatgggtgcagtggatttgaagggaatctcgttattccagataaggtacagacgataggcaggagggctttttatggttgcacgggatggaaaggaaacttgatcgtggggaaaagtgttactactttaaattcgggttctttcactcggtattataagagcggaggaatagatgaaggttctttattttttgctaaagtatattttaaagggatggttcctccttcttctgcgttagaagcttttgggttgaagagcttttggacgggaggtaatttggaatatatacgtttgagttatgttgctgttcctatcggttgtaaagatgcttacatgagggcgttttctaattatattgatgttattgaggagattgaattctaatttatacatatatgaaaatagtaaaaaatcaaacgactaatgtgtattatgtgagatacaatggtcaaattgaaaaagcgcaattgtctgaaatagggaaagtgaaaatgctctgtttgttggaacttccgggtaaaggagcgccaatacctgttagttcgccttcatttagtgggtgttcaatggatgaggtgattgataaatttggtttaggtgattttgtgattgttacaatctaaattgtattcatgtattttatattattgagaatgtattatgtgaatttgttttattgcaataaagcgggtttacgggtctaataaacaaaattgatattgtagctggtaataatagccagctacattttttattggctatgcgaggttattagagagtaaaaacgggtgagtggatggttggttgtgcgtgtcgtggtaaagagaaaatatggcggggtaataaagcgtggatagtgtatggcacgggtacaataaaaattgtcatcgataacccataaattgaataaagccggggtagtactcctaataaataccaaaagaatttgtgtggtggttggtattcgttcgtattaagttgcccgaaaagtgtaataaaaatgtaatcgcaataaaaaagagaggttgtttaaacctctctaattgactgatgctcagtagtcgggatgacaggatttgaacctgcgacaacacgccccccagacgtggactctaccgggctgagctacatcccgaaatgcggatgcaaatgtagtaaaaaattttggaatgaaacaaggagttgaaagaaaaatctgatgattgtttgtgctttttggcttagattgcaggttttcatgggtttggggaatgagaatacggggatatggggtaaaaaaaattggataaaccatttttttaggtaactttgcaatccattacgtgaaattgtattgtaaattaaaagaaaggaattgtctatgtcaacagaaaatgctatagaaagagttaaatgcttgattatagggtcagggcctgccgggtatacggcagcgatatacgcatcgagagctaatttgaatccggtgttgtacacgggaatgcaaatgggtggtcagttgaccacgaccacggaagtggaaaacttcccgggatacccggaaggcgtgaccggtccggtgatgatggaagatatgagaaaacaagcggaacgtttcggaacggatattcgtttcgggatcgcgacggatgttgacttttccggtcatcctcacaaggttacgatcgacggggagaaggtgatcgaggcggatgccgtgattattgcaacgggtgcaactgccaagtacttggggctgccttcagaagaggcgttccgcggggctggtgttagtgcttgtgcaacttgcgacggattcttctatcgcggaaaagacgtggctgttgtaggtggtggagatactgcttgcgaggaggctacttatttggccgggttgtgccgtaaagtatatttgattgttcgtaaaaactatctgagagcttctaaggctatgcaagaacgtgtgttcagaacggaaaatattgaagttttgttcgagcataacacgttggaattgtttggatctgatatgggggtagagggtgctcgcttggtgtacaagaagggaactccggaagaagctaccaaggaaatcaagattgacgggttcttcctggctatcgggcatacgccgaatacagaagtgttcaaaaaatatattgaagtcgacgagcaagggtatatcgttaccgaaggtaagtcttgcaagacgaatgtaccgggtgtatttgctgcgggagacgtgatggacccgacttatcgtcagggaattgctgctgccggaaccggttgccgtgctgctattgatgcggagcgttacataggagaattacacgcataaagcgattttttttgaagagaacttttttgaaataaaataaaagctgtttgaaggtacctttgaacagctttttccattaaaatgatgaatgatgatgagatactgcattgtttgtttgctgttggtaatcgtttctttcgggcaggtgaatgcacaggaaaatcgtaatggctttcgattggacacgatctataaacccggggcaaaacgtcaagtggtgaaagctccagtgaaaaagagtgtccccttgaaatcgtctgtgtcccggaaagtgggaaaatggacattaagcggttcttgcgggatgtcctttggggattataccagtatagacgtgtctccccaggtcggataccgttggaacgagtttttctcggccggtggtggggtgagttacaattatcatcattcttccaatcgttatgatatgaattatctcgggataaacgtatttgggcgggtgaatccggtacgatatattgctcttcaaattcaaccggaattaaaggggagttggggaaagtcgtatggaaagaagatagacttccgttatgttcccacgatgctggtaggcgggggtggagttattcccaccggaacaggctctatctccgtgatgttttattatgacgtgatacagaatgagtattctccttacgggaaaaattgggtctgttccgtgggatattcctttaatctttaattatttaatcgtgaccatcgtggctccatagccatattgtttgaaagaagcgtcttgatggttgaagcgtttgtacttggtttggagttcccaaaggatgcgttgtctcaataccccgtctcctttgccgtgtataaacacgatcttttggccccggcggagtttgtattgttccagtgttttgtggaacacgtccatctggtagtccagcatatccttgtttgccatgcctgtcgtgtcgtcgagtagtttgtctatatgcaagtcgatctcgatgatgttgctattggattgtttgggagtttccttgtggggcgtgtcttccgttttatggggcgttttttgtaaaaattgttccggaatggtttctaacccttcttctttgaggatggattccttgtccagtggtcggagtagtgaggtggcattgaaccagcgggtatgtttgtaagctcccgccttgcacaaatttaccggagtaaccttaatttgcgtgtcaataacgtttttaagagcatgaacacctttctgatagaacacggattgcacgtgtatcgctttaatcgtgtctatttctttgagcgagtaattgccgatcaggtatgtcgtgttcggattgcagttacctgccgtgattccggtgtatttttccccgtcatgaaacgagatggaataaaggctggtttgagcggtatcgttcacgagataaatatcaaaccgactttctgtcaagttattaaagttctcggggacgaatgcgatataaagggtgtcggccgattccataaccacgtttttctgtccggatatggacgtggcggatgctgttttggtcatgttgctatctgaatgaatgactactaggttgtttactgatgcaggaatttcaaatccgtattcgtcgcaatatacgttcacggtgttgttatcaatgatgccggtaactttgccctctagcttgtctgatataaatcgtacgatgtcgcctattcttatattcatgtcgtcttctgttttattgttaggcaaaaatagtgtttttttcatttgaaaatattaatttagccagctgattggtgagttaaaaataaaagttaaaagctaaaagggaagaaagtagagattaaattaatgattactagttaattcttgatctgcctcgataatgaagtgaaataaaatataatataatgacattacaagaatttcaacaatcaattagggaagggattccggcagaattgccggctccgaaggcttacgaaccggagattaaccatgcccctaaaaggaaagatatcctgacgaaagaagaaaagaaactggcgatacgtaacgctttacgttattttgacccgaaacaccatgccgtgctggctcctgaatttgccgaggagttggagaaatacgggcgtatttatatgtatcgtttccgtccggattacaagatgtatgcccataatatcaatgattatcctcacaagagcctgcaagcagcgggtatcatgctgatgatgaataataacctggattatgccgtggctcaacatcctcacgagttgattacttacgggggaaacggggcggtgttccagaactgggctcagtatcgtctggcaatgaagtatttgtcggaaatgactgatgagcagacgctggtgctatattccggtcacccgatgggattgttcccgtcgcataaggatgcgccacgtgtcgtggttacgaacggtatggtgatcccgaattattcaaagccggatgattgggaacgttttaacgctttgggtgtttcccagtacgggcagatgacagcaggttctttcatgtatatcggtccgcagggaattgttcacggtaccacgattaccgtgttgaatgccgggcgtaagatttccaaacatggagaagggttagctggtaaattgtttattaccgccggattaggtggtatgtcgggtgcgcagccgaaagccgggaatattgccggatgtatcagcattactgccgagattaacccaaaagctacgcatacccgtcattctcagggatgggttgacgaggtgattgatgatctggataagctggtggagcgagtgaaagtggctcgcgcgaagaaagagacggtttctatcgcttaccaagggaacgtggtggacgtgtgggaacgttttgcggaaggagatattcctgttgagctgggatctgaccagacttcattacataacccgtgggccggtgggtactatcccgtgggtgtgagtttcgaagagtccaagcggatgatggctgaggaaccggagttatttaagcaaaaagtacaagaatctttgcgtcgtcacgtggctgcaatcaataagtgcgtggctcgtttcgatacttacttctttgattacggtaacgcattcttgttggaatcatcccgtgcgggtgctgatatcatgaaaccgaacggagatttcaaatacccgtcgtacgtgcaggacatcatgggaccgatgtgttttgattacggtttcggccccttccgttgggtatgctccagtggtgacccgaaggatttggcgaagacggatgagattgcagctcgtgtgttagaggaaatcaagacacattccccgaaagagattcaacaacagatggatgataatatccgttggatcaaggctgctatggagaatcatctggtcgttgggtcgcaagcccggatcttgtatgctgatgctgaaggtcgtatcaagattgccgaggcatttaacaaggctattgctgccggggagatttctgctcccgtgatcttgggacgtgatcatcatgacgtttccggtacggattctccttatcgcgagacttcaaatatatatgacgggtctcgtttcacggctgatatggctattcataacgtgatcggggattctttccgcggtgcaacctgggtatctatccacaatggtggtggtgtaggttggggggaagttattaacggtggtttcgggatgatgctggatggttctgccgatagcgacaggcgtttgaagaatatgttgttctgggacgtgaataatggaatctcccgtcgtagctgggctcgtaacgaaggggctgtttttgccatcaaacgtgccatggaggtgaatccgaatttgaaggtgacactaccgaactttgctgatgaccagttgatagagtcattgttttaaataaaatattttctggtagcggggaatgcttttgaacgggcattctccgttttttattgctcttcttctagggtgatgggtattacttgcactgtagttgtgccgtactctcgttagtaagtcaacgggaagttaaccggaagtcaacgggaaattgacgctccggggatgtgcactttcgcttgatcttgtcttgaaatgggaccaagatattaacgagacatgcctacgactccggcgagtgtacggcgcaagttacttgaatagggtcgtgaatttcgtgggaacgggtgtctcgaatttcattacctttcccgtgacgggatgagtaaagttaagcttgaaagcgtgtagggccaagcggtgtaaggggtttttcgtggccccgtattttggatcccccgtaacggggtggccgatttcctgcatgtgtactctaatctggtttttacgtccggtttctagttccagttctacgagtgcgaattgccgatttgactttagtgtcgtgtagttcgtgatggccagtttgccatcttgcgaggaggtggcatgtacgatcaaggctttattttcgctgatataagatttcacttgtccttgttccggttgtgggcatccctcgacgacagcgacatatttccgttcccggatcatttcgttccagttcttttgtagagtttcctgaacctttttgtttttggcaaacatcatgataccggaagtttctttatccaagcgatgcaggataaaaatgtggttccggggatctttgtttttcaagtagttgttcaggatgtaataagctgtcttggttttatctcgctctgttcccatggaaagtagtccgcttgccttttccacgacaagcaaatgttcatcttcatacaggaggttgagcatgggatggtgaaaaggagccgcgcttttgttcatcccgacggaaaccgtgtccccgggtttgagaggcgagtcgaattgcgtggtgatgcgattgtttatctgcacgagtttgtgggccaagaatgattttacggcagttctgctttgatcatgtaagacttgtagtagaaaaggcattaacgtgttttcttcttgtacttcaaaacttcggctacgtggggctttggcacgggatgaattctggggtttcatatgcttatttgttttaatcggggacaaaggtaataaaagtaaggacgtgattcgtgggtttgtgcgaaaatagacacttgttatttgggtgtgttgcggaattagaggcggtttattggaacttgggctcacactttgctgtagattaatatttaggaatttattccaaatattattaaccaacaaatgatcgattatgagtaacaaattattattactgttgattttaggcgtcgtgtttttttccgcttgtagcgatgatgacaaagatccgaattatgatgggacatataaagattcgggattggagttgtcaagggacgggatggtattgagtggaaagagtgtcgctttatctggtaacacgctgaccttgggtaacgtgattccgggagaaccggcattggcgattcccgtgacgatcacgggaagtgcagtggaaggtacgagcagtaatgacttccgggaagtgaaggtctccgggaaaattgaaggaggaaaaatgaacctgactcttgcggtgaagaataaggccacggatattgagggtacttgggcggtaggaaatctggatgcaggcattatggctacacattttactttcacgacagataaggaaaaggtgaaatacggtgagactgaggtcgctccagagaatgtgatagggtttgtgaatggcatatttggatggatgttgcccacgtttttgagaggtataactttcacgaatgatggcaatatcacggcttcttacaatagtgatatgaataatccacaatatgcaacgtctcctaaaggtatggccttttataatttggtgggaggaaagttgtatatctctgcaaatattacaggcatcgtggaggatattgggcgtagtacttctgacccgttgacggagatcatggtcgtattggaacaggggcttccttttgagatctcgaaagatacggaaaaagaaacaatggatgtttatatgatccgggagacattattaccatttatggctttgttacccatgttgggagaagttatgcctgaagaattccagaattacgctggatttatcacggatttgggaccgattattcaagaagggaaaacggcggaattgggattggtgttgacgcaaaagaagaccgcagaatagtaatattgtacaagatgatttagagagttatgttgcatatggtgatgtgactctctttttgtggaaaatgatttatatggaatattctttatataggtagtgtggggttattataaatagttaaatgaaatgttatgaagaacaagtttttattattaattgttttaggaattgtattttttgctagttgtagcgatagtgacaataaagatacgccgaaagattttaacgggatttattctacaacgagtacggatcgggtgttagatttgaagtatagtaacgctgtctttatcggaaaatctgttgattttaattctgcggatggaaagagtgcaaccttgaaattgcaaggggttgttccgggagagagtgaaaccgtattctctagtgtccccttggagtctagcagttcggtttatacgttctctgccgagaataaaaatgattcccggacagtgactttggaaggctctatcgtgaaagggaagttgacgatgaacgtgaacgtgaagtttgcccagaatgagttgatgaagacatgggatttttcagcggtaaaaatgtcatggacgaaacctcatgattatcttttgacggaagtcgatttgggatttactaaaatgaaactcactacgggtttgttggcaacaatggctcctacgatgttatcaaaagagttgaaaaattatttgcagaacgtaactttcagggaagatggaaatatcgtggcagcttataatacggctactgcaacagaagaaaatccggaaccggaggctgattggcagatgtcacccttaaatttagcacagtattgtgtgaaagatggtgtttgttacgtgtttctaagcttggatatgatcatgcgacaggtagatatggatcaggaaggacgttcaacggatacagatccgattcttggggctatagaacaattgttgacgaatggaattcccgttcagtttgaaaagactgaaggagacggtaaaggagctttgtatgtttatctggatcaagtgctgttgaaacaattaggtcctctattacctttggtagaggggttgattccgggagatacagcttttgaagcaacttttattgggaagacaatatctgttcctgttggaccgattttagagaatctaccgggagcgttggaggcaacgactgagatgcaggtcggtctgcaatttaagggggcggagtagtttgagagtatatttgttgattaggcggaaaagaaatttttagaaaatttgttagttattgtccgggtatgcatttaatgtatattcggacaatagtattaatgggctttgtttttggctagggagagaaaaaagttgtagtaggttgaattttgctatgttttaggtttaggctaaatagtctggatttaaaaagttggaaataataaccgtcagaaaattaaatatatacgaccaggaaagtgttaaaaatgtatttctcttgtaacacttgattaaatttgcacgttttttgctgataataaggctgcatggtgcaataaatgaagatttattgtttgcatgaatatttaaagagaggacggataagtcaatgtttaattaatatttaatgaagtatgaaaaacaaatttttattgttgttgattttaggtgtaacattttttgtgagttgtaatgatgatgacgatgataaggttcgaacttataatggtgatagtttgtccctttctgtaggtggtattaatttttctgatagagaggccgttttgaatggttctgttttgacattaaaacaagcccttccaggagaaaatgaaactgagtttactattattcgtgaaggaaataagattacaggtgtaaattcaaatgctaatcgggaagtggctcttaatggaacaattgatggtgataaattgggattgaatctgacattgaaagtaaagtcttctatgaaggcaaagtgggatgttaagaaattatttttgaatgtagaaccggagtatattgttgaagagggtgagcctgatttagttggattagtcggtatgttggggagtatggtaagttatataatgcctaatatttcatttgaggaagatggtaatattgtagcatattattgtaaggatatggcaaatatgggaaatcctgaggcgtatgaaaactctcctaaagggatggcattgtataatgttgttgataataaaatttatatagctttaaatttaagtgggattgtagaggatgcgactacacctaaagcagaatcttctattggacgttctgattataatccgttgacatctttgatggcgatggttgatacaggactgccattgtatttgagagatggggaagaaggtttgaaagaggtgtatgtggatagagagatgatgcttcctgttgtgaaaatgttgccgtcattattgagtgcttacggtgataaattgggagattataaagaaacgcttgaacagattgttgcagcattagttcctcttgttgagaatagtgaggtggtagaattaggtttacaattagctccttatacagaaattcctactcctgctacgaatgttcaatctctttccaaaatgattgaaaatgcaagcttgaaatttgtaaaatagtttttagttcttatatttgcagcacgaaaaagataaaatatgaatagtacattacatcatatgcatcatcatagccatcactgtattcaggtgagatgatgctgttgtgctgtaatttgaaataaaaaagtataaacgagctcgcctggattcaggcgggctcgttttgttttttttcgataccataggtgccttcccggattcagagcgacgataaaatcagatagaaatggtgaaattaaaagtcgcaattcaaaaatcaggtcgattgaacgaggacacgctcgaattattgaaagagtgtggaatttgtattaataacgggaaagatcagttgatggcacaagcctctaatttcccgttggaggtgttgtatttacggaactcggatattcctcattacgtggaggatggaattgttgacgtggcgattatcggggagaacacggtgatcgagaaacgggcaaatgtattgaaattgctagatttgggtttttcgggttgccgggtttctattgctattcctaaatcggaggaatttaccgggttagattggttgcagggaaagcggattgcaacttcctaccctaacacgttgaatgattttctgaggcaaaatagaattcaagcagagacacacgtgatcacggggtcggtggagatcgctcccggtatagggttagccgatgcgatttgtgatatcgtgagttccggtagtacgctttttaaaaacgggttgacggaggtccacacgttgtttaaatctacagctgttttggtggctaatccggagttggatgaggaaagactacggttaacggaacagttgatattcagaatgaaggcggtgttggctgccaagtgcaataagtatatcctgttgaatgcgcctgaagagaagttacaggagatttgcaatatacttccgggagtgaaaagtccgacaattatgccgctggggatgaaaggatggtattctctgcattcggtggtgaacgagaataaattttgggagtctatcggggcattgaaagcggcgggtgcggaagggattctggtggtgccgatagagaaaatggtagagtaattttagatattggattttagatttcagccgcacgggcgatcgcttgggttggcgggttacaggttttatgaatagactaaatttaaggttatgcagaaaatattatatccagagagggaaaagtggacgaggattttagagcgtccggagaataaaggagaggatttggacaaggtgtgtaaggcggtgtttgatgaggtgaggagagatggcgatgaggcgttgaggaagtacacgtggtattttgatcgggtgaggttaggacggtttgaggtgacggaggaggagtttcaagaggctgataggctggtggatgcggggttgaaggaggcgattcgggttgccaaggggaatatcgaggagtttcacaaggtacagattcccggaaagtgtgaatacgtgaacgaaaggggattccggtgctggcaggaaggccgggcgatagaccgggtgggattgtatgtcccgggcgggagcgctcccctgttttcaacagtactgatgttggcggttccggcgaagttggccgggtgccgggaggtggtgatctgtacgccgccgggaagggatggacgggtgaatccggctattttgtggacagcccggttgtgtggggtaacccgtgtttttaaagtgggagggattcaagctatcgctgcactggcattagggacggagagtgtgggacgggtggataagatttttggaccgggcaatcgtttcgtgacggcggcgaaacaatgggttggacgttatggcgtggcgatcgatatgcctgccgggccttcggagttgatggtggtagcggatgaatcggcacgggcctcgttcgtggcggctgatttgttgtcgcaggcggaacacgggccggatagtcaagtacttctagtgacttgcgatgaatcactgattgatcgtgtggaagaggagttgaacaggcagttggatcaaattcctcgcaaggttattgcaggggaggctctggggaattctaaatatattgttttacgttcccgggaagagtgcgtggagctggtgaattgttatgcaccggagcatttgatgctgagcgtgaaggattatttggattgggtaccggaaattcggaatgcgggttctgtgtttttgggacactattccccggagagtgcgggggattatgcgtctgggacgaatcacaccttacccacgaacgggtatgcccgtgcgtatagcggggtgaacatggatgcctttatgaaaaagataactttccaagagatcacgccggaaggtttgctctatttgggaaaaacgatcgaaatgatggcggataacgaaaagttggaggcacacgggaatgcggtaagggttaggaatttagaatttaaaatttagaatttggaatgaaagcattgggagatatagtaagggagaatataaaggggttacaagcgtattcctgtgcccgtgcggagttcgagggaacggatgtaaccttgctggatgcaaacgagaatccatttgcgtcggaatataaccgttatcctgatccgtttcagcgggaattgaagcgagagatcgggagattgaagggggtggaggtttcccggctggtactgggaaatgggagtgacgagttgattgatatgttgatccggactgtttgtaccccccgacgggataatataattgttttttcaccgggatattcgatgtacgaggtgagtggacgggtgaatgacgtggaggtgaggtgtctggagttggacgaggagtttcagccggggtggaacatgttgttggatagcgtggatcaatttacgaaaatgatttttttttgcacaccgaataatccggtggggaacgtgattcctttggaacgtatccgggaggtggcgtttcgttttgatgggattatcgtggtagacgaggcgtatatcgattttaccgatatgccgtcggctgttactttgcagaagacttatcagaatgtggtcgtgttacaaactctgtccaaggcttggggacttgccgggttacgggtagggatttgcgtggcggacccggaactggtgatttatttgaataaagtaaaaccgccttataatatcggttcgttgactcaaaggcggactttggatgtcttgcgcaatgatgccgattttttggagaaggtggagacgatcaagcgggaaaggaaaagggttaccggggttttgcgggatttatcttggttggaggttgtctgtgattcggaggccaattttgtattgattcgttgtgagcgttttcgggaactgtatgaatatttggtggaaggtggcgttattgttcgggtacggcatattccgccccggttgagctgcgggttgcggataaccgtcgggacacgggaagagaatgatttgttgatcgagcgattaaagaaattcggtgatttatgaagaagatattatttatagatcgtgacggtacgatcatacaagagccactagttgattaccaggtggatagtatggataaattggcgtttgttccgggtgttattggagccttgcgggagattgttcgggagacggattatcggttggtcatggtgagcaatcaagatggtttggggacagaacggtttccgatggatgcttttttgccgcctcatgaattcatgttgaagactttggcgggcgagggtgttgtttttgacgagatactgatagatgagagtatgccgggagatggttctccccggaggaagccggggatcggtatggttgagaagtatttgaacgaaatgctggatcgagagaattcttacgtgattggcgataggttgacggatatgcagttggcggctaatatggggatttgggggatattgctgggaaaggaaaagatggagagtttacctattgttttaactacagattcttggggaaagattgtgcgttttctaaaacagggaagccgacaggtggtgcaagtgaggaaaacggcggagacggaagtacgggttgcgttagatttgaatggaacgggacaaggcgaggtgaagacgggaatagctttttttgaccacatgctggaacagattatccggcacggggaaatggatttggtggtttccgtggagggggacttgcaggtggatgaacatcacacgatcgaggacacggctattgtgttgggtcaatgtttctcggaggcattagggggtaagaaagggatcggacgatacggttttgctttaccgatggatgaggcgagggcggaggtgttgctggatttgggtgggcggagttggttggagtggaatgccgcatttagccgggagtacgtgggggattttcccacggagatgacaaagcatttttttgcctcgttttgtcaaggagctaaatgtaatttgcacgtggcggcaaaaggggagaatacgcatcacgtgatagaagctatttttaaagcgtttgcccgtagtttgaggatggctgtccggcaagaggccggaggaaggattccgtcgacgaagggaagaatggattaattttagatttggtgattttagattgaaccccctctaactcccccttggaaagggggaggacacgctgcattgttgcatcgcggcgcattctcgcattaggctctccccctgtgtaaaggggagtcagagggggtagtttgaaaagaataggattatgatatttttttattgaaatgagtaaaatagtaattatagagtacggggctggaaatttgttttcggtgagggttgcgatagagaggttggggtatgaggttgtttgtagcgctgatcctcgggtggtaagggaagctgataaggtgatctttccgggagtggggcaagctgcagcggccatgcggcaactaagggaaagcgggatggatcgggtgattccggaattgaaggttcccgtgttggggatatgtttgggaatgcagttgatgtgtgcttattcggaagagggggatacggaaggattagggatattcccgatgcgggtgaaagaattcgggcgatgcagtaaagtacctcatatggggtggaatggaattcggagattgaagtccgggttgtttgacggggttgtcgagggggatatggtgtatttcgtgcattcgtattgtgtgcctgttggtgagtataccattgccacgtgtgattatcagatggctttttccgcggcgattcgtaaagataatttttggggatgccagtttcatccggagaaatcggccggggttggggaaaagatgattgaaaactttttaaaaatgtaaaagaaatgaagataacggttattccggcaatagatgttatagggggcaaatgcgtgaggcttacccggggaaattacgatgagtgtaaaacttattatgatgatccggtggaggctgcccgacgtttcgaagatatgggaatgaagcgtttgcatcttgtggatttagatggggctagggagtctcgggtgataaattggcgggtgctggaacgaatttgtgtggcgactcgtttggaggttgattttagtgggggtatcaaaaatgacgaggatatttgtcgggtgtttgatgcgggggcctcatttgtttgcatcgggagtatggcccagcaaaatagggaaaaaacacgggagtgtctggagagatacggggccggacgggttattatcggggcagatgtaagagacgggcatgtgtgtgttcaggggtggaaagtggagacggagacaacgatatacgagttaatagaggcttatatgcctgtgttgaagaacgtgatgtgtacggatattacccgggatggaatgttggggggagtctctttggagttgtatcgtgagttggtgactcgttacccggatattacgtttatcgcatccggaggagttggtgggatggaggatattcaagcgttggagaatgtggggatttcttccgtgatcgtggggaaggcgttttatgagaatttagaatttaaaatggatagagctaattaatttacgatttatgaattacgattgagaagggtggactttgtgggtggaaatctaaaatttaaaattaataaggatggttttagcaaaaagaattattccatgtttggatgtgaaggcggggaggacggtgaaaggggtaaattttgagaatctgagggatgctggggatattgtggagttggccggtcgatattcagaagaaggggcggatgagttggtgtttttggacatcacggcaagcttcgatcaccggggtacacgcttggagtgggtggaacgggtggcccgacaagtgcggattccttttaccgtgggtggtggtatttcatcggaacgggatgtggaggctcttttgaaaaagggtgcagataaagtgtctgtaaattccagtgttttgaaagacccgggtttgatagatcggttggcagcggcatttggtaaacaatgtgttgtcgtggcggtggatgctcgtcgagatggtgaagagtggcgagtgtacagtcatgggggatgggtggctacccatcgggaacttttttcatgggtgaaggaggcggaagaaagaggggctggggagatcttgtttacctcgatggatcatgatggaacacatcaaggatttgcttgtgaggcaaccggacgagtggcggatttggttaatattccggtcattgcatccggtggagcggggtgtccggatgatttttatgaggctttgacccggggaaaagcggatgccgtgttggctgccggagtttttcattttgggcagattcggattccggagttgaaatgttttttgaaaggaaaaggtattgtggttcgataaaatatttaatgaaatggtaaatattacagaattaaaatttgatgcggccgggttaattccggcaatcgtacaggatgcagatacgcgagtggtgttaatgcaagggtatatgaatcgggaatctcttgtcgagacggagcgttccgggaaagtatgtttttttagtcgttcccggcagcggttgtggacaaaaggagaggagagtgggcactttttacgggtgaaggaggttctggtagattgtgatcgggattcgttattggtgaaggtgaatcccgtgggaccgacttgtcacacggggcaagatacgtgctggggagaaaagaacgtgaataaggatttcttgttttacttgcagcgatatttggaaaaacgaaaagacgagtctccggaaatatcctatacggcccgcctgattggaaagggaattaacaaggtggcccaaaaggtgggagaggaggccgtggaattggttatcgaagccaaagatgataatgaagaattatttttaaatgaggcagccgatttgatgtaccactatatcgtattgttaatcgcgaagggatatggcttggaggatgtggtgagggtgttggaggggagacatgggaaagataaaagttaaaaactaaaagctaaaagttaaaagatagaggataaatggaggctgtggaatgtgagagaaaattattaagtcattcaatttaaaatctaaaatttagaggggcttttgcccttctagagttttatgcggatttggaaggagaggtcgaatagtttgttgtcgttgatttgggttagagaggagctaatggttgatttgtcggggtagtaggtgagaccggctttcagatagagggtgatgagagagaagggtttccagttgagattgaggtaggagcggaagccccgatcgtacaaggcgggaaaggagtaaccgtagagaacgttgttttcgtaggcgtatattctggtgttgtagctgtccgtgtcgaagtaagcgaatcggaattgggcttttaggctggtttggagggatgagtacataatgtcttgatagaataggtaaccgccttcgtgtttttctttttttacgtaacgagtgtaactggttcgggtacgggattttaattgctcgcagatggagtaggtaaattggagcctgtattcctgttttacacgggagacggattgaagggattctcctgttttatcgtcttccggtttgtcttcgtgtttgaaacgaaacgaacaatcccagcgagagcggttgaacgtgacatctcccatgatctcttggcctttgccggggatggttgcttgataacggggcgagaaaaaacggaaccgatcataataaacattaatttttagattgcggaaaggggtactttcgagacctaggtataatccttcttcgtttgtcgtgttggagtattcggcaaaaccgctattgtagtgagagtgatagcctttatcgtagtggcgatagagggcacatagggcgagtcgaggaatcccgctgtagcgtaaaccgttgatggttgcccatgccccgttgccactacgtgctgtttccccgaataggtagaaatggtagcctccggttttgtagtcaatgcttacgagagtgcgttgattacccgtttcgttgtattgttggtaggaggctttgccaatggttaggggcggcgaaaagttataatgtaataattgaataccgatgcgaaagtaacggtgatttagacgggttgataggcctgtcgtgaattcttttaagatgtgttttttatcgcattctgaggaattccgatgataacctgtttggtaaagggaggcggtttgcacggcttccggagtaagggtatcaagatcagcgagattaccgtccgttttcttgtaagaaacgaaaatttcggtggtaaccgtgcgtgtcgggtgcagactggcggctatacctcgtaggtagcggttttcatcggtagaggtgtagggtgcaatgccgtttcctgatttctcgttactaagagtggaggtcgatttcccggaagagtaaccgctccatgccagtaatccctgtccccattgcaatttatagtcaccgataattatccggtggataattttttccggggtgtagcatacgtggacggaaagaaagtcaaaccctgttttctggtttttcgtgaaataattttctcccgggtcgttttctaacgtgaggcccccttgccagcgttgctggtttgatattttgtattttagtaatgtacctacgggtggtccttgaaagcggctttgttttttggtgatatagtccttttcgtacaaaaaggctttccggctgaactttttgtaaccggcttgtttcgggcgggtcatttttaagcgagcgaggatttcttgcgaaaggtgataacgggattgcttttcgggtgtgtacgttccgatgcgtataaatggtttgatgttggataaatcctgttgactgattccggtgatgagtagaagttcgttcgggtgagtaaaagccccgtgttttttacggaaatctagtaagttgtctatctgcgcatcggaaaggaaaaataacattttcaagctatcgaatccggctgaattgaggtttatcggttgtacggagaggtggatcagagagttgatcatgtcctcgtaataatcttccgatgattcgatgtcgtttgtttccaatagtttttcaatatccggtacgctctgtgagtacacggagcaagggataataaaaagtaaaataacgacatgtataatttgtcgcatgatataaatgttttcgtcaacggaaattgattgcgtgaacaaatacacgtaaatagccgatgtttcaaaggtaggaaatgttttggatatttttctaaaaatcttgttttttagttatggcgggtcaatatagttaaaacaggaattttgtaagttatgatttgtagtttctgatcgagagataaactgtttcgatagtgaataaagaattcccctaaaagttcattttaggggaattcttatattgattctttccgggggaattaattcgtcttgtaatcgtattttacttttgccagttcgttgttggcatcaacgattttctttttcaaagattctttgaagtctacaatcttggcttttaatgcgttgtcgccaatagccaaaatttgtgcagccagaataccggcattcatggccccgttgatggcggtggtggcaaccgggatgcccggaggcatttgggcgatggctaaaagagcgtccatcccgtcaagagaagcgttgatgggaacaccgatcacgggaattggtgtcatggcagcgataacacccggtaggtgtgcggccattccggctccggcgatgataacttcaataccccgtttctgtgcgtttttggcaaaagactccacttctgccggtgtgcggtgagcggagagggcattgatttcgaaaggtatgcaaaaatcgtttaacacttttgcggctttttccatgacgggcaggtctgacgtgctacccattataatacttacttttggatccatatttttaccggattttaaattcaaagttgtacttttgcgcaaagttaaataaaaaaatggattagagagacgataggtctatcattcaaaagagaaatatgcacaggatgaaaagaatcaaattgcatgatcggagtttccgactgatgattgaggctgacgtgatcgaccgggaaatagagcgggttggagcccagatcaatcgagaattggcgggtgaacgtcctttgtttctgggagtgttgaacggggcgtttatgttcgtggctgatttgttgaaacatatcacgatcgatggggcggaaatcagtttcgtgaagattgcttcttatgccgggttgtcttcaacgggaaaggtgcaggacctgatcgggttacgggaagatattgcgggacgaaccgttgtgattttggaggatatgattgattcgggagagtccattatgcatatgaaaaaaatattggaagagaaacatccgaaacaagtgaaggtggctgcgttgttttacaaaccgaaagcgttgaaatacgacctaacgattgattacaagtgtattgctctggagaatgatttcgtggtagggcacgggttggattatgacggattagggcgtaattatccggacctttatacaattgaaaattgaaaattgaaaattgaaaatgacaaacggatgatgtcgttttcagtttaaaatttaaaaaatctataaatttaaaattattgagatggcatcaacgaactttgtcgattacgtgaaaatattctgtcgtagtggagccggagggccgggatctatgcatcttcatcgggataaacgttctgccaagggaggacctgatggtggtaatggtggacgcggaggacacgtgatattaaaaggaaaccggaattactggaccttgattcacttgaaattccagcgtcacgtgtatgctgaagacggtgagagcgggagtggaaatctatgtacaggagctgacgggaaagatgtcattatagatgttccgctgggaactgttgcccgggatgcggataccggggaaacgatttgcgagatcacgaaagacgaagagctttgtgttgctgttcgtggtggtcgtggtggtttgggaaactggaatttccgttcggccacgaatcagacgcctcgttacgcgcagccgggagaaccccgggtggaacggagtgtcattctggaattgaaagtgcttgccgatgtcggtctagtaggtttcccgaatgcgggtaagtcaacgttgctatccgttgtttctgcggcaaaaccagagatcgcaaactatccgtttaccacgttggttccgaatttgggaattgtgaattacagggataaccgttcttttgtgatggctgatattcccggaatcatagagggggcgcatttgggaaaaggtctggggctgcgtttcttgcgacatattgaacgaaattcagtgttattgttcatggttccctcggatagtgaggatattcacggggagtataaaattttgttaaacgagctaaaacagtataatcccgagttgttggataaaaaacgacttttggctatcagtaaatcggattttattgataaggagctgatggccgaaatggagaaagatttaccggatattccctacgtgttcatttcttccgtaacggggagtggaatcatggaattgaaagatatgttgtggagggtattgaacgaagagtagcgaacggctttttcttattttatatttttttcaagtaaacggggtaaccgaatatgttaatcaccgtatattcataggaatttaaatgaatgacttatgaattacggaattagtgtattgtttcgatttattcccttgttgatggcgttgatttgctttttctttggagggtatatctttggttacgggaatgatgaagcacggtgggtagcggggccggtcgtattttcattaggcgtactttgtattgcgttgtttgccacggcagctacgattattcggcaattgatccacacgtataatcctgtcgcgaaatatttattacccggtatgggatatttattcgctttaggaacgatgctctggggtatttatttgttcagttctcctgaaccgcagaatttatttgtcccaggacacgtgatctgtggagtgtcgttgattgcggcttgtatttcaacggcggcaacttcatctactaaattcactcttattccggtgaattcgcatgggacaagtgataaaattaatcctaacggtttctcgactaccacggaaagggtgctgatcgggttaaccgttttgtttgccacggtagcgtgggtttgggcgatagtattgttgtctggctccgggggtgatcatttggttgccggaagcgtgatggccgggttggcttgtatttgtacgagtttgatcgggctggttgcaagtatatctcgtcagatcaggaatgattatggtgagaaagatcgaaaatattggccaagactggtgtttttcatggggacgatctgcatcgtggggggaattatcgagctgttggcagcacccgtccccgtgaatacaaccggttttattcttattggtttaggtctcgtctgttttagtatttccagtaagattctgttattagccaaagtgtggcgtcaggaatgcaagttggcaaatcgtatcccgttgattcccgtgatgactgctttatttgctcttttcttgggggcatttcttttcgaggaagcatctgttgacaacgctttttttgttccctctagggtattgatcggattaggaggaatttgtttttcacttttctctatcgttagtattttggaaagcgggacttcaggcaagtaatgttctttcggaggttttgatttgagtttatatttccgagtcgcggaaactcttttgagagagttttcgcgactctttgtttgtggttgatcgaatcgggtcgggaatgttgtctgaatggttatttccatggacgaatgaagttaataaaactgggattccttttaaaaagtggtagaattcgttattttcgcctccgaaataaaagaataaagtcatggctaaaaaagagaaggtacaggagatgtttaacgggatcgcaccgaagtacgatttgttgaatcatctgttgtcaatgggtatagataaaagctggcgtaagaaggcaatgaaagttgtcggtgcggggcgaaaggatttggtgttggatattgcttgtgggacgggagatttttcaatcgaagcgttgaaacatggagtgaaacgagtggtcggggccgacatttcggaaaatatgttggccgtggcacgggagaaagcaaaagcaaaggggttatctgatcagcttgattttcagtttggggatagcgagaacctcaccttcgattcaaatacttttgatgccgtgacggttgcttttggcgtgcgtaattttgaacatcttgaattaggattgacggaaatgtgtcgagtattgaaacccgggggaaaggtggtcattctggaattttcgacaccagagcattttccgatgaaacagttgtataatttctattttagatatatcctgccttttgtgggaggggtgatttccgggaaccggaaggcgtatgaatatttacccgcttcagtgtttgcgtttccgcaagggaagaattttctggatattatgcggggtgccggttactcgaatgtttcgcaacagcggttgacttttggaatagccagtttatatgtaggagagaaatgaaaagagactgattttttcagtctcttttcattttaccattcaacagcatcgcggttgatcggcatggtcatgcatcttgctccaccacctccgcgaggaagttctgacccctcgatggtgatcatgtatttttcgtatttgttcagatcgactttattgctgatcacgtcattagcacgaataatttcaaatccggcattattcatggcttcaacggtatagttgttacgtgcgtagcctaacactttacccggggccacgcagaagaagtttgcaccgctatgccattgttctctctccatgttccaagtttcgtcttctccaccgcaatacacgggttccaagtccatacccagttttttcagggcgtgtaacaatgtcttttcccgacggatgctgattagttttccatgttgaatcttgatgtgaaccgtctggtaattgcccggactcataatcaagggctcgtaaaccatacatttgtccttatccaggaaggtgaacaccatatccaggtgaatgaaggattccggggaatgggggagttcctgtacaagaatatgttgcaccttgtcttcgtttcggttgataaagttatacatcaaggcatcgatagcgcgggttgacgtgcgcgtaccgttaccgataaccaatatatcatcccgtgcaatctgtacgtcaccgccttcgatggttaatttacgaaggggatcgggtgtcgtggccagattcaatgtcttggtgttaaatccgggtgtaaaatcgaaaatagattgcatgatgatcgcctcgcggtctcgaactgcattggccattctaccgataagcacttcgttgtacatgctcatggatgcatcgcgggtgaagaagaaattatgtaacgggcgcaagtcgtaccaatctttattcaagaatttggtcaacgtgtcacgtttcatttcaaccccttcgatcagcaaacgggccaaatcttctgcatcttcatccaataattgatctttgatcgatcccttgggtgtttgttctgcaatgaacggttctattttttcgatgcgattcaacacttccagttttgtagcatcgtcttttaaaatgtttgtcaggaggtctttgacttgataggttgtcgtgattttacctaaaacctcactgagttgtttgtattcttttcgtgcgattgataaatttagaatatcgctatagagcgccctctcagcgttctcgggagtcatgttttctacctcctcgcctggtgtatggagtattactccattcagttttccgatttcggattgaacatttacctctacaatcttagacatatatgtgtttttttgattacatggcaaaattacgatataaaggttgataaaccttataaatcaccactataattatgcaaaaggtgaaaataaatatgcactatttaaaaggagaaagggatatattacatacccctttcaatatctcgaagagttgtccggcctctccgagctggttgcatcttaaatattttgagtatacaattcgaagttttccatcacttttgaaataacttgtatacattagttccaatagaggagtatttcacctaaatattttttgcaaaattagaacttaaaattgataattacaaataaatgtcgacataattgtcggtgatagggactattgaggtaatgctttgtttcgtatttgtaatattgaaagccaccccaaaataacctgggatggcttttgataacccaaacggaattttgcaaatgatgggttatttttttatgtgtgaactttagaatctaatccaatttttaacatcggattggacagaaagtcaaatccatgagaatctgacgatagaagtttcaaaccgacttgcggtcggatgttatatacggtgtaatcataagcaatcggtcgaatttcgatagaaataaaaagtgctttggagacgaaataatcgaacccggtgacaccggcaacccggtatccgaaagcttctccgatagattttcctaaataggattcgtcattcgcttttgcttcttgtttcccgtaagaaaatccaaattcacctccataacggaaaaatagcttgtcatatttggttttcacgtatctttccgctccgaggacgatagaatactttatcttatcttttgatgttacgaaattgtaatctggaatgtctccggtttcgaattttccgtcagtgctattgccgggtaaagctttgtactcggggttgtgcttgaatgaaaatcctcccattgctttcagcgcccattttttcgcaaacatccatctgaattcgaaattcagagataattgtttatcaaaccagctggtttgaggggcggagatattgtaggtgctcaaatccggggccggggcttccataccgacaaaagaacctacgcctaaatttaaagagacggatttgtcccctttcttaggtgtaaaatcatcttttgtttgtgcgttggcaagcagtaccgatcctgtcatgatgatagcaattgtcaatactctttttagcatatataattagtttaaaatatggggctgaggtcagccccatgtgatttagtttttcttattctgcaagtgcatcttcagcagcatcgattgctgtttgtaggcgatctacattagcttgatattcagtaatctcttccttgagtgcggtgatttctctttcgagttgctcaatttgctgagttgtgtaatcgtttcctgctccattgatcaattcttctttttcttgatccgtttctgcggcttggaattcttttaataattctgtttcttctgcaagttgtgttttgaggtcttcgatctttgtgttgagggctttaatcgttttttgtttatatgtttcataagatgtgaagtcgttgaactcgtcgcctttgatataggcgttatacgcagggattaaagtaacgtcgatatacttctctctttctacaaaaggagctttttcgtccgcttttttcctgtaagctgaattgttttcagcttcaattgcagcttcccatgcttgtaatgcagcctcttgagctgtttctgcctcgttcatcgttttttgagcctcttccatggcaacttttaagtcatcaatggttgctttagctttattgatgatctcctcgaattcttctttgttggtttgtgcggtttcaagggctgcttttgcattcgcaatggcaacgacatactctccgttattcaactcggaggtcttgcttactagctcgtcatatttagcttctagttcaactactttatctttggcagcttgataatccgcttcgttatcagcaagttcttccgtaagatcggcaatagcttccgtcgcttttttcaattcagcctcattggtctcgtatgcttttttagcagcctcatatgccttttctgcttctgtttgatgacctttagctaagtcgagttgaatttgaatatcagccttttttgaaggatctgtttccgcttttagtgcggcttctaattcttttactttggcaacccatgcatcgttttctgctttcgttttgtcgttcttgtcctttaaagttgcttggtctgcttgacaagtttgttgagttttttgagctgcggctaattgtttttccaaatcttttttagttgattcgagaggtgataaggctgcttttgctgcaggaattttgttgtcattcaaatctttaagatttgcttttgcttctgttaattgtttttctgctgttgcaattcctttttctgccgtggtgatggcttctgttaaatcttctttagcaacgttgattccagtttcgatgccttgttcgaattccgggaatgcgtaatgaactcctccaacggagaaaccgttgataacagtggcttttgcactattgttaccgtttaatgctgtattgtattcattttcagcctttgtgaatgcagtttgagcagtagtaaatgccgtttttgcggtcccgtaattgtcgttggcaactttcgttgctaagataagagcttgttgatctttttctaattcgatgagttctttgtcaatagttgcgatcttagcagcaatttcttctttttcttttttcagttcgttgattttagcagcagctttctcggcagaaagattttcggtagaagttatgaattcctttaattccttttctttctctgctaattcgatttggtagcgttcaatgttactttgataattcttgatatggtcatcgaaactagcaagaagttgtttgttcaaactggtaatgctagtttgcttttggctaacttgattctccgtgtaccgcagagtttttaaagcagaaacataatcagcgtacaagccttgcagttctttgttgattttaccggctacaatagcctcgtttaaccgattaatgaattcttgttgtttggcagcttctttggcttgggctgtttgatatgctaattcgttcaacttttgttgatattcatattcgatacgaattttttcagcttcttgttttattttttcagcttgtgcgcgtaattcatccgcttcagcttctgtttttgcagcttgtgattcagcaagtaaacgttctatttcaatgcgagctgcttcgttctttgcttcactttcagcttttaatttttctgtttcggcaagaatcttttgagcttctccttgtgcttgcagcatttcggcttgagccttcagccattccgtttttgcggtacggatttgttcaactgtagcagattctttgtcatccacgcaggatgacaataaggcgacagttattaacacaaataataaacttatttttctcataacaccttgttttttaattaaacatttaataattcaataatttatttaatacatttacaaacgccttgttgtattttgcttacaaaagtatggcattaaatttacacgtgcaaataatattcaacatttttgtggttatatattaccatatattaaaacttttctcatgataattctcgtaattttgaactatgaaattggatataggagagataataaggcaagagttcgagaaaagtggtttgagtgccagccagttcgctcgtatgatcaacaaagaaaggacgttggtatatcatcttttcaagcgtcaatctattgatacagatttgttgtatcagatttgcatggtgttgaatgtggacttgtttagtctgttctcggagaaattgagagaagaaaatgatattattggggcatgtcattcccaaaaaacagagagagtatcgtccaaacggaaaattatgctggaggtagaattggatgatgaagagtatcaaaaaatgatccaaaaagcattgaacatataggcctttaattattattttaacatgaatttgatataaacaattatttccacgcctacgagtagtcgggggaaacggtggtttgtccgggtaaaatgggtattcaaatggaatttctgtctgataaagttattatcctgttttcaaattgttatgatagacttactcggatgttaataattactattgtaatctaatatattgctattttaataggagcggaataggggaggaatgggagcggaatgggagcggctcgcaatatgataacaagataatactgttttgataatgttattttacattgttttgcattaaatttttgtagaacattcctaaatccgtgagtgttgaaacacgaatttagggtattcttgaacaattttcgttttgttggttgccctcattttcgagaatatcaaggatgcggatttatccggaatataaccgcatgtggtttatatatccagtttcaccacggtaattcccgagcctcccatttgtacgtgttcatccccgcaggaacccacgaccggattggtttttaaaaaatcccgtatgatttgccggagggctcctgtacctgttccatgtaagatgcgtaggtctttcatgtttagcataacggcattgtcaatgaattccgatactttcatgagcgcctcgtctccccgtagtcctcgtacgtcgatctccggtttgaaatccatgcgtttctggctgatgttttccaagtaattggaagaggggcgtggcgtcctgttttgcgtgattttcttggctgcactgttcgatattttcgagaggcgttccactttcacggtagtcatgagaccaccgagagcgataaccgcgtttttctcgttaatttcgataatttcacccactgctttattatccagttgcacgagatctcctttgctgaaagtcggtgcttgttcctgttgtgcggcttcttccggggaagaagcttgtggacgtttccctttctctttctgttttttttcccggttttttagtttttcgatttttcttttcagccgttcttcctcttcttcttcgctggctaacagctggcgtttctcttcctcgaatgtttgtcgggccagtcgggtttgttccttttcggcttgactttctttgatttgtcggatggtgttttcgatcgtcttgttagccccggagatgagttctttggctttctcctgagcctcttggatgatcgttttcctaagtttggaagcatcatccaactcttttttataacgttctagcacttcttccaggcgtttttcattttcatgaatgcgtttccgtttttcttcccagtaacgtttatcccgtaggatttctttcaagtgcttatcgaaatttacccggtcttcaccgatcttgctagcggcatcgtccaaaatctctttgggtaacccgatttttttggcgatttcgaatgcaaaagacgagcccggtttcccgatttctagttgaaaaagcggcaacatccgatggctgtcataaagcatggctccgtttgcgactccgggtgctgaagaggcaaaatgttttaagttggtgtaatgtgtcgtgatgactcctctcgtttggttgttatttaaagcatttaaaatggcttcagctattgcacctcctagcatgggttcggttcccgtaccgaactcgtcgatcaggataagggtgtcctgcgaggcgtaacggatgaaatttttcatgtttaccagatgcgagctgtatgtactcaaatcattttcaagagactgttcgtctcccatgtcgatgagtattttgtggaatatcccgaatttactggattcttccacgggtacgggtataccgcattggaacatatattgtaataaaccggctgtttgcaggcagacggatttaccacccgcgttaggaccggaaataaggataatccgctggtcttcgtttatctcaatatccagaggaaccacttctttcccatttgcctttaagcttaggtatagtaggggatgctttgccctgtaccatagcatggagggggtgtcttcaaagagaggcacaatggcgttcacccggatggcaaagagtgcttttgcccgcacgaaatccacgaatgccatgaaatcataggctggaatcaggtcatatatataaggacgcaaatcgtcggcgaattgtcggagaatacgtgtgatttcccgtttttcttccaattgtagttcacgaatttcattgttcgtttcgatgatttccgcgggttcgatataagaggtttttccggtggtggattcatcatgcacgataccgtttaatttccgcttgaaagccgcgggtacaggtatcaccattctaccatcccggatggcgatgttactgtccttatcggcccatccttcttcctgtgctttttgcaacagggcttgcatacgccgggagatgcctgattgttttttagcaatgctatgacgaatgttgcctaaagcgggtgaggcggtgtccttgattgtcccgaattttgaaacgatcgagtccaagcgttgcaggatataggggaatacccgtacatccccggcccgggctaccagatgagggtatacctcttgtttggtgttgaagaaacgcatgatggcgttcagcgactccagtgaattttttaaaacaaccagttcatttacttctaggaataatccctctacttttatacgcaacaagaaggggcgggcatcatggtaataggagaccggaaagttctcttcctcttgacagatccgcatgaattcggaggtttcggccaaagaggtttcaatccatccggcgtcggtggagaacttgatgtcgctgaccagttctcggcccatgtcgctcaggcagttattgctgataagttgtcttattttgtcgaattttattttagattcaaaattttcgggataaatcatattgaattgaaaattgaaagtacaaaattgaaaattacttgttcgaaatcatgaacttgtgtgtcgttccctgatctgttttgatgaggacgtaatcatccggcttgatcttgtctgcgtgtttcgggagataccggatgatgaggttacccatcatttccttgcccagcgtgagaggggtgcaatccacttccaggtagtcaggtttgaaaatcgacagaatcgatatgttctttttacccgtgttgatcaggtttatgatctggtgtttcgtctctgcctgttttaagcggattgtgtccgtggtgaaacgcaagttacccaccacgatggggtaggttgttgggatgtcaaccgatttcgtgatgacttctccttctaaacgcaatacgatgttcgggggagtggcgttcgtgtacacgataatttttttagagaacacgccggggcggtctttcgggttgaacgtgacggtaacgacaccgctgtctccgggaggaatgggtttcctgttccatttgggagtggtgcaaccacacgtggtttctataaattttatcaacaggggagctttccctttgtttgtaaatttaaattcgtgagttacttttcccccgttttcttgcacgagtcccatgttgaacgtggtcttttcgaatgcgatcttggcccgctggcccaatgatagtgttgggattaaaagtaatattgaatatataagtatcttcatctgtatttcttttcgtgtgtgtaaattggaatacaaaaatacaaaaagggttggaaaagattggtttatgtcggaataaaacgtatctttgcggcgttaaaattaatattaaatctaaaagactgtacatcatgtatttgacatcagaaaagaaagaagaacttttttcacagtacgggaagtctaataaagataccggctctgttgagtcacaagtagctttattttcctaccgtatcgctcatttaactgagcacttgaagaaaaaccacaaagatttcgctactcaaagatctttgattaaattggttggaaaacgtagagcgttgcttgattacatgaagaagagagatatcgagagatatcgtgctatcgttaaagcattgaatttacgtaaataattacataaaaacgacccgggtcgtccgggtcgttttactttataatcctcccctcctcctccttttatctaaaaagaattccgttaaaatgtttagtattttaacagttttattatttctatgaacattattgaaaaaagcattaccctgaaagatggtcgggtaataacattggaaaccgggaagttagccaaacaagcagacggtgctgtcatgctgaaaatgggtaacacgatgttgttggctacggtttgttccgcacaagaggctggtccggacgtggacttcatgcctttgtcggtagattataaagaaaaattttcagccgtgggacgtttccccggaggtttcacccgtagagagggaagagcttccgattacgagattttggtatcccgtctgatcgaccgggcgctgagacctttgttcccggatgattatcatgctgaaacttttgtgcaggtaacgttgtactctggtgatgaagagtctatgccggattgtttggccggattggctgcctcggcagctatcgctgtgagtgatattcctttccacggtcctatttctgaggtacgtgtagctcgtgtgaacggggagttgatgattaacccgacaaagagcgagttggcaactgctgacttggatatcatggttgcagcgacctacgagaatatcatgatggttgagggtgagatgaatgaggtttctgagaaagaaatgctcgatgctattaaatttgcccatgaagccattaaagatcattgcttggttcagatggaactggcaaaagccgtgaacaaagaaaaacgggcttattgtcatgaagtgaatgatgaagagttacgtaaggatgtttgggctaaatgttacgataaagcgtatgctgttgctcgtaaatgtaacgctgataagcatttacgtgagaagttgtttaccgaagtgaaagaaggatatttagaatcacttccggaagaagagagagacgagaagaaaaatatggtttcccgttattaccatgacgtggagaaagaggccgtgcggagaatgattttggatgaggggttacgtctggacggacgaacgaccgaacagattcgcccgatttggtgtgaagccgggcctcttccgggacctcatggttcttctatttttacccgcggtgaaacgcagtcattgtccacggtaactttaggaaccaaactggatgaaaagattatagatgaggctactgaacaaggaaaagaaaaattcctgttgcattataacttcccgccgttctcaacgggagaggcaaaagccagtcgcggtgtaggtcgtcgtgaaattggtcatggaaacttggctcatcgtgccttaaaacgtatgttgccggacaactatccttacacggtacgtgttgtttctgatattttggaatctaacggttcatcttccatggcaacggtatgcgccggaactttggctttgatggatgccggtattccgatcaaaaaaccggtaacgggtatcgccatgggattgatcaccgataacgagaaatatgccgtgttgtcagacatcttgggtgacgaggatcacttgggagatatggacttcaaggtaaccggaacggtagacggtatcaccgcaacccagatggatattaaagtagacggtcttccttacgagattctggagaaagctctggatcaagcccggagaggtcgtttgcacatcatgaatattattaaggaaaccttacctgaacctcgtcctgacttgaaaccgcacgcaccgcgtatggttacgcttacagtagataaggatcagatcggagctatcattggccccggaggaaagattattcaggatattcaggagaaatccggagcggttatcgttattgaagaagtgggtaatcagggtatcgtggatattgctgccaccaatgcagaatcaatcgagattgccgttgcccgcatcaaggctattgcctgcaaacctgaagttggagagatttacgagggagttgtaaagacaattaccgctttcggtgctttcgtggaattcttgccgggtaaagatggtttgttgcacgtgtccgagatcgatcacaaacgcgtagagaaagtggaggatgtattgaaagagggggatcgggtacgtgtgaaattgatcgatattgatccgaaaaccggaaaattcaaactttcccgtaaggtgttgttgcctaaaccggaaggtatggagcaaaatgatcgtcaaaatcgcggcgagcgccaagatagaggcgaacgtcaagatcgcggacctagacaagatcggggagatcgcccccatcgcgacagaggtcctagaccggaaagaaaagaaaatcaagaatagtatataagtattgatttttcatattgaacggagtgaagaattttctcaaacataaaggggagatttttcactctgtttcttttatatatatgggaatttatgggcgagtttacagtaaagtgatatataatcattaaaaagattatctttgtttgaattttgtttattggctattatatccggctgcatatatgaaagtgtcagaagatattgatgttcagatgttgaacgagttcaagcaagggcgtttggagatgttgtataggcgtctgtatccagcactattgttgtatgccgtgcggtatgcgggagaacaaaatggttttctggccgaggattgcgtgcagaacgcggtgttcaacgcgtggaaaagacggctgcaatttgagtcggtggagtcattgaaatctttcctttatatttctatcaagaatgaaattgttagccttcaccggaaggcgaaagcgagtgagcgttatctgtcacaattggaagacgaagtgttttttcagaacagcgtgattgatcaagagactcaattattactatattatgctatccggagtttaccggaaagggaacggcaaatctttgaattgagttgtattgaagggttgaaaattacggatattgctgaacaattgaatgtgtcggagagtacggtaaagaagacgaaagccaaagcgttggatattttacgggaaaagttgccgagggagttatttttattcttttttgttttgaaaagctgatttctattttgtcagttaaaatttttgtgtagttatcttgctgtatctgtattacttatgatttatttttgttcgatagataatttttcctaaaaataaatgtgaattttttaccctttttttaagcgattgcgttctatggatgattcaattaagaaacaggatgtaaagtgtgatataatggaaaaattagaagaacaggtctttaaaatttcacgattgatcttcaaggaggtgacgggggaaatttcggatgaagagcaacgctatctggaatggtggcggggaaggaatccggataacgagcggttgtatcgtgagttgagggatgggcggcgagtgatgggtgaggtgaaacagttggagggagtggaggtgatacgtccattggaagggatgcacctgcgtattcgtgaggaagaacgacgattgagtcagagaagatggcagtggggagtggcagcagcggctgttgtggccgtgttcgtggggtgcttttatttgttcccggtagatgatagacaggagtccatgcctttggcaaagacggaacaacccattaaagccgggggtgtgcgtgcggttttgagattggaagatggacgggtggtcgatttggagactttggcagaaggagtgaaagtaggaggcgtggatgccgtgaagattgatgagcggcgattatcgtacgcggggcaaggaaaggtcgagggggaaaaaagaaagaaattagtgtataatgaggtagaggtaccgaggggaggagagtttgatttgatcttggcggacgggactaccgtgtggttgaatgccgggagtaagttacgttatccggtggagtttgtgggaaaagaacgacgggtgttcttggagggagaggcttatttttctgtgactaaagatgcggatatgccgttccgggtggagatattgcaacagacggtagaggtgttgggaaccgaatttaacgtgtccgggtatatggatgaggcagcgatttacacgaccttggtgaccggaaaggtaaaggtggaaaccgatagcggggaaaatatggtacttgcacctggggagcagagtatgttggattgtcgggatgggcatcttgacaaacaggaagtggatgtagagaaagtgattgcttggaaaaagggaatgtttattctcgaggagcaaaccttggagcagatcatgcaaaaatttgcaaggtggtatgacatggaggttgtataccgggatgaagagttgaaaaacattatctttaaaggagttgtgccgcggtatacagagttgagagaggtgctgaatattttggaaaaaacaaatgaggtgaaatttgatatagaagaaaggatggtgatcgttttcaaataaaaaagaggggaatccggcaagattctcctcgtcataaataaacatctgttggctcagatgaatgtttaattaaatgttttacaaagttatgaaaaaaaatcgacgaacgggcaatccttattggataagattgccgcaaaaactgattgctatgggtttaagggtattattactcgtttgcgtgataaatacggtcagcgcggcgggattctcgcaagggaagaaattggatgtggatttcacgaacagcacgattggggctgtgctggattacctgaaagaaaaggcggggtatgattttgtctatcggaaaggcgttgtccggatagatgatgtggtgacgttaaagttaaaagacgcgacggtagaaaagattctggatgtcgtgttgcgggagaatgggtacaattatgaggtggtggataaggttgttgtggttacacgggcaaaagcggttcccgttgtacctgccgtggaagtggtgaaagggcaggtaaaggacgcgagtggtaagcctttgccgggtgtgacggtgatgttaaaaggtacgtcagtaggtacagctacgaatattgatgggaaatatgagatcaaagtaccagcaaaagaaggtgtggtgatcgttttctctttcgtggggatgaaaccgcaagagatgaagttttcaggtcagaaagtgcttaatgtggttcttttggaagacgtggaacagatggaagaggtaatcgttacggggtattcgactcgaaaggtgagtgagatgaccggtgcggtgcaacaattccggggaaagaatatcgctcaatcggccacgggtggtagcttgatgaatgcgttaaaaggtcacacgacaggattacagattacgggtagtagcggtgttccgggaagtgatggggatttattgttacgtggtacaggaacgttatatagttcaagctcattatccacgacggcttcggctcctttgatcgtgatagatggtgtgatcaccgattacacgagtattaacggggtggtgtctccatcagatattgcggatattacggtgttaaaggatgcggcctctaccgctatttacggttcccgggccgcgacaggtgtgatcgtagtgacaacgaaaaagggggcgaaagatcgtatgacagttgcgttggatatgaaattaggtatcagtactccgaattttggaaaattggagtatatgaattcactggagttgctggattatggaaagatggcattgcgcaattggtggaatacgaatgagagtttgcgtgcaaaatatgccaatcaggaaactttcatacaggatacgttgggaacgttatataataattttgatgtaacgaaaacgacaaattggcgagatttggtttatcgtaatggcttgagtaaggatgtagcgatgagcatccggggtggtggtgataaagttcagtattatttttcatataactattatgacgaggagggaacgcaaatcggatatgacctgacgcgacatttgttcaagttacgcttggattttgatgtgatgaaatacctgtcgtttggggtgaatttgagtggtacgttcgagaaaagtattacagccaattctgatggagattccatggaaagttatcatccttgggtgactccctataatgaggatggaacgttgaagtacaacatccaatcttggaagaattatacgatggacccgactccattgagaaatccgttgcaggataataaatataataacgtgacggatttaaagaataatttgttcggttcgttctctgcaacattgaaacctttcaaatggttatctttttcttcgtcaaatacattgactttgacgaatgtcaatacaaatgattatttggatagtcgtacttataatggtaatcatagccgtaatgagatgagtaatggtgttttaaaggtggatgatgaacggagctggactttcttgacatcaaatattttacgcttgcaatatagttttggagagcataatttgaatggcttggtaggacaggaatggtatgaacgccacactcgttcatcacgtattgaaatgtatgaccagatcattgccggagaacgtaatgttggtggtttttcgaaacaaggggataaaacaaatccgggtgtgataccgacgggtgcagagcgggagtccggtagtttctctgtattttcggaagtaaactataattatgcaggtaaatatatggcttcggcttctttccgtacggatggttcaacgaatttcggtaaggataatcgctatggaacattctattcatttagtggatcatggcttgtttctcgggaggcttttatggcacgtcaggacgtggtgtctaacctgaaattgagaatgagttatggtacgtcaggtaaagaggcgggaatggattacttgaactacacgctttatagtacaagtaacacgacgtttgattattatcgaaaccacccggtttatcaatcggcttacggggcgacgattaaccagttgggaaatgatcagttgtcatgggagacggcatataatctgaatattggagtggatgtggcgttattgaataatcgtatttcattatcggcggattggtataaacggcggaatagtgatttgatcatgagtacgactttgccggctgcaaatggcgtgggaagacaataccagaacgtgggagagatggagaacaggggtgtggaattagtattgaacacgcacacgatgaaaggcgaagattttaactggtttacgacattgactttcagttataatgataatgaattgaccaagttggatcaagagaaattaactcgtagtggttacaaaacattttatgaaggtgataatatcgacgaattgaaaagagtaaaagttacgggagttgatccggagaccggttttgcccaatatgctcgggtggaagaagacggtagcacgaatatcgtgggttctttgtcggaagctgtgcttggtaacggagaactgagttatgtgaatatcggtttgtcacgtgcgccttattggggtggtttcacgaacacgtttacttacaagggttgggagttgtacttgcataccacgtatagtttgaattacaaggtgtacaatagtgttttggcagaatatacgtcaggaacgtcatggacatcatcaaatcttcataaggtgccttcctcgctgaagatatgggaaaagccgggggataaagctgatatcccgatggtaaatgccgatccggctttcgtgcaagaactgaatcacgagacttctttctgttacacggatgccagtcatttacggatatcgaatatccggttgacgtataatttcccgcaacaatggatgaaaaaaatctgtgtacagtctgccgctttgagctttagttgtgataatgtctatacgtttgcgtccaaatactttgcaggtatggatccggagaatgttggcggttgggcggcaccaagacgttttatatttggtttgaatgttacattttaacggtagaaagttatgaaaaagagatatttacttatcggagctctattcttgttcgcttgtaacggacggcttgatgaaatgcgcccgcataatatggcagaggcggagagttatctgagtagtttcaataatatagtaaatgccacttcggggttgtacggacaatttttgatgcaggccggagggtattcggagtcacatcattatcacggttcttatcacgtgttgggtgaattccgggggaataatgtcatttttgcggaggcttttccggcccagatcagttttatgacttctcctgattatttacgagccccggatgctcatttcttcttgaacagtgatcagaaatcccagtcatacgcatgggcgatgtgggcgaaaagtcaacagttaatattgggggcttcacgtaatatcattgctattgataaattgttcgaggaaacggtgaatccggatgagaagcgtgatttgattcgtttgaaaggggaaaatgcttttttacgcgggttgatgatttttaatgccacgaatgtatttggtcgtcctttttgggataatccggatgcgaatttgggaattcctttggatgttgaggctaccgcggaaatgttacctcgtaatacagtgcgggagtgttttgaacaagccgttgctgatttcagattggcggcatcttgtttgccggatgagcgttcggatcgcacgtttgctaataaagtagcgtcatttggaatgttatccagggtgtatctgtatatggggggattaccggagagtcccgatgaggaatacaatcgtttggcggctgcttatgccgattctacttttagtttggtaaatgatgtggtggaggttttgcgtggggaagaattgaaagatttgtatgataatccgaagacgaataaagaaattttgttcgctttcttcacgggtaattttccgagtggtgtaggtaatgccgtacatggttattattcttggagcggttacgagtcagaggctagcactagcgtgtattgttgtgaaatttcacgtgattacgagaaaatcatggataaagagaacgatttgcggtggcagtatttcacggaaccttccgtgcgacatgcaggacgttttagtacaacgaaatacaatgggggagcggatagggtcttcgatgattactactctttcatttgtccttctgtgtttatccgtgccggagaggttgttttgaacagggcagaggcttacgctaaattgggtgaggacgcaaaggccttacgagatttgaacgagattcgtgatcgggcaggtttggaagaattatccggattaagcggaaacgacctgtttgaagaaatattcatggaacgtcgtcgggagctggcttttgaggctttgacgtactatgattatgtacgtaacggattgaccatgaaacgggaggaagtgtccgtgtcttatagtaactacacgggagtgcaatataatgagattgaccctaaaacatcccgtcggacggtatgtttgattccagccgaggagttgctattgaatgataagttagtacagaatgattattaaaataaaaagtaaggtatatgatgaaaaaattagttctgagtattgtaatactgtgtggattctccatatcgttgctggcgcaaggtatccagtttcgtgaaggtagttggaaagaaattctggaaattgccaagaaggaaaacaaattggtgttcgtggataattataccagctggtgcggtccctgtaaaaagatggtgagcgaggttttcccgttgaaggaagtcggggatttttataatgctaatttcatttgttataaactggattgtgagaaaggggatggtgtggaagtggcaaaaacataccagattatgtcgttccctacttatttgtacgtggatgggaacgggaaattattttaccgttccggagcgtatatgcctgctgaaaagtttattgaagaggggaaaatagctttggcagagttctctgacaagcggacgattgaggagtgggaagctctctacgccaagaaaaggggtaacgcatctttcgtgaaaggatacattgccaagcgtaaccgggcgaaattggataatgcggatatttttgatcaatacgtgagtatcgagaaagagaaaaatttgatggataccacgttcttgaaagagttatttgattatgagaataagctaaatgccggaggagcatgtgctgattttatcatgaagaattgggagcgtattcgtgagatgacgggaatgcagaatcaaaagatggtcgagattctgggttatagcatgggttcgtattcctatcgtcgtgccgtgaaagagaaaaatgaagaacgttttaacagctacctgaaggtgatggctttcttgaatgggaagttgggagtgaatgtggcaaacgaggaagtgaaaagtcgttccggatactatgccgctattgatgacaggacgagatttgaggaattggcagagaaacatgcggatattctttttgaagaggaaaaagattgtttgaaacgggacaaggaaaaatacatgcaattcttgcagggattaatcaaggatgcatcaggacttgcatctcagaccccggagcaattggcttttacgattcagtttgccggaatcaatgagtcagcttcattggcgtttaatttccgtgatcttgcggctaatgttgcccgtctctcggatgatcaaaaattgctgaataaggccatgacgtgggcattagaagcaattacgttattcggtaatttcacttgctatgaaacgttggccgaggtgttatacaagatgggataccagaaagaggctctttggcaaatagaaaaagcgctggataaaatgccggcagggaatgatgctattgctgcacgtattcacgggaagttggataaaattaaaaataataaatgatgaaaatggtatttttacttggaattgtagccctgttgacagggtgcaattccattcagaaagacgagtttgtgatcacgggaacaatcagttcttatccgaaggaggttttgatttgtgcctatcagacgaacggtgattttatattggacacgatccgggtggaaaatggaaaattgagttaccggaagaaattgcaggaaccggttgttgcttcgctcgtatcgagagacccgcataatattattccgtcgggtatgggagttgtacccggaccgagtgtcacgttattcatggagccggggacgaaattggagataaacatggataacgcccgttggccggagttgcaatggaaaggtggagcgtggaacaatgacttgatgaagttgtatgtcaaaacattgcctttggaatatgagatgtttgagttgttgcgtaaatcatacgtttcaggggtaactgaagacgagaaggttgctttaggagagcaacggatggctttagctgaaaaagagaaagaagaaaaaatccgttttatcaaagaaaatccgtccagttatgcagccatgtatcttttaagtggaatgcgtaatgatttcactttgaaggattatgcggctacttttgcagctttcgatcaagccttgcgggagatgcctttgggtaaggagatgcaaggagccattgacattgccttgcgtacagaagtaggtgctattgccccggatttcgaaaaagtggataaggatggaaataccatacgtttgtcggattacaggggaaaatatgtgttactggatttctggggttcttggtgtagtccttgtcgggattcacaccctcacctgaaagaaatcgaggcaaaataccgggataaaggtttggtagttattaatgttgcaacagaaaacggttccaaagctcgtgaaatatggttgcaggctattgaggaagatggtatgacatggacgcagatcctgaataacgagggaaaggataaatgtgacgtggtgaaagactatgccatcacggcattcccgactaaagtgttgattgatggtgatgggaaaattgttgtacgtgcagtgggtgaatccgagccaatagatgcgaagttgaaggaagtattcggagaataaacgataagtaggaaggttgagggattgtcgggctgtaattgtccggcactccctcttttccagtccggagcgttgatgtcgtcatttgtggacgttattgcacgtcattctattatttttacacaaaatcttactatctttgtccatagtatgaaatgaaatgaactatggaaaacagattaaatgtaggaatcacgcatggggatgtaaacggaatatcttatgagttgatcataaaattgttggcagagaatcgaatttgtgagttgtgtgttcctattctatacgggtcgcctaaagtggcagcctactaccggaaggtattaaatattgaaaacttcagtttaaatacgattcgtgagccgggtgaggccaacgggaaacgatccaatatcatcaattgcgtggatgataacgtgaaggttgatcttggaaaagagacacccgaatcagatcaggctaccatgatagccttgaaatatgccttggatcagttggatcgggacgagattgatgtgttgacgctggctccccagggaccgaatgcattctttacggaagaggccgggtctttggtggaatatttgagtaagcgttataataccacggatattatgtccatcttggtgagcgaaaagatgaagatgggtttcgtgaccgaacaggttaaattgcgggatgtgccgcatcaggttacacaaaagaatattttcaagaagttaaccttgctggatgatactttgcgtcaggattttactattttgaaacccaaaatcgctgttctgggattaaacccgcaggtaaattgcggtcagaatggagatgaagaagtgaatattattactccggcgatagagcgagcccgggaagagggaattatggccattggcccattctctgccgagcgtttcttctcggagagaatgtacgagaaatttgacgctgttcttgccatgtattacgatcagggggttgtggcatttaagtcagtggatgaagaaagtgccgcttgttatattgccgggttacctgtgatctgttcaatgtctttaaccgatcctcattatgatattgtaggtcaaaatctgggtgatgaacaaggacttcgtaatgctctttatttggcgatggatgtttgcgtgcatcgggaacaaaatatagaattgcagaaaaatccgcttccacattatgatattgccgcaaatagtaatgaaagtgatttgaatgtggaacagatagaaggggtaaaagaagaacttgaggattaacttctttttcgtaaaattaaaaacgggattccttgttcgaatcccgtttttgtttttaggcctctgcaaccagttctgctatatcttttaccgggatttccagtgaggttttacccaaagtctttttgcataggggacaagccgtgacaattatatccggttggtatgccgcatatgctttcacggtatcgctactgattttagttttttgcgtggaatcaatggccgtgtttgccaagctacccccgcaacagagtgatttcttcccgtcataggcagtcgaaattttccggcttacttgtttcagcacactttcgggggcatccaccacatcacaacctcttcccagttcacatggattgtggaatacggttttcaaatcaagcgtgttaacctttaatattccttcccggatcagcatgtcgatatattccgtgtggtgcatgatttttatattcaacaggtaatcctctttgaatgttttgtaacagatcgggcaggaggtgaccagaatgtctgcttgtgaggcatcgatcatttgcaggtttttgtccatgactacttgtgctgctttccagttcccggaaagagctaatggacgcccgcaacatactccggcttgttcatcaataaacgtgtagtccgcttttgctttctcgaaaatctgttgcatggattttataatgcctggggtaagatgactcatacatccggcaaaataagcgactttagcaggtttcacttttggttggggcacataagcatacgtgtcttttgtaactcttaatatatccggtcttttgctttggcggatggcattcaggttgatacccacgggacaagaggcctcgcagcgtccgcacatcaggcagttttctgcttgttgggcatattcttcgtgattgcgcaggcgacgaaggaaatagacgggttgggtatcatttatattacatgacgtgttcagttggcaggtgttgatacatattccacaacgggaacaggaattaacctgtatttcactgaatccgttatattccttgccttgttttactccccagtttttcaggaagatatagaccatttcagtcgggatatgcatgtaccgggaaaatggtaatagtaggaagaataggccaagcaaggaggagtaaagccaccaggcaggataagatagactttccaagggtagaaatccgctgaaaaagtcaccggcgttgtgcgtgaggaaactacccccaccatttaggccgcttgtgaaactttcagccagaaaacgtaccgggaaaatgagccagaggaccgttaatataagcaggtcgtaagcccgttgtttcgtggtctttttcatgccgaaaatacgggagcaaaaacgtttggtgacagccagtaagatcccgattaacaggaacgtcagtatcaagtccatcaagaacgcgaaaaactcgctgtacgggaatgtctcttttgctggatggaaataacggaaaaagatagcgaaataaggtgggttgaaagcactggtatgataaaccatagattcgattttcccgacaacaatcaacaagaaccatccgaaagcaaaggtcatgtgcatgtatcccagcatcgggttcgttttgaatatattgtgatgcaacaaactttcccggaaaatttcccagccggaacgaatagttttaaagctgaacaagcctttgcgaatttttttacgttcttctttcggaaagctcttgatccacttgtagtatctcacacacaagtaccccagtagcacgaccagaccgatcgtgaacggcaggacaaagtgatcgtaatatattttgttcgtgtattcgtattgctgcatagtaattggtttcagcttttcaatttagtttttatatagttgagcatttctaaaatcatcttccgggtttccacacctctcggacagaccaacatacatttcccgcacaacatacatttctgtaattgctctttcgcctctttattttcgcctcgtttcatgagcatttgtatcttccggatattaaagtccgtgagatttcctgccgtgcatcctgccgtgcatccgccacagccaatacataatttgctgctgggaacgacacgtgcaatatgttccgtcatggatttgtcgttcgtatcataattgatactccgtgtttccgatatgctataaccccaaaaattgatcatctcttaattttagattttaaattttagattttaaatcgagagatttagtgattccattcattctaaactctacattttaaattctaaattctttttatgtattctataatgttcatggctgccgagcgggcatcagccagcgtgtcggtcaggttcatcggggcacttccgcatccggccacgaaaatgccttcgacgttcgtgttgttgttgcgatagtgcgggtcttgggatttgatgaagccattgggagccaagtttaagcctagcgtgtctgccatctggcgactgccttccgaggattccataccgaccaacaggaccatcatgtcaagcgtcatgcgcaagggtttcccgacaagcgtgtcttcgaccttgatctgtaattgcttgttgagattctcagcggcctcagacaatctgcctcgcacgaatttgatattgtatttttcctgagcctcccggtacatttcctcgtagcccggtccgaacatacgcatatccatgtagaagcaaaagatttccgtgtcgggtaataattcccgaagttcaatggcttgctttaccccggtgatacaacagagtttggagcaatggtagttgcataccttctcatcacgggagcctacgcaatggatgatgccgatacgtttgggggtattcccgtttgccatcttgatcgaatggttgtagaacatgttttccagttccacggaagtaatcacgttttcatatattccgtatccgtattcttccttgcggcgggcgtcgaaaattttgaatcccgtggaaactagcagggagtcaccttcaagtaagctgccatcactgagaggtacgaggaatttcccctccttgttcttctcgatcttccggggttccatgcctaaatgcaactgaattttcggatgattcaaattttgctttaatatgtcgttgaggtccttggcgaattttcggtcaggaaataattgataccaattattcaggttaccgccagtctcgttatttttctcgactaattccacgtcgattccttgacttgccagttgatgtgcggcttcgcagcctgccgggcctcctccgatgatgatgacttttgccatatattaattgaaaattgaaaattgaaagttgaaaatgaatgacttcatgattctttttccaattttgtggtttaacattataattttgagactctcaagtacgtgggacatttcggagccccgatgtcctctccccggatgtttttgaatttggcttccggatcgtacgggattcccattttatccagcaggggttccacggaaacttggtgcatctgcaacccgatttcccatgggtcataccccaggacaagtgccgtgagttcctcgtaagtcagcacgggaataccgtatccgtcctgtccgtaggtggtgccttccatctcgctgatcgtgtattgccatttatccatgaacatggcgcaccccgggcagtttgccacgataaagtcgggttcgtaaggttgcatggattcaaatttctttttagaattggccacggaatatccccggttggccatcacgagatactgacgaaaaccgaagccgcaacaatgtcttctttccggataatcgattacatcgccgccccaggcataaatcataccggataatacggccggaaattcggctccaccgattcctttcgtggggaacattttcgagtaatgacacccgatgtgatccacccctcgaagaggccttccggtgtgaacgtctaccagcttgtattttgcctgggcagcgatctcgtttctgaacttatagattatgtctgatgtgtgagcaagatttctaggttttttaaattcccgtttggtggctttccaaaggaattccctgattttttcttctacttccgggtggtggtgccatgtctccagaatttcggtataaataccgaaagaagtgatgcaggagggagtcatattttcgtacccggcttcggtcataagggcaaaatgtcgggcgactaccgtcatgattgtctctgccggaacgatgtccgagtgatagccaatcccggtgcaagtcgtgtgtcgcggatcatcaataacatctttcgccagtttattcttcataatatccaggtaagcccattccgaacccgggaagaaagtctggcggatacaacttctcgcgtaaaaatagtgatcatcggctatctctttctgataatccttccatatctgttgtttaccctctaaattcatctcgctattttagttcctgttaattgcttgaattcgttttaaacttttatctttctactggtgtttcccgctgttttccatgtatgttttcaggaaataagcctcttccagatcaactttctcttcgtcggccacgtgttgagagcaactgtcaattttttccaagaattcggttcccccggtcacgtcgaagatttttcgtaactcatccatgctttccgaatccacttcccgtaacgttccggctcccggttggcggtaattcgaatgcatacgttcgtacacgtcgtccagatgctcgtatatccattcccacacgggaccttgctccgggtgcatttccggtttcaccaagtcgggggtaacacaatatcctcttttgaggatggattctccgatcacgtgtttaagcgcgtattgctgacgtcctttttccgaatagacaaaatatcccagctcttgtgatatttttcttaatgccatgatcacgaggcccggcgtgttgcaacgcgggcaacgggttttacaagacatacattccccgcaataccagatcgtgtcgcttttcaataattcttcgatctcttcttcattcccccgttgcacggtttccacgatcacccgcgggtcatagttatagaattcagctgccggacaaattgccgtacacaccccacaattcatacagctatttagcccttcgatgaaatgaatatctttttgtaacttctttaaaatctctgacataattaactctatatggaaaaattattcgtcataattcttttgcatacaaaagtatatcttaatattttgcaactaaaggagagaaatgcttaaaatgtggggtatttatactaccacgggaacaagtcccgtggtagtgttacaagttagcaggttacaagttgcaggttatttagactcaaactagattttaacttgtagccagcaaacctgtaacttgtaactttttcttttcgtaaagaaaaggaaaaaccatgaacaaaagtgtaaagggtactttaacagaggccaatcttttaaaatcatttgccggggaatcacaggcaaaaaatcggtatacttttttctctgaagtagcgaaaaaagaagggtacgaacagatagcgggcatattctacgagaccgctttgcaagaagagatgcacgcgaagcgtttcttcagtcgtttggaaggtggaatgttggagatcactgcggcgtatcctgccggggttattctggacacggccagtaatctggttgaggctgcggaaggtgaatatgacgagtggcatcacttgtacccggaattcgccagagtggccgaggaggagggatttaaggatatttccgtgatgtaccgtatgattatcgaggcggaaagaaatcatgaaacgaggtatcggaaactcttgtcaaacttgcaggacggtatcctttttgaacgtccgaaaacggtaaaatggtattgtcgcaaatgcgggtatgttcacgaaggtcctgcagctcctaaagtttgtcctgcttgcctccatccgcaaggattttttgaattactggtagagaattattgagattagtatcatgaatacaggaacctgaaaatgataaactcattgtcaggttcctgtataattctaattattgttatttattaatgaagacgaggggtaaaatagtagcagcagtaagaaataagtaaaaatttcgtatatttgcagaaatggaaaactgaaaatggtaaagacacgggaatatatacttgggcggattaaagagatccttcgaacggttgcaccggaaacaaaggctattttgtacggttcgcaagctcgtggagatgctcataaagattcggattgggatatattaattctagtggataaatctcgtctagaaccttctgattatgatgatattgcttatcctttggttgagtttggatggacgataaatgaatgtattagtcctgtgatgtatacattgaaagattggttaaagtatagttttaccccattttttcataatgttaaaaaagagggaattgaattatgacgttgacttcggaagagatagatgctattattttttatcgtagacaaaagtcatacgcaacattacaggaagctaatgatgcaatgaaggatgcgcattggaatttgacgattcaacgtttgtattatgctgtttattatatggcttctgcgctgttacttaaaaataaaataccagctcaatctcataatggtgttgtaggacaaattggactacatttcgtgactacgggaagattgtcaaaagaatatggacgtttgtattctcgtttacttcaaagtagaatatctggtgattataatgatttttttgattttacagaagaagatgtaaattcgtttatgcagccaactagggaattgattaaaagattggaagagttaatcgagcaagattagattttgtttacttttcttttttggaatcactatcgaattatcatatctttgttttattcgaaaatctgtctgtatagatatggtatagtctattttttctttaaaattgtggtgataaattagaatttgttattgaaggtatatccatcgtgtcaatgggggatgcggaatgatatatggcttgtggaatccggcgttctcgtgaaaaaacagtagatatgaatacaaattttttcgaggactatgagcgggaattactcgttgttaatgttttgatgacgaaggatgcgacgtgtacctatgtgtttaaccatcatcgggatgtggctgcctacaggactcatttgatgatcttggagttgaaattgatgaacgaattggtggagttttttccttgtggcgtgatcggtaaggagtaccggcagatgctagtacctcatcttttgacgattaggaatcaatttcaacagaaaaagaatggacgaataactcgtccggatttgatttgcaggaaaaataatggcatttgggtaattccttccgatgcactacaaaagcgggtccttcctttcctgcaggttcagtgggaatcgcttaaccgtatccggacatttatcggggaagacgatcgttttccggattacccgtaccgttttgtcggtaaaacttccgaggtaacacatttttgcgtggcgttgtgtgcgtgtcgaaaattggaagggatttccggtaagataaatttgcctcaattagtgaaagatacttgccgtttactcaatataaaagtacctgatcgtccagatttgctggtagaacgtgtttttaattgtaaaaatcgttttctgaatttggaccgtttctgcaggaaatataaggaagaagtgcagaaaggcaattagttagcgtggagtgtgaatgtatcactttttgcatgtaatgtgattatattcatggtgttgcgtgtttaatataaaatgatacaattttcccttttcacgggttctatttttgggaatgaaattattactcgaatgtagaacttttaaaaatgaaaagatgaaaatgttatcgaatttggtaagcgagatcggtgacgtgattgactcgcttaccctttcttcaaaagagaaaatgcaattacgagccaatttgacggaagtgctttcccgttttgaggcggatttgcagcgggaacaatcttccgtgatccgttccgaatcacaggggaactggctgcaacgttcgtggcgtccgatcgtgatgctcgtgttttcctctgtcgtgttactggggatattcaccccgcttcctttgcctgataatggttcccgtttctgggatctgttggagatcgggttaggtggttatgttgtcggtcggagcttcgaatcggtatctcaaggattaggtaaaagaatcaagaacctcttaaagaagtgagtatggaagtcgagaatcataaattagtagcacctaacgtgaaatagatgcattgtaacaaaaaatcaagtttgctacccgtcacggacaccattgttatccactacaccggaggcgggaatgccatgtcgtcggctcaattactggcgagggcagatacttccgtatcggctcatctcgtgattgcccgttcgggacagatcctacaattattacctttcaacgtgaaagcgtggcacgccgggtatagttctttggagggacggcagaacgtgaacaatttctcgatcgggatcgaattggataatgccggacctttgcatcgtcggggacaggggtggtttacttggttcaacaaacagatcatgcctgatgaagtcttcacgactgttgaaaagggacgtgcatcctattggcattcctacccgtcggtgcagatcgaggcattggtggaagtgtgtcgggtattgaaacggaattacccgatccggtatatcgtgggccattccgatattacctctcgtaaacttgatccgggtccggctttcccgtgggaacggtttcatgatttattgaaagaatgacctcgtgtttggagattcttgcctttgtgtaatacttgggtaggaacgttcttgggtttgttttccttttacatctgttcgttatccttttcgttaaggtgtcgttatctattcgtttctatggaaggcagctttggcgatagtatgacgaggagataacgaatagatgtaagtttaattatttagttgataatggtatgaataagaagaatattatttctttggaaaattttctggggcgaatcgacgatttgttattttattgtcggaatcatcgtcgttacgtgcggcggatcaaacatgatacgaaaaagaaaaaagtggtgagtccccgccaacaattggggcgagctcgtttccggtgtgtcgtgatgttgtatcgagctattaaaggtacatttatgcgggaaatttggcgggtttctccccgtccggatggcatgaccgggtatcataactttattcggatgaattattcggcttttaatctgaaagggggtatccttgatttttctcgtttaaaaatgagttatggggatttgcgtttaccgttgggcgtgtgtgtgaaagtggaagataggagagggattgttatcacgtggaaaacggaaatggatgaactgcagggagagggaaccgatcatttgtatctattcctgatgtatgatgacgagacgtttcgtttctctttattcgaccgattgcccgattgccggggagatggaggtgctatagtagagcttcctttgcaggaacaaaatccagcccatctcttttatttctttggctcggtggattgtactcatttttcggattcggggtattttagattaacgtgaggctggatatttaattaagaaatgaccacggatgagggaataattgtaatgtttctcatccgttttttttgtgagttaaaatttgtgtatcaatagggaaacgaaagatttgtctagggaaaaattagaataaaaaggattgattttaaaatgtttattgtgttaataaacgatcgattgatgatattaacacatttaataatttttcatttcgggcaaatatgtcaaccgcttgatgg

SEQ ID NO: 10773 - DNA, 18230 bp, Unknown
  gut microbiota DNA sequence
atttattaataaacgactttcctgcctaagtgtcttccgaaatttatagagaaaaacaacgaatcttttcttttttactccgtataaccaacaaatagtttacttttgtaacatgaaaacagaagatatagaaaaccaggacgaacaaaaatggaaaagcgtgaatcaattgctatcacgggcgggttcgcacttaaatatcctagaagaagaaattgatgtagaagtacaacatcaatacatggatcttttggaacatcttattaaaagtggagactttaaaacgttaagagaagacgcaataatacacgctcaagatctatttgatgaggccgttgatgacgaaagaaaaaaaactttgttaatcctgttgtccatggtcgatgacgtttctatataccggagtattgaatcgttccagaaacaagataccccgatcaaaccgtgggcaaccatagcgttgcaacaatctcgaatgctgattcaatccaacctgctggacgaatcgaccgtgttcgtatccaccggcctaggcggtcacgacacgctgttacgttatttttgtgtttatattgccaacgagggggtcacgttacaacctttccagtgggatattgtcaaaaaagaaactgaactggtcgtaaccaaaagccaaggagagattgaacaattcgaacacttcgagaaatatgtcacgtttattcttctgttacctatcgaggccaatctaaaagaaatattcaattcaattatagacgagtgtaacacgtacggaaactttttaagcgaaaacatcattatcacaaacgtgaaaaaactttccatcgaagagattgatgattttttgaaatccaaatctcccaagcacaaatcgagaccattctaatccaacatcaagcttatgaaaggactacattttttgaaacaaggctccaactcgggaaaacgttccgggtggtagcctaaaagcaattgcaccagttcctgcacggacaactccgcctccacttgctttgcattatcacaaacacaatctcctttccctatcacatatatccctgtgttttctggaatccagtcatccgttactttcagcacgagattctgctccggattattcacggcatacaaacggagcatttgttccacatctaacacacgtgccattcctcggtgctcatccgcttttccataaggaagtacacggcaatatatctccgccatatccagatatttcatcactccccataaagctacccgtttgacatcctcggaattatacatcccatccagtaccaaagcatgatttcctctcggttcggcaaaagccatcccaacaatatttttatcgctatacacgacaatcaacgcccctccatccattcgcaaactttccacaatcacctcaaaatcttcccgttcatgctgtacgcaacaaggacgtaaacgcatcattgactgaaaataattaaacacgtcatccgttaacatcccctcctcccgaatagcctccatccgaaaatgatccgcaaccgatttatccaaaattgtataatgttccgaggtataatcaaaaacagtcgcataccccatctttccgtaataatcgtacaaccattcactggccggaatcagggtactcatgggaatcttttttcctctcatcacatagaaagcctcccgcagtaacttcgtcatcacgccccgggcccgggccaacggatgagtacaagcccccgaaatataccctgttataatttgtgtctcgccaaaagtcatcgggtaaagaggagtttgtaaagcagcaatagccgcaccttgttcatcccaatacaccagagcattttcatccttgtattttttgtcaaaatagaattgaataaactcttccgtatcatcaaaacacaccctccataactccatgacttcccgtttcattatacgcatatttaaattaaacaaccttttgaatcatcgactttttcattttcaattaattcggcataccctttctccaataatatcaccggacgataagataatttcgcctttctcaatcccggtattcccaaatcttcctcccggttcaggtaaacatattgttccgggatatgtcgtgcgaactcctgattcaaaatattatatgaaccatcaatatgactatcagctttctcgatatgaacggcaaaggtatcatgattcaccggagcgccatacgtgaacccgacgatttcatcatccacccagagcgctcctcctaccaaaccaagagcatcaaaatttcgcaacgcaatattcagtgcttttcgctcgtttatcaaactctcctcttcctcacaagcatgctcttcacaccattttttctctagttccaaacaatgcgggatcaaatctacggttaatggcgtgtacttgtaattataggtgcgtttgaacttattcacgtgattccgtttaggctgaaaatttttacctttcaattcagccaactcttgacgggaataaatataatcaaaataatcccgatccaaccgataatcaaaacttcccgggaactcccggttgaaccattcctccaactccggaaaaactccatgtacacgcaaaacgtgtccttcggccttggcttgctgtttcaacaactcgattacatttttcacatccccggtccccacgggcatcgtgtacacgacactttcctcatccaacgtaaaacgcaccacgaggcagtcatcaaccacagcataatgactattggtcaagaactgccacgtgtacaagttcacaaacgaaagattgcaatcccgattcccacatgccaaaaaataggtcgttatcaactctttatcctctattctgatcggtttaaaatctatcatataactactttttatttccgtcacaaagatacgatctttctcatttataaaacctccttcatatgtctaaaattagaactgatcgtatccagtatttcacgtgtccgcccgtttatcatcaatttatacatggattgggcaaaccccatcatctggctccactccactttaggcggcatggccaaagcgttcgggtctgtcatcacgtttacaagtaccggcccgtcaatattcatcgcctgttccagcacggcctgcacgttctccggatcattcaccgtgaatccttccattcccatcgcttttgccacaagcgcaaaatctggattgtccatatccgtctgccaatccggtaatccggcaacctccatttccaacttcaccattcccaaagaacgattattgaacacgacaatttttacgggtaatttatactgcacaattgtcgaaagatcccccagtaacatggagattccaccgtccccacacaaagcccaaacttgccgctccggaaaggccaacgaggccccgatcgcttgcggaacagcatttgccattgaaccatgattaaaagagcctaacatttttctctctcccgttccgtgcagatagcgcgcaccccatacacacgtcatccccgtatcaaccgtgaaaatcgcatccttcgacgccaatcgatccacgacggacatcacgtactccggatgaattttatctgtttgtcctttctcctccacataagcattcaagttctccttcacccgttcataccctttcaattgtttctgcaaaaaatcatccgtctgtttttgcttgatacgaggtaacagagcctgtaacgtactcttcacgtctccacatagccccatagccaccttggcccgtcgtcctaaacgttccggcttaatatccacctgcacgatcgtattgttttccggcataaaggctgcatacgggaaatccgttcccaacatcaccagcacttctgcctcgtgcatactgtcatacccagaaggcatccctagcaaaccggtcattcccacctcgttagggttatcatattgtatctccatcttactcttaaaagaatatgccacgggagaattcagcaacccggacaattccaccacttcggcgtgggcatccttggccccgattccacaaaacaaggttatcttctccttcccattcaataaatcagccaatgcatccaattcttcatccgagggacgtatggaaggatgtgtcgggaatgtcttaacggcagaaaatatctcctctgccccacgagcagtcacgtccccgggaaccccgatcacggctactcccgaaccggaaattgccgcttgcatggcagcctgcaacatacgaggaatctggcagggcgtggtcgccacctggttataataactacaatcttcaaacaacttcatcgtgtccgtttcctgaaaataacgagtcccgaattcactcgtggccatcgtggaggcaatcgccaacaccggggctcccgaacgatgcgcatcatataacccgttaatcaaatgaacatgtcccggaccactacttccggcacaacaagccagttgcccgtgtaattgagcctccgccccagccgcataggccccgacttcctcgtgacgcacatgaacccactgaatcttaccatttttccttacggcatcatttatctcattcaaactatcgcccgtgacggcataaattcttttcacgccgacctcgaccagcatatcaaccaactgttctgcaactttttttgccatagatcctgtattttatattgtttttagtctctatcgctaaaacgaaaaataaaaagaaaagtttatattttaggagccagaaacgctcccactcgtgatatgtttgcctctttacgacagccattaatcgtgacacgaatcgtctccacggcaatatccgggatatgcaacaaacgtttataacctatcgtacccccttttcccaacacctgccaagtaccattcaccaatccttccacggtaaacgactccacccgctgtccccggccaatatcttcctgcaacaaaatcgtgtttatcgtacatcccttccccaaagtatattctttactttcccccttccgggctgtccacgcccgagtccaccgggaaataaaatctttagcgtacattttttccagatactctccgaattcctttaaccgagtgacatcagtctcgcaaagcacgccccgcttgtcaggtgacacgttcagtaataaagaagaattacatcccacggactgaaaataaaccctcaccaattcagacaaagatttcactttcgaatcttccctctcgtgataaaaccaactaggacgaatagagactgacacctccgaaggataccagaacaattccgtcgcacgatcaataatctcctttcctccaagattccgggaaaacacgcttaaacgcatctcttcattacgctttttcgcatctggataacaccccggaaccaatgcgacggaactccactcgatctcacgccctctcccgctttcattcccgatccaacgaacgtcatcaccataaaaagccgtcaccgcattcggttgtaacttatgaatcgttttcaatatcaattcccagtcatactcctgtcttttcccgtcaatgcctacctcactcgtcccatccaaccaaatttcatctattttcccgtactcggttaataattctgtcagttgtttcacgaaaaactcgttgtaccggggagagtccccgtaataagaaatgttccgatctaaaagggataaataaatcccgaatttcatcccgttccggtcacacgcttttttcaattcccggaccacatcgcctttcccgtttttccacggagaggccgtgatggcatgacgagtcgtttttgtcggccacaaacaaaaaccatcatgatgtttggcggtcaacacgacggacttgagccctcccgcctttaacgccttcacccactgctccgcatccagcgccaccggattgaacatcaccgggaactccttgccgtcaccttgttctttcccggtaaacgtgtttattccaaaatggatgaaagctgtcaattccaactgctgccaggctaattgctgctttgtcgggaccaatcttgctgctatctccactttctcctccaatgtaaccttctccgggaaacgaacatttttttcaaaatatttccccttctgagcctcggccgacaaagaaatcacgcataaaaaacaccaaattatatagcatattctcacagcagtcattattattgttataataaatgtaaaaataaacaatttttctcatttagacaacaaaaatctaactattcacgtatgaaattaaatatataatatcacattaagtatgagtacaaacaaaataatcgaaattctaggagatcaaagtgatttcctattgaaccacacctgtaaaactattgataaatcgttacttcacatcccgtcacccaataccattgatgagatttggatgtcatccgatagaaatacccgtacactgaacagcctgcaaaccatcctggggcacggtcgcttggccaataccgggtacgtgtccattctccccgtggatcaaggagttgaacacacggcaggagcgtctttcgccccgaatcctctctattttgatccgggaaatatcataaaacttgctatcgagggcgggtgtaacgccgtggcatcgacattcggagtactcggagccgtggctcgtaaatacgctcacagaattccgtttatcgtgaaaatcaatcataatgaactactgacctacccgactcaatacgaccaaacactatacggaacggtggaagaagcatggaatatgggagccgccgcagtaggtgccacaatttacttcggctcaccggaaagtcgcagacaaatactagaagtatcagaggcatttgctcatgcacacgaactaggaatggcaaccatcctctggtgttaccttcgtaacggaagtttcaaaaaaaacggagtagattaccactcggcagcagatttgacaggacaggccaatcacctgggggcaacgatccaagctgacatcgtaaaacaaaagctcccgacggttaacgggggatttaccgaacttaaattcggaaaaacgaatgaaaaagtttataccgaacttacgtcctcccacccgatagacctctgccgctaccaagtggccaacagctacatgggacgcattggcctgatcaactccggaggtgaatccaaaggagcatccgatttaaaagaagctgtcataacagccgtaatcaacaaacgagctggcggaatgggacttatcagcggacggaaagccttccagaaaccgatgaaccaaggtgtagaattactacatgctatccaagacgtttacctggataaaaatatcacgatagcctaacaaaaatagcaaccaatgagggaggggcaaaaacttttgatactccctcattgaatctatggtatttcgtgttattctccacggtatctcgtcgtactctcgctagcacatggactaaatttcaagaaaaaatcaacagtagatcaacttgccacaccgttgacctatcgttaacctacctacgaaacataccggaatctcccttgaaaatccctttcaatataggagtaaaacacactaccttctgttttttattcttatctttgtgaagaagacataaccccggttcactatggatgaaagagtacttgataaactaaaaatactcgctgaatcagcgaaatatgatgtatcctgtgcatctagcgggacctctcgttctcacaaaaaagggcaaatcgggagcgctgaaggatggggtatatgccatagttttgcggaagacggacgctgtatctctctactgaaaatcatgctcacgaataactgtatctacgattgtgcctattgcatcaatcgcaggagtaatgacttaccgagagccacgctttccgtcacggaactcgtgaacctaacaatagaattctatcgccggaattacatcgagggactcttcctcagttcgggagtagtacgcaatcctgactatacgatggaacgcttagtgaaagtggtaaaggacttgcggcaagtgtaccgttttaatggatacatccatttgaaaagtattcccggggccagccaagaactggtaaacgaggctggcttatactcggatcgtatgagtgtaaacatcgaaatccccaacgaacaaagcctgcaacttcttgccccggaaaaagattttcaaagtgtattcacccccatgcgctatatccaacaaggtatgttacaaagcgccgaggaacgaaagaaataccgccatgccccccgttttgtccctgcaggacaaagcacgcagatgatcgtgggagcaacttccgattcggataaggacattcttcacctaacctctgcactctacaaacgtccaagcatgaaaagagtatattattcgggattcgtccccgtcaacgggtacgacaagcgcctgccggctttgaagcagccacctcttgtgagagaaaaccgattgtatcaagccgattggttactccgattttacaatttcaaagtagatgaaatcgtggatgactcctatcctgacctagacctagagatcgacccaaaattggcttgggctcttcgccacccggaagcattccccgtggacatcaaccgggcggattacgaaatgttattacgtgtccccgggcttggagtgaagtctgccaagatgattctcacggcccgccgctattcccgcttggggacatcacatttgaaacagatcggtgtcgttctcaaaaaagcccagtatttcatcacgtgtaatgaactaccaacccgaaccattaacgaaataaaacccgaaaacgtaaggcgtattctaacacaaagaaaagttacccgcattgacgatggacaattgatcatcccgttcgtttattaattgaattagtccgacttcatggcacttgaaatcgtaaatctaaaatcataaatctaaaattaatatgctcatattccgatacgacaaaacctttgaaggactgttaacagcgatttttgacgcttatagcatcaaaagatttcccgatatattgttagctgcagaagaaacgcctcctttattttatgatgaaatcatcacagtcgttacggatgaggaaagaagtaaccgggtatggaaaggacttcaaaaaaaactatccgcctcggcccttaccagtcttacaacctgctggttatccgaactcccggagatagacctcgtactattcagttacattcacaaagccatcgacgcaccccgttccatcgaactcaatttcggggatcccgacgtgctggaactctcaaaagtctggaaaaaagtaaacaatgaacggttacgggtcatgcaattcctgcgctttcagaaagctgccgacggcacctatttcgccgccttgaaaccgctatataacgtaatctcgctcgtgattccttatctccaagatcgttttgccgatcaaaaatggctactctatgacctcaagcgggaatacggctattatcacgatctatcaaccatcactgaagtacactttgaacaaaaagaaggccatcttcaaagcggattcctcgacgaaagcatcatggatcaagacgagaagcttttccagaaactctggcaaacctatttcaaggccatcactataaaagaacgcaccaaccctaaattacaccgccagaatctccccgcccgcttctggaaatacctaccggagaaaaagggataacccccttatccattttagattttagattttagattccaaccacacaaggccagcacatttcattttaaattctaaatttgtttatctcccgtgcatccctcatcatgtcgtgggctgaatttcatcccaggcagccccgtcacttcccccgatcaaccagttaaaagcataatgacgctccatcaccacgcccccttctaacgctgctggcgcttctttcccgttaacacgggcatccacgcacgcccaatcatagcgcaaggtcagatcggcctcatccaatatctctcctctcttccgaatctcacccagtcccaagatcgtcccttcgtccttgtgatcaaaaaacaggcgagcaataaacgggacattacaaatctccgaaggataaggaagtgcatcaatacccaacgcccacaacaacacggcacaacactcgtaccgccacaaaaactggatgcaatcatgttgttccggctccggattatcgagatacgcccgctccatcggggtaaactcatcctcgatatggtaagcctccgccaccttactcacgtaatccaacgcctcttcccgatccggattctccgacagcaacacctctgaatacaacgccacggcaaacaacgccgcagcacggcgggcaatcatctccgggctctttataacagcctcgcaatccatcacctcgcaaggtaaatgctccatgtaaggaactcccgcctctttcaaacgagcaatcgaacgatcccggcgtgccagatcaacatccccggcctccgggcgatccacttccaacaaatcagcgttcgccaccggacggaacgtctcgtactcgctctcccccttcactgaaaaaagcaacttccccttaccgtcaaaaagactcatactcggataaagcaaaaaaccgttcacgtcacccgccacgtcataaaacgtgttcacgatataatttgtccgatcccggttatcatccagttcgaactcgattcccacgacacaattaaaacattgaatctgacgaattacctcctccttgatagccgtcaaagaagtttccactcccgcgaaataattagccataccctccgtgtgctcggctacctgttccgcctgatcccgtacttgtatcatagaacaacgtatcatcgagtcatcctgcaacacgatcatccagcgatcatcttccggggtaaacatctttgtcacctcctgaaacctagcccgcatcgattcggcaacacgattaaaatcgccaatcaccgtgtaaagagtcaaatttgctttttccatacatccatttttagtttcaggcaaagataagaaaagaggcttccgttttactattgaagcctctaaatctaacattatattcttctactctcttttcaacgaaaatgaataaggtacatccgcatctccaataccccggagtctattcggctgctcgctcatccggaattcaattcgaccgcccttcaacaaatctgcatgagtaatataattcttcgtgtaaaccttcctattcaacctcattcgttcgacataacgatgcccatcatcattccccgaagcaatgatctgtatttttttcccgttctcgaaattaatcgttactcttgggaaaagcggggcccccaacacgtattgatccgtccccggacacacgggatagaaccccatggccgagaacacataccatgccgatgtctgcccgttatcctcgtccccgcaatacccgtccggaccgggagtatacatccggttcatcacctctctcaaccaatactgcgccttccaaggctgtccggcataattatacaagtaaatcatatgctgtatcggctgattcccgtgagcataatttcccatattcatcacggtcatttcccggatttcgtgaatcactcccccataataactggcatcaaacaaaggaggtacggcaaaaacagaatccagcatccggacaaaagtctcttttccccccatcagatcaatcaacccctgcggatcatgaaacacggaccacgtatagtgccaactgtttccttccgtaaaagcatccccccacttcaaaggagaaaacggggtcataaaactcccatcttgattctttccccgcattaacttcgtctccggatcaaacaaatgtttataattcatcgcccgtttcgcatatttgtcgatttcttcctccggacgtcccaaagctttcgccaaccgataaatacaccaatcgtcataagcatattccaacgtgcgggccgcactctcattaatccccacattataaggcacgtatcccaacttgttataatactcattgcccaaacgtccagtggaagaagccttgggatgcacgtgttcagtcccgtgcaccaatcccgcgtacaacgcctcgacatcggcaacccgaacccctttcaaataagcatccgccagaacagaagccgaattattcccgaccatacatccccggtgtcccggactcgcccattctgggaaaaaaccgctttccttgtacgtgttaatcagcccctcttgaatctcccggtttcgggaagggtaaaccagattcaacaaaggaaacaagcaacggaaggtatcccagaaccccgtatccgtatacatgtatcccgataacacgttaccattatacgggctataatgcacgatatttcccgccgcatcaaactcgtaaaacttacgcgggaaaagcaccgaacgatacagacaggaataaaataccctatattgatccagcgaaccgccctccacttgaatcgcccccagcacctcgttccattccgtcttacctttttccactaatgcatcgaaatcatcatctcccaactctttcaaatttctttccgcctgttccaaactgataaacgaagaagccacccgagcgtgtaccttttctcctttttcggtgcggaaaccgatcacacttcccgtatgattcgcctgttggtataactcatcacttaactttccgtcggcaaaagtatgtcgatactcaaatgacttatcaaactcgatcacgaaatagtttttgaaattccccggaacccctccgctattccgagtcgtatatccctcaatccgattgttacccacgatcttgacaaacgaaccccggtcaaacgcatcgacaacaacatacgaacgctcgttctccgggaaagtaaaccggaaaagagccgcacgatcggttgtcgtaaactcggtaacgacatcatgttcggccaagtaaaccttgtaataatagggtttggcaacttcccccttgtgcgaaaaccaactcgcccgtttatcctgatcaaactccggagttcccacaacaggcatcaaggaaaactgcccgtaatcgttaatccacgggctgggttggtgagtttgcttaaagccccgaatcttatttgccgtgtacacgtaagcccatccgtcacccatttttcccgtctgaggcatccagaaattcatcccccacggacgagcaatagccgggtaagtattcccggtagacagctcatacgtggattgcgtccccatcaaaggattcacgtattccacgggatcaaaaacacattgagctcgtgcgggtattcccgcaccgagccataaaaaaattaaaacacaaacaatcaacacctgacatttcataaacacaacactataattctcatatattaatacacattctacctgtcccccatcgcgatcatgtactcttcccagagacggtctatatcatactcctctcctaaacatttcacatccccaaccattgacatcaaaagaatatcccccaaatccgagtgtcccgtcccactcaaatgcgtatgactaaaccccacgatcgtcggatcgtcatactgaaaaccagcacaataacgatacgcatcctgctaataaaccccatcaatattatgtggcacattttccgtatcgggactcaactgcactgcaccatacggaacgcaagctcccggaaaagtatgccccatacttttggtcccgataaaaggattcacgtaatctaccggctctttcttctcttctttgttaggcaacatagccccgaaacacaacaaaaatacacatagattcattttatcactcatttatttacacatcgatttcattgtatccaacacacgaatccctcatcctccctccctattaagacaacaaacaagcaaaaaagaggtacaatacgtaaaaataatttacctgtatttaaatctaattcgaaacgtgacgataaaaaccgcctcgtttcgaattaaaaaatgtcctacattccggaaaacagcatctgtttatccgttaattaccaagctatctatcgtcctcgtctccttatccacacgataatcccggttatcaacaacaatcccggcaacacccaccagaataaccaagtagtcacacgcatccccgcctttcctagctcaatctttctatccggagccgcctcccgacgagtgtcaacaggtacctcaccatccgacaaccagtaaaaagaaccggacataagtaaataattcgtggcagcaatctcccgacgatttcgactcccctctccgttactcaaacaatcggcatctcccaacaccacaattttttgtactttatcacccacctgacgttgtaaagctaaagctagcggccacgacttttctatttccccgatagccgtattcaatcgcacggtatcatccagaaaatccgttgtctccaactcattccaaaccccggtagaatcgctcatcaacatcggtatcacccgaaaacctttatcctctgaatattccatcggacaacaagaaggcatggtagccaccgtcccaaaacgcaccatagaagtaaaagcataagcaatatccgtaactgttgccggagtagctttacctaatatcaaatctgccggataatcctctgtcggacgcaccaacacacccggaagaaaacgaactcccaatggttccacgatcggattcatctcttctactctccggggttctcccgctatcaataaatttcccccacgatctatatatctactcaacacggcatattcttccggagaataagcagtcttgacatccgctataaccaaaatatttatttcttccgggatatcctgttccaaacgaacttcacacacgtcaaaaccttgattaatcaaagcatatctagccggcttatcgtaagagaaacgtaaataatcacgatctccccctttgtttatatcccgttcgccatgtcccgttacaaaacccacttttggcagtttcatcacaatccgcttgatcgccgccgcaatctccttttcatccggatgcacgatcatatcatcgtatatccttaaaaaagtcttctctccactttcccgttcgatcaaacgtacaaaattctttgcttcaccagccaattccgggtattgtgcaactacctcctcgtaaggacgcacctttgcggtatccaacttccaaacttcagccacctctgccattttctcccgtaaagtatgattcgggaaatgacggtccagcaccacgttcgtcgtcgtatcataataataaacatacttcaatttaatctcaggcttaaaacggataaatttagacaaacgctctttatcccgatttatagcttcaggcgaagcgaacgtattacgcgacggcgctatcaaattcgagaaagtagtaattgtcattcctccttcagccattttcacaatatcctgactattctgagttaatgtatttactttcattcgagttgcatcataatacaatttcaacacgggcaatgtcgtaaaatagccgagtataatagccaacacacaaactccaacatatcttcccagattcattgccaaagtactcttctgccgaactgcatttaaacgcaagactgacaacgagataaaaagggctgaaaccagaataaaatacacaacatcctcagaacagatcatcccattggcaaactgactggcacgtccgttaatagccaaccaataagtcaaatcccgtacaaattcaacatgctgccaagaattcccaacgtatcccaacatggcaaatatagcgatcgttccaattgccgcaactacctgataagaagttaaactagacatgaacaaaccgatagatgcgtaagtacaaaataataaatatattcccaacattcccgccaaaacaaccggcatatcgaaattctgaacgatacatgcactatacaataccacgacaaaaactccccccaacatacataacccgtacaccatcatggcaagaaacttacccaaaataatttgagtattcgtgatcggagaagaatacagaagttttatagaaccactaccgaattcccgactcatcaatcccatcgtcaacaagggaacataaaaatacagattccgttgaatcgcctcgaataaccctctcaatcctgaaaatatagacatcgtcaaattcccttgcatacgccctaattcctgccccatcacctttggttcaagaatagaacaataagtcattccaacttgaaacaagaaaataaccagaattaaccaggctaccggcgaataaaacaacgtttgcaactccgtcaatgccaatttatatatctttttcatatcacttactatttactttttttagacaactctgcaaatatcgaatccaaagaactcttttcctgacgaatctcagttaaatgccagcctttacgtacactggcttccaccacccggtctatcacatccacggcgtcattatacttcagacgataatgaattccccctaaataactcacgtcaagcactccctccaactccttcagttctgcctcacccggattttcccgcaaagaaacaaatatcgtattcgggataatataattatcaaaatcccgtaccgttcccgagaaaattaattgtccgttttcaatcataaaaatatgatcacacacagcctgcacttccggcaatatatgcgttgaaagaatcaccgtacgatcttcggctatctttttaattaaattccgaacttctgcaatttgattcggatccaacccgttcgtcggttcatccagcacaacaaaatcaggattgtgaataatcgcttgagcaatcccaacccgttgctggtaaccaccggaaagattacgaatcaaccgatttcggaaatgtgttatattacattgttctaaaacccgatctatcgcctctccaacctgtttacccgggatatcccgcatattggcacagtgtttcaaatactcctccaccgtaagatccacgtgtaacggggccttttgcggtaaaaaaccgatcagacgtttagcctccaccggatgtttacgagtatcgattccccgaataaacacgtctccctcggtctgtttcaaaaccccgcacataatattcatcgtggttgacttacctgcaccattcgaccccaataacccgtaaataccattcttacttatttccaaatttatatctttaacggcccaatgaaccgaataccggtgaaaaagatgttccaccttcacaattggttgttccatacaattttatttaagatttacacaatacgttccactaaaggcctaaaaagacctttatcaatttttgattttaaagattcagtgattttaaatttcattcgcaccacctgccccgctttacaatcactgaatcattctacctaaacattacacgttaaatttcacatgattataatatcgaacttgctttctccgacaggctttttttactcgtcggctttcggtatattatacttattccaattcgaccatttaaattcaagatcaacaattcgaccaaaaccctctttctgataaatcaaatgcgtggggtcaaaaagatgttcattctttatcgtaaacgtcgcaaaaatcccattagccgtcacaacacctaactcagtttccgacgagttggtctcaagatccacgatcacatctcccccttcaacttcatcaaacttataagctttcttggtcgacaaatcataccaataaatcgtattaccactcgaaaagaaaaagtacccgcgttgcctcaaccgataaaacttagaatcttcactcaaatacttcgccccgtcaaaattcgattgatcacagctagacatggctattgcagaaaaaggcgggtttaccgtgggaacaaaataagccacctgcatattcaaagctttcacaacgtctcctctcttgaaaagggcaaaagtgggtatatcactccacgacgattcctgcccggaacgcatatacaacaaatcccagtccccgtaatcattcaaatttatcaacgtatccacgtcaagcattcggatcggataaaacctcttgatagcagaagtattatacccgctcccgaaccacaacaaccgacgattttccgcatcgttaaaagcattaaaaaaagccgccgtgggttttccggtaaaaat

SEQ ID NO: 10774 - DNA, 20935 bp, Unknown
  gut microbiota DNA sequence
tttgatacattgttagggtgtttgttaaaatttttgtttaatccgagtcaaccattttcaggaaagtacacatgtattaatctttatttcgtgtattaaatcagactgaataccagattattccaccacgaccacctcttctagttcatcccgagtccccgtgtggcgacttttcttgttaatccggtccataatcacggcaattgcaccatctcccgtcacgttacaagccgtaccgaaactatccatcgcaatgtacaaagcgatcatcaagccttgagccgtctcgtcgaatcccaacatggattgcaataatcccaaagccgccatgatcgcaccacccggtacccctggggctgccaccatggcaattcccaacatacaaataaacccggccatcaccccaaaagaaatcggcatccccgacatcaacataatcgccatggcacaagccacgatcttcatcgtactacccgacaagtgtatcgtggcacaaagtggaatcacgaaagcagccaactcccggttgacgccatttcttattgtttgctccaacgtcacgggaatggtcgcagcggaagattgtgttcccaaagccgtcatgtaagccggcaacatattcctaaacaaccggaacggattctttttcgacacgatcccggcaatgaagaattgaataaacagcagaacgatcgtcaggaaaaatatcatcacgataatcttcacgaacacgcccaacacaccggaaacctgtccggaattcgaaatattcaagaaaataccgaaaatataaagcggtaataaaggaataatcacgcccgtgatcaccttgttgataatatctttaaaatcctccatggctcctttcaaagtagccccgttgatcaccgacattcccaaacctagcgtgaaagctaggaccaacgaagtcatcacgtccatcaaaggcggcatcatcaccgtaaaataaggagccaaaggttccaccgccgccgtttccagcggctgtaattcggcatctttcaataaccacggataactcaaatcactggcaaaataagtaaagaatcccgaaaacaaggtaaatccatacgccagcaaagcagttatcaacaacaatctcccggcccctttgcccaaatcggcaatacccggagccaccaatccgaggatcagtaacgggataataaaaccaaggaaattactaaataaaccatttatcgttaagaaaattcttaccagccaaccggggaagaaaagtccgcacgctatacccaaagcaatcgcaatcacgatctttggtaataatccgatcttcttttttttcatacgcccatctatttatataaaaaataaccttacattcgcatcaatataagaatcatgagcctatgacaaaagataaatggcatggccacatagccatcttcgccgcaaacatcctctttggaataaatattcctatcgccaaaaccttaatgccggagtggattgatcctgtaggcctcacgttcctacgtatgtcattcggggcactcgccttttgggtggtttccctatttaccttaaacgaaaaagtaagtaaaaaagatttactaatcctgtttttttgtgctattctaggcacaactgttaatcaacttacattcattgaaggacttggaatgacttccccgattgacgccggattaatcgtcacgatgaatcccatgatggtgatgcttatttcagctctggtgctaaaagaacccattacttccaagaaggcaggcggggttttaatcggggcctgtggagcactactgatcatctggcaatcctactacacgataaatcaaggacacggcggttcgctgatgggcaacctgctttgttttattagcgtggtgagttacgcaacctatctcgtgatttcgaaaccgatcgcccagcgttattccccggtaaccctgatgaaatggatgttcctgttctcaacgatcctcatgctcccgttcagtatgcaagacgtggtaaacgccaaactattctcggaggagacgtctttaagcgctctgaccagtcttttctacgtggtattttttgccacgttcctcgcttacctgttcatcccgattgccttgaagcgcatccgccccacgacgatcagcatgtacaattacgcacaaccgctggttgccgccacgctagccattcttatgagccaagacacgctaacttgggataaacctattgcagctctactagttttcacaggagtctatctcgtgacgcaaagtaagtcacgggctgatctggaaaatggagggaatttcacgactaaaaataaggagtaaactacaaagcaaaaaaagacttatcacggatatagtatgttcccgataattattatcttataataatcaacatgagacaactacaaaatcgtatcgtctctcaacacaaaagatattcttttactgcaagttaaaactaatggttaccgttaaatccctccgtacattctgctgatgaagcggacaccatgcgggaataaatttcggggcagatttcatgagtcggacagcttccacgttaagactgtatgctccgccttttatcacatgcacgtttgaaagggacccgtcgagttccacagtaaaaccaataacaatttttccttcccagttattttgtatcgcatccttcggatataccacatttttactgatccactccatcaaattcccctgtgcaaacaaaggtagtcgcacgtaatgcacgcatttaaactcatctttttcaacaacctgaccacgggaacggggaatcacaggtaaaatatatttcaaaaaataacgaatatgatcatcccggtccatcacttcacgtaattttgcctcttttagaatattcagatgtgcaaatttgggtgcagccataatatatttatgaataaacttcttaggcccaatctcttctaacaatcttatttccatatcgtaaaaataacggaacacaccctccagtacgttagctcccgtcttccgtaatcccgcatacctgatcacatcaaccgcatagcgggaggcatactcatctgcacgtttcaccccttcacatcgccaattatacgttgcccgatctccgtcacgatactttgccatctgttcttttaaatgttccgggttttcatcctccgggatctccgacacgggaatctttgattcctcatccaacatttggaggtaattttcatacgaaagcgaatccgtccgacagattgacacttgggtaaaaactctaccggatagcatactgaaacacaacaaaagcataaagccttttttctttagagaactaataacaaacgccataggatacgatttataattttactcaaatatatttttattctcacaaaaaactattgaagtttgaaatttatcggagccgtataataaacagccacttttcgcttatggattggacatatcaccggaataaaaggcggcagttgacggatgacccgtacagattccgcatccaaactcggatccacactttgaaccacgtgaacgtcagagactctaccatccgtgttaatcaagaaacccacgaccacttttccctgaatattatgctcctgcgcaatcatcgggtatttcacttctctcatgattcgattctgaattccaccgatcccgtgcaaagatacattcaaacgataaaaacatttacaggaacaaggctcattaccatcaggctcatgagcaatcattttctctttcatcaaatcattgaaatacaacaagtgttgttcgggattcatgcattcccttattttcacttcttccaagatattcaaatgagcaaataagggtgacaattccgcaaatcttttaatcaagtccttctttcccattctctttattagcttttcttgttcaagccttttccatttatacacgaccttcaattttttctgctgttctttatccaacttgtattcccgaataaaatttgcgggcactctcacattatacgacggactcatcctatcaagcactaatttaaaagcactttccccacctttcaagaattgttgtttctgtgccacatacatctgtattattaccggatctgtctcttcctgaatattttccaaagggatctttccttcccgctctaacatggcaataaattcatcatatgaataaggttcagccaccgcacgttcgatattaaacatcaaggggcaagtaaagcgataacgcacattctctccattgatctttgccggtttccaagcaggcatcttattaaacacccttaacgcttccgcatctaaagactcatgtactccccgtacaacctgtacattagaaacttttccatccttttccacgatgaaagcgacgatcactttgcccataataccattatcccaggctacttgaggatattgaacgttttcacctatccattgcgtcatatcccctttaaatttaggaccttcatccgctacgacataaaccgtcgtgtcaacatctaatcgattcgatgcattcaaaaccccagtattcaaaatgcaacaaaatagtaccacgtacaatttgtaacatgtcttagaaatgagcttaatcattttcattttagcgtaattttaacacacaacttgcataaaagtacaaaaaaaataatataatcttagtttttttgcaaaataattacatccgaacactcctgtctttgttttgatagcaacaattcaaaatagtttttatcttttagtgatgctatttattcatttatctttaaatttgtgcaaggataagtagcgtgatcatggttattagcgagagacactttcaacaatttatcaaaggtgacgaaaaatcctttgaatcgattttctgccaatattacaagacattggtatcttacgccatgcgtcatgatctggaactcatggaagcggaagatgtcgtgcttgaaatatttcatcatatctggcaaatccgggaagaactaaaatcacccgccgcccttcattccttactcttcacggccacgaagaaccgcacgctgaacgtggctcgcaatctcaaaaatcgccaaaaacttatctcggagaatttcccggtgaaagaagaagaagagagtcaggattacctgatggaagaagaaatgagccatttgctgaatgaagcgatcaatcaattgccaaaacaatgcgaacaggtcatcatcgggttactggaaggcaaatcccttcaagaaatcgccgacaacatgcaaatatccgtgaactcggcgaaaacatacaagctaagggcgattcaatccttacgttccttattgaaagataccccgttcttactgttaatcattttaatacgaagtaccgaaaccgattaatcgataaaaactcaaaaaaaatccatttcttgtcaccgaaataaaaagttgcgggtttataagatataaacaacgtaattatggacccgatcataaagaaacaacgtatcgcatctctcattttaaaggagaaaatagacgaactaagcaagtccgagaaggaagaattaacttcttggcttcaagcatctcccaaaaacaagaaaatatacgcccgcttacaagaaaaaagtttcagcgaggatattgccagataccagcaaataagtactacccgcggcttggataactatcgcagacgctacgtacaaacgaacaaacgattactcggcaaatggtattgggccgcagccgtcgccgtctttatcatcggcatcgcaacgctgtttttctaccaggaagaacaccctaccgtggccaaaaccactatttcccctggaagctctaaggcaatgttgatcttaaacaacggagaaatcatttccctttcggaaaaaaacaaaacagaaatcgtcgctaccgaggaattgtctatccggaatgaaggttcgcgattacgttacacggcatccgaaaatacaaaaaacgaacaagccaataactacaacgaactgatcgttcccaagggaggtgaattcacacttaccttatcagacggcacgaaagtatggttgaattctcaaagtaaaataaggtatcccgtcatattcaacgatatcacccgagaagtttacttggaaggagaagcctatttcgaagtcgccaaagatccccaacatccttttcatgttaatgctagaaacggggttaatattgaagtactcggaacttctttcaacgtgcgaagctacacggacgagaatgctatcgaaaccgtactggaagagggatctgtacgaatgagccaagggaaagatgccgttattctaagccccggtaacaaggcagtctatcttcccaacgaaccgattcaattgacaaccgtcaacacggaactctacacggcatggagacacgggcaatatatattcatggaagaaagcgtggagaatatactgaaacaattgtctcgctggtatgacatagaggtattttacagtaacgaagcggctaaatccgtcgtgtttagcggtgacgtcagaaaatatgacgacatcaacacgctactcgaagcgatggaaatagcgggaggaatacatttcaggataaacgggaagacgctgatcgtgagttacagcgaataggcaacattcaacaacaatctgaacttaagtactttataaaacgatcgttttatgagataatcataaatatgctaaattcttaacacctattttatgaaaaaaaactgtcgaatattaaccgcaatgctacttgcactgataggcttaccctcctgttccgacgaggataatgaactatcagccacgggccggattagtttttatggggaaaactatctgctggagcaaggagcgatttatcacgacaacaatcacacggtgattgcagttacagattacaccttcgaggatcgatatcaaggagaagacggggagaaagtcgatcaagtaaaaggttttagcgccgaggtaaaagggaaacagacgggcaatttcctgatcggcctttacgaacagggtttcgtgctgagcgatctgaccaaggacgcacgcgggagtggggcctgcatctgtcttagggtcgcctccccggaggttgacaggatcgtacccggcaaatacgcctattccttgaaccgtgacgagtattccttcaagggtaattccagcgtgaaatacaattcgggaggaagcacgacggcaaacgagttgtcggaaggtgaaatcaacatttcccaggaaggggatatttacacgattactttcaactgtaaaaccagtttcgggggaccgattgaaggaacctacacgggaagcttgaaatcatttgatatccgcaaggagatcgggaccgtgaatttctacgagaatgtcaaactggaagccttgtttgacaaagtggagtacacggatccggagggggtattccacagtgaaccggattacctgcgggccacttcttttttcttgagttccacgcaacaagtgtactcggctaatctatacaaagaactcgcggaatctgtcaagaaaggcattgatatcgccctggcttacgacagaacaaaccaggccgtgtatttcgaatccccgataaaaatgagagccttgctgtggcacaacacgttccaaaacgaaagtctactcgattacagttttgaccttccctgccacacgaagtacatgcccgccccgcagagtttcacgaacgcagattttgaagcactggcacaacaagaagatttcgttttcgatttcacggaatcaaaagtgtccatccctgtcgggtcaacaaccccgcttttcgttttcgtgcaaaccggcaacgggctacaaggggccattcgcatcaaagaagtcattccggaaagcacggaaatgatcgggggaattgtttatcccgtgaatccggccatcgtcatggacgtgaaatttccccgaagtttctcggaacaacaaatcagataagctcatcacaaaatagctaacaacatctactatgaaaaaaatcaattataaaaataattgtatggggaaactatggaattttttcagattctcgctggtctcactagccatgcttctccccatattatcggccaaggcgacaacggacgaaacaaaattaagcctgtcgctgaagaatgccaatttaccgacaattttgaaagagattaaaaatcagacgaaatacgatttcatgtataactccaaggagatcgatattaacaaaacgatttccgtgaacgtgaaaaacgtgtcgttggattcggcattaaaagtatgccttactcctttcggtttgacatacacgatgaaagacaaaatcattatcttgaaaaagaaacaggaaaaagcaaacgctcaaatctcgcaacacctgatttccggggtcgtgaaagacaagcaaggaatgcttttacccggcgttgcagttattttaagaggaaccacaatagggacggttacagaccctagcggacggtttaaaatcaacattccgcagggaaagaatatattaggcttcacgtttatcgggatgaagcccgtgcaacgggaagtggaaggagaacaaattatttcggtgatcatggaagaggatgttgcagaactggatgaagtcgtcgttaccggtatggaaacgatcaagaaagaccacatgacaggaagtgcctccgtgatcacggcgaaagatttacgcacgcaagggatcaattccattgaccggattctggaaggaaccatcgccggactgaacagtacgaccctgtcgggagcccccggaacccgtgcaaaaattaccatccggggagaaaataacctcaccggacggacagaacccctctggatcgtggacggccttcccctcatgagcggtgtaccggaaaacaataccggggattatgcaggtaccatcatgcaagatggggtcggtaacatcatgcccgaagatattgaatcggtaaccattttgaaggacgcttccgccgcggcaatctacggggcaaaggcagccaacggggttatcgttatcaccacgaaaaaaggattccgttcaaagacacaattcaattacaccggaaattatagtctggccgaagctccccgtctacacatggacttcatgaattcccgggaaaaactacaatacgagcaagatattctaaaaactttcggactcagtttttcagactggaccggacgaggcgggtatctttacaaacaattactggaaggattcatcacgcaagatcaatatgacaaggaactcaaccgattgaaaagcaagagtacggactggttcaaggttttgttccgcacggcccaatcccattctcataacatcagcatacgagggggatcgaacgaaatgacgtattatacttctgtcaatttccaagagaaaaacggaattttactttccaataaatacacgaatgccggaatcttaatgaaactggactatcgcccgatcaaaaatttaatcctcgcccttgatttgtcagctaacatccgcaagaacagggaccacgcttcggctgtcgacccgttcaaatacgcggtttttgccaatccttacgagcgtccttatgacgaaaacgggaattacgccgccgatttaagctatctaggtaaaaattacacggaaatgacggcttccgggtataaatacgattcgtttaacattcttcgggaattgaacgagaccaagaaatcggatgacggcctggatgccagcttgaccttcaatatccgttacgacatcattccgggacttgccatttcatccattatccggaagggagccagttacaacacgacgaccacggaaatcgaggccggcacgtacacttcttataacaaagaaacgtttgccaaacaaatatacaaggatgtactcccaagcgaattcaacaatggagaactatccgagtcttcaggtaaaaacttcaactggtctatccgcaaccaaatcgactattctttcacgatcaagaatgatcacctgttcagcattttactggctaatgaagtcacatccaaaaagttcaataattccggctacacttctcccatgtattacggggactaccgcatcacgggcgttccggacttggggaatgatgtttcgtacgaaacgctacgggctcaaatcggaagcatgtttaacacctctaccgggcaggatcgcaccgtatcgttcctcggtaccttccgttacgggtataaagaccggtatatcttgaatttcaactaccgggccgacggggcggatgctatcggggatgccaatcggtttaccccgttgtggtccatcggattacgctacaatctacaccacgagaaattcttcaaaaatgatattgtcacggaattatccctccgcggatcgtacggttacaccggaaatatagaccggacggcctacccgttctccacgatcacgctaggaagtgatgcttacgagggcaaccgattcgcaaccggattcacctatccgaatccttccgtaggctgggaaaagaaaaaagaccggaatctgggtattgatatcggttttctgaaaggcaggatcaatttcaccatggattattacaataaccgcacggaagatattctggaaaacttaagtattcctatttccacgggtagatcaagtgtaaaagccaacgggggaacggtggaaaacagcggtatcgagttcttcctcaatatcagatggatcaaccggacagacctcacgttcagcacgtcggcaaacgtggctagaaataaaaacgtaattatccgttcagaacacgattatgattcctacgcatcagccatcagttccaaaattctcaaaggaggtatcgtcaacgtgatcgggaaagagaccggctctatctacggttggaagattgcaggagttgatccgttatccggtaacccacaatattacttgacaccagaaggaaaaagggaatacgcacaactactggacaggtgggactccttatcggaagcaaatcagcaaacttatttaaatagtggtgccgtacccacgttggaatccgtccctgactatgtatctttcgatcgggatgcaagcatgtctccggattattacaaaacttccatgcaatatttgggacgttccaatcccaaatacgtgggaggattcaacacctatttccgttacaagaatctggaattctccactcaatggagttacaaggtgggacatattattcaatcatttaatgatcttcagaatgccccgaataactgggggaatgaaagccaagccgccatcggttatgccagtgatttaagcgtatcgggaaccaaccgggaacgacgttacctgaatttctggaaaaccagaggagatatgaccgacatcgcccgttttgtttcatccggcaatgattactggtccgggatccacacatcgactaaatacgagaaaggggattacctgcgtttgtccaacatcgccatcagttaccgtttaccctcggaagtggcacaacgcttcgggatgaaaaacatgtcgctctccctcaacgcatacaatttactgacattcaccaaatataagggcttggatgtcggcacatcaggagcattctcttacccgacatcaagagaatacaatatcaaactatccgtaggattctaaaaaatcaacgatatgaaaaagttatatatattaatcgccctgacaagtttattcttcgtccaaagttgtgacaagttcttggacctgaaaccggagaatatacaagtggtcagcacgatagaagattatcgagacatattggcaagttacatgagattattaaaaaccgtggacggtagtcaaaaaccggtactgggaggctattttttatatccctcgttcaacgtggcctcaacatttgcttatcgttccggggaactcaccattaataaaaactccagttcttattatgatgcctctctgggagaatataaacaaagcgcagtaaatctgatgagctggatgggcaccgccgacggttgctggcgcagctattactctttccttggcccaatcaacatgatcattgaaggaatcaagacggccgagggagatgatgaacgcttgcgggattacgtgcagggagaagccttggtatggagagcttattcctatttcaaattactccaatacttttctccttacaagcaagacgaatatggagtccccgtgtatttaaaaccgtacgaagaccccggtaacgccatgcccaaacgtgaaacccaaaccaatgtctacaaacgaatcctgatggattgtcaggaagcactcgatttaatggaacgcaccccttccacaacatggaactgtgcttacaatccccgctttcttcacgggatgcttgccagcatttattgttacaaagcaatgtcggcagtagccgaagaaaaggattggcaaaatgcgattgatcacgcagacaaagcgatgaccggacgtactttcgtccgggatcaggcaacatacgatgccatatttgatgctcccgctctacaagcctttacaaacgatgagttttacctccgcatggtggatggctttaacggtcaaattgtagatgtttcgggagtatattatcaaacatattctacctcccaagccaatccgggaccggaacccgaattttacaacctgtataaagatgatgatgtaagaaaaaacaccttctttaggactaaaacagatggaagtcttatatacgacaagtataatctttccgacagcccgtacgcatcgtggggattagcgaatggagggataatcatgttattccgaaccgcagagactcaacttattaaagcggaagccctgtgtcgattaggaaaaacgactgaagctaaagaggcgctaaacaagtttaaacaaggacgttatcttgacatcgagggctcttacacggaatccgacctgctaaacgaaattctgaaagaacggaaactagaattttatcacgaacaggacgtatggtggttagacatgaaacgtaccggaacccggatggaaagagtcatcaacggtactctgtatgtactcgaaccggacgactatcgttattgcttccccatcccgcaaagcgaaatggaggtaaacaagaacatgattcaaaatccgggttgggatgagattagtctttaacttctaaattaaaaaacatgaaaagaattctatacaccctcgcggcaatctttatcggatgcatcctatcctgtaccccggataaagacgaagtcctggaaatggggccggttgacatggatcacatcaaggaaataaaactacgcaccagtcattaccagatactggccgacgggaaagcacaactcgaattcaatccgttactcacgacggaagacggatttaccgtacaagacagccgggtagatcattcccagatagagtattacacctcgtcgggagaaaccctatcgaaagtattctcgacttccgacaagtcacttatcggcaaaacactcaacgtgtatgccaaaatcaaaggcacggagatcacttcgaacacaacgacgttcacggtcatggacccttccgtctcgaacgcttacacggaaatcacggttccggtaatattccatttgattcaatccaacaaggatatagcgggttacggcggcgaaatacccatggaaagaattcacctgcttttagataaaatcaataacacgttctccgggagcgccagcacgaacgccatgggtgtcgacacgaaaatccggttcaaagctgccgtttacgatctttacgggaacaaattgcaagaaccaggcatcaaccgaatctacgtggaagaggtaaccgatgaagctaaagatcaatacaacacgtttatcgtgaatcaaaaagcattatggcctcacgacaaatatttgaacgtgtggctgatctcggatcgggaaaacgaatacgacaaattcttttatactatttccagaacatgtattccccggtatatcacctccgggacagacccggcagaaatcccggaaggcttaaccctatcctctatcccggaaagctggaccccgacacccaacgaggtcggcatcctctacaaactgcaatcgatacaaacgatggtacgttctttcggggaaaagaatgaaaacgaactggtaaacgggttcgggttctacctgggattacttcccacgtggggagcttcaagtagtgcgaaaccccaggattattgctcggacacgcataaatactatggaaatgacaaagaggggtataacaaaaaccaaaccgcctataaacttgtcggggattgcttcttcctcgctgaaaatatcatggatgatcccgtcggggttcaccgctccgttagccagcaacaggctcaaagaatacgttggattctgaccaatagcccggagcgttcggcatggaaatccgactacgcattcacaggacgataagatgttcaactataaattataaatcatgaaaaaaatcgtattatcatttgtatgtgtactcgtggcttgcgtggcaagccacgcccaaggcgtgaaattcgaatcgggcacgtggaaagaaatcctgacgaaagccaagaccgaaaacaaaaccattttcgtagatgtctacaccaaatggtgcggcccttgcaaacacgtgtcggaaaccgtattcccccaggaaaaactgggagaatactataattcccgattcattaatttcaagatagacgcggaaagccccgccgggaaagagttcgtgaaaacctatcccgtaacgggttaccccaccttctttttcattgacgggaatggcaaagtcatccataagattgtcggtgccaaagatgtcgatggatttatctcggaagcaaaaatgatcaccatgtatgcccgtcacgggggaattgacaacatgatggccgccattaagaacgggactgccgataaggaattattatacgactactacatttccgccaacaaaaaaagtaaaccggaagctttgaatctttacttgaaagcgctcccgaccgaagagttgatcgacgagaacaacaaactaattgaagagatttccctttacgacaaagatttgatgacaagacttgttgacgagattgtgaaagccagcaacgacggccggttctccgacgggaaatatgcggaaaagttcgcattttgtatcgtcttccccgtccagtacgacatcacaaccttcctgcgcaaaagtatccaagaaggcaattgggaatggttcaatgaattgttacaactaaaagaaaggtttgccaattacggcggccgagtgtacgggggaggcaaactactggacggagacctcaacattattcaaggccggggcttattcttcgccacgccggaatacaataaactttgctactggaccagaaacagggtcaacgaagaggaattcaaaaacgctttagtcacttacatggacaaattaatcagcgagaaccctgtcgattccctgatcaaagaagagcatgatcaagtactgaatatgatcaaaaaggaaggattaaaagggcaaatgcaatttttcgcccaacatatctttgaagccggaaatgtcacggcacataatattatcgcctggaccgattatttctggaaactttccccttccgacaagaagaccaaagcattatgcagcaaatggatcaactatgcctataacgtaaatcgtttcaacaataaagttgctgttccagccgccgatctattggctagaatcgggaatttcaaagatgccaaaatcatcttagaaaaagcgatcgccagccaaaaggaactcaaaaacgaagatcagaaagtttacaaacctctcgaattgaagctacgggatatcaacaacggtaaactgtaagagtccttatcaccatatcaaaaaactcaccccctcctgagggggtagttcttaacattccattataaaaacagattatgaagaaaatcgtattatcatttgtatgtgtatttatcacttgcatggtaagccatgcacaaggtgtaaaattcgaatcgggcacgtgggaggaaatcctgacaaaagccaagacagaaaacaaaacgatcttcgtggacgtttacaccaaatggtgcggtccctgtaaacacgtgtcgaaaaccgtattccctcaggaaaaactgggagatttctataatccccttttcatcaatttcaaaatagacgccgaaagccctgccggcaaagagttcgtgaagacctatcccgtgacgggttacccgacattctttttcatcgacggaaacgggaaagtgatccataaaatagtcggagcccgggatgccgacggctttatttcggaagccaacatgatctcgatgtatgcccgccacgggggaatagacaacatgatggccgctatcaaaaacggaacggccagcaagaagttactttatgattactacacttcggccaacgagaagaacaaacccgtggccttgaatctttacttaaaagccctccccacgaaggagctaatcgacgtggacaacaagctaatcgacgagatttccctgtatgataaagaacttatgactcgcctcgtggaagaaatcgtgaagttcagtcacggggaaaagtttaacgacaaggaattcgtgggaagatattcttttaatatcgtttttcccgtgcaatatgacatcacgacctttttggagaaaagtatcgcggaaggagatctcgaatggttcaacgaattactggaattaaaagagaaattcaatcattacacgggaagattactggacggggatctaaacataaaacgaggccgagggatattcttcgccaccccggaatatatcaaattatgctattggactaaaaacaggaccaatgaagaaggattcagggatgctttaacgacttacatggataaacttatccgtgaaaatcacgtcgattcgttgatcaaagaggatcagaatggcacgctgaaaatgataaaagaagcgggaagtttaaaaggacaaatgaaattcgttgcctcatttcttctcgatgcgggtaacgtgacggcccacaatatcatcaactggacgcattatttctggaaactctcgccttcggacaaaaagacaaaagagttatgcacccaatggatcaactacgctttcaacatgaatcgttttaatgatcgcgtagccgttccggcggctgatgtactggcacgaatcgggaatttcaaagaagccaaacttatcctggaaaaagcgattgccagccagaaagaactgggtaatgacgatccccaagtgtacaaaaaacttgaactaaaactccgggatatccataaccataaacggtaaaatcagtcgggaaaaagtattgtatgtttaaaatcacatggtatgaacgaatctatcctaaaaatcgaaaacctatcccatcgctacagtgtacagtgggcgatccgggatatcaattttgaaatcaacaaaaacggtatttacggcttactcggttccaacggggccggtaaatccaccacgatgaacatcatctgcggtgttctcaagcaaacggagggaagtgtttcaatcaaaggaatcgacatgagaaaagatccggttcaagcgaaacgccacatcggtttcctgccccagattccccctctccacccggacttaaccgtggaagaatacctggtacattgtgcaaacttacgctacgtacctaaaaacgatgtcaacaaggctgttgacgaggtaaccgtccgttgcggaatctcgcatttcaaaaaacgcctgatccgtaatctatcgggaggataccagcaacgcctgggaatagcccaagccattatccataatcctgatttcgtcgtgttcgatgaaccgaccaatggcttggatccgaatcaaatcgtggaaatcaggcatttgatcaaagagattgcacaagaacgtaccgtgattctatccacccacatcctgacagaagtgcaagcgacctgcgatcatatctacatgatagaacaaggaagtctcgtcttttcgggttccgtcgatgaatttgacaattacatagaaccgaattccctgcttctctctctcctggcaaaccccggaacagaggaattacgccttatccccggaatcacgggagtagaagagttgggaggctcccgctaccgactgagattcaacgacacgcccgaaattgccgaacgcatcgtcgaaacaagcgttgccaaaggctggcgcctgaacgagatcaacctggaaaagagttccatggactccgtgttcgccgaattatctaaaaaataacgtaaatcaccaagatatgaacatgatattcaaaatagcgaaaacagaattacagactttattctattcgccggtagcgtggctaatcctcattgtattcacctttcaagccagtattttattcacgggaactttcggcatgtcggtaagaagccaggccctggaatacgaggtaggaaacctcaccctattcacgttcgggggagattacgggttattcacccacatccaacaatatctctacctctatatacccctactcaccatgggattgatgagccgggaattaagtagcggctccatcaagctattatactcttcacctgttaccaataaagagatcgtactggggaaatattttgccatgctcatttatggcctggtacttatcgggatactggccatttacgtgctctattccgcctgcacgatcaaagcattcgatttcacggttgctctttccgggctactaggactttatttactgatttgcgcttacgcctctatcgggcttttcatgtcgagcttaacctcctatcaggttgtctctgcaatgggtacactcgctattttagcggcactcagcctagtccgcggcatgtggcaagacatcgagttcgtaagagatatcacctactggttatccatcaacggcagagccgatgaattcgttaacgggttgatatgtagcgaagatatactttacttcctgatcgttatcgcccttttcctcacgctcacgatcctccgtctacaagtgatccgccagaaaaccagttggaccattgcctggggaagatacatcggggtattcctcatcgccatcgtgctcggttatttcagttcccgccccagattcatgagtttttacgataccactcgcacgaaacaaagaaccctaaccatgaatagtcaggatattatcaaaaaaatggaaggaggtctcaccataacgacctacgtgaatatcctggacgggtatatgtactacgggcttccgagctcggtcaaaagcgacatgaatcgttttaaaatgtatcgacgtttcaaaccggaaatcgacatgaaatacgtctactattacgatacggtaaccagtcgatcgctttcactccgttatccgggaatgacgatgcgtgaacagatgaaaagaatcgccaaaacaatcgacctggataccaacaaaataaaaactccggaagaaattcgtaccctaatcgacttgagtagcgagaataaccgctttgtacgtttattagagcgagaaaacggggaaaaaacattcttacgcatatatgatgatttcatgaacccgtttcccaaggaatcagaaatatccgcggcattcaaacgcctggtcatggagttacccatcgttggttttgtcaaaggacacggtgaacgaagttgcacgcaggagggagatcgggattacaaacacttctcccaagacaaacctttccggtacgctttaattaatcaaggctttgacatcgcggaagtagacctacaacatgaaataccgtctaacatcaccatcttagtcattgctgatgtcagatcaccgttcacaccgaaagagatgaacacgttgaacacctacatcgcccaaggaggtaacctgatcattgcgggagaacctaaacgtcaagcattgatgaatccattaatagaacaactgggagtacagttcatgccaggttgcctggtaaaaccatcagaaaatttctccccggatttaatcgtttcttccgttaccaaagaggccggagaactctcgtatctcttggaagacatgcgaaaacaagactattcgttcaccactcccggatgcacgggcttaaattacgtgacggataaaggattcgaggttattcccctcttcaaaacagacaccaccggttgctggaacgagatcgagaccacgaatttcatcgacgacacggtgcgcatgaatccggtcaaaggcgaaagggaagagatattcaccacagtcctcgcgctacgaagagacatcaaccataaagaacaacgtattattatcatgggagatgccgattgtctcagtaactcggaagtcgagatgagaaggaaaggaatccgggccgccaactattcctttgttctcggaactttcttctggatgtcgaatgaagaagtacccattgacatccgccgcccgacaccacccgacaataaggtatatgtcggagaatcaggcatgaaagtcacgaaattcggactcatcgggggcctctcccttatcctcatattctttgccatctttatctggataagacgaagaggaaggtaatagtaacgcaccgtacttaccaaagtatctcttctgtactactttacaataaaagtaactattaatctattattcactagctttttaactgtatttacagtagaagagcaatagagtagcagaagagtagcagtagagtaagcgaagaagcacaccagtaaagggctagagggtgtgaagtgtcttatcctaaaaaagttgacttgttcaacaagtaaacttatgtcagtagcaacaaaatccagtggtt

SEQ ID NO: 10775 - DNA, 7669 bp, Unknown
  gut microbiota DNA sequence
caacacctaaaagtatcaaccccaaatgtaacgcagccgttcccgcgcttaacgccaccacttgcttcccctcatcttcaactttcaattttccattttcaattaaaaagtcccgcagggctttttcaaaggcgttcacgttcggtcccaacggaacaacccaattcgtgtcgaacgcttcttgtataaactcctgttctcgtccgcccatgtgggctaatgagagccaaattctatttttcatcgaaaaaaatttagaaaacaaattcatcgagtcacaaacaccacttacgcgactcttttatatatatctgatttcaatgctaaatattccacaaagaatcattttccccgattctccttccactcaaaatattcatctcgtaaaatcgccactggccattcatcatgataagcattatttttaaacacgctctgcctgtaatttccttccactttccagccacatttcgcgtataacttttgagaagctatattatattccaaaatactaccatataatcgattcagttgtaactcctcaaaagcatatttcattgttgcatacacgctatctgtcccaatcccaacccctttaggagcatcattacacaactttattccatgatccgcagaacggtttttccaatcaatttgagtcaacgtggatacaccgacaaacatatcttcgtacatgattgcgaaacgaaaattcttattatcactaataacccgactataccaatccatttgttgtttctctgaaacaggaaaactccaaccgataaccaatctttccatctctggatcattaatcatttcacgcaaacaaggcatatcactaggttccaatgcccttaagatgactttatccccataaatattcatacacaaatatttcaatattcaacaaacattctttcagattctaacacgacaggttctatatccacatctctaaaaaatatgtatggcttatcgtaatgatgatactggtccctgacgatgttatccgcattaccatcttccatgatacgtatcgaatcctcaatcaagtcaaaaccgacttgagccataacgccagtataggccatgtggcgaatattcacttccgtgaccttcatatttccatttctatcctctttgaggtcaaaagataaaataccatgagcctgcacgttcaatttcctacacaaatattgtatacaatcatcacaaaatttattaatgcgatcctcatccaaaaaacgagcgaaagcagtattacctgtcacacgagaaggtgcgatatttgccatcacgtactcaacacattccaatgcagcacctttcacgtactcgttattataataaagcatttcgtttgccaaatgccttccggttaaaaattcactaaccgtaaactctggtatttgattgttgataaaaagccaacttttataactactgagattttccaattttaaagatcctaatccacctgtaccctcagtcgcacgaatccaacaaggaaaaccaatttcgtcctctacatcttcatatcggggattctcctgggttaccttaattgttttgggaataaagtccgtatccttcaataattcagccatgatagctttatctctcaatgactctgataacaacttgcatcccataaaaacaggacacgggaatttcccgtatttttcaaagtaatcaccccattcaacaatttcactttccggttggacaaatgcgtaatcaattcgtttttctgcaactaacttttctataaaagggaaatattcgatatcggtacaccggggacataccgaatagtcgtccaacaaccctttcatgaaaaagccaatcgcttttttatttacatcaattcctattaacttgtagtctggatgatttcttcgaatagtcttcgctattgaacgaggggtaagtccccctatccccgttatcaaaattgttttcatatattggttttattacaataattctttatcaaattcactatttttctcatttgtctctcaccatagcgttggtcacaaaccaatgataattcactatcatagaaaagatttactctcattgcatcaggtaatgaatcacttttaggccagtgtacaggacaataaactttattgtcaaccaagtaatctctcagcgaatttctaatctctttttttacaagaatcggaacaaataaaggaacattagcattctcgtgttcaaacatcattgatatattatttaactcggatagtccatcatatagtaatttagcgttctgataacgacgtgtttttaccagttcgaaatcttgttcatgcaataatcgtaacgacattttatctatcgaataattttgataatcacctgataaccttttgttaaacgatgcgaacaaacgaagaaaatcttctttatcaataaccgtattaccttgaaggtaatcgtatttcattctcatgcccttgtatttactttcagagaaatcacatccctttaaagatgcttgaaagaagttcccgtctcttttagagacaatcgcacctgttggaatccccacccatttcctaaggctacaaaacgtgtaatcagaaattaacgagagtgtatttccattgttgaaaaggtcatgagttctatcgtaaaggatgaccactccctttttctgcatgcttacaacaacttcaacatcaacacctgtactaaaaccgaaataattacagatgtacaaaatatccacgttcaaagttgcatcaatatcacacttgacttttccatcctcgtaaactaaatcataaaaaagaacattaacatttcgatctttaaaaggaaatatcatggaatcgcaacagtaagccggcatataaaccgtggtgatatttcgaccataggaaagatcctggtaaataaaatctatggctgttctaccggataacagtaatcgattgtccccgttaaaaccattttctcgaaaacactgacgtacaccatcattaataacggcaataacatcctcaatccaaaactcactgcctatttcttctatcacgtgcttcatcaatcaaatcttgtcgaccttgttccttccattgggcaattctataatcgtggaaattaactatcccacttgtttctactcccacattttctcttttaaaaactttgtatatggtaagaaaaactatttttacatccatacacaaactcatgttatttacatattcagtatcataagctaatttccgatcccacgtgatggattttcgtccattcacctgcgcccaaccagttattcctggtcgtacatcgtgtctatgtttttcgtcttcgttataataaggaagatatattacggctagaggacgaggtccaaccaaggacatatcgccttttaacacgttaatcaattgcggtaattcatctatggatgtcgaacgaataaaacgccccaccctagtcaaacgttgtttatccggcaacaatttcccctctgcgtcacgctcgtctgtcatagacttgaacttgatcactttaaaaatcttcccgccttttcccgggcgctcttgaagaaaaaatgctcctgcccccttgttggcaaaatgcaaccagatcgcgataatgaacaacattggccaaatcgccagcaacacgatcaacacgaaaaaaaaatctatacaacgttttaaaaagtgcctgtacataaacttcaattttcaaacaagcttgctatagcagaatatgttttcctcctatcaaaacgctcatcacccagttcacgagatcgtttacccatccgacctctcaaatctttatctaacgccaacttttcaattgcatttgctatctctttgacacttcctacttcacaatttattccacacttgtattgttctatcaaatcacgatactcttcacattcttgcgtgttaataaccggaagacctgacagggcataatctccaactttatttataatactaccagcagaccctttttttattggatttatagtgatatcacaggaacacaacaatccaaccatcttttcatacgacatttttcctgtaaattcaacataaactgatttatcctctgcacatttctcgaatctattttttaacggtccatctccaataacaacaaacttcactacacgagaaaagtttctttctttcaacaagcgtaatgcatccaaaacacactctatatcataactaaaacttaaagtgcctacataacaaagccatatttcatcatcttttcgatcaagtcgatatttcttgctagcttgatcaaaaacacccccatcagtaccaagataaacactcaaactctctttatcacgtttatttactgctaacactctatttctatacgtatctgaaactgctatcactctatccgcagccttgtaaatctcatccacgtataatttcatcgggaacgataacaagtttcgcaacgatcgagattttataactaatccaaacgcctccggccataaatcctgaacatcaataaagaattttacatgatgacttttcgaaaaccttgcggcttcccttgcagccgtcaatgaaggaacagcacaataaatgtaatcgggaaccgtatgcgattccaaatattcacgaacgttcattccccaacatcgatgactatacaagcgcctaaagcttatatttttcacgtatcccggttcatgtatataaataatttttgactcgtatgtctttactggttcatctttatactttttagttccatgatcaaaatcactcgtgatcaactctacacgaaatcctcccttggcaaacatctccgccaaatagaggaaacgcccgttcactgtcccatcaaacttgcgacagaaatttgcaataataattattgttttcattataatctccctaaacagaaagcttgcttgttttgacgatactggatatagcttgatgaaaatctttagccaaaagatcccaatcatattttgccgctagcaagcgagcattatgagatttttgttttaaaagacttttttcttttattaaacgtgataaacatgtaacgatactattcacttcattctcacacgtccatccggcattcgcttcttgcacctcattcatcatgttcgtgccccgggatatcaataccggtaacccataagataaagcttctatcagccccatgggatgcccctcgaaacgagaggtcatgatgaacacgtctgcatcaagaatagcgttttctttttctttccccccgatctctcccttcaattttacaatatcttctatcccgtatcctttaattaacatgttgagtccatcggcctcatttcctttaggcccataacaagtaatcatgaatttaacttctctcaattcctcttttatctgttgacatgcttgtaccaacaaatccaaccccttatgataaacatctatccgcccgataaacaatgcctttataccaacttccgaaaaacattcctttttcaaaacgggctgatgaaaaccattaggaataatcacatgattcttatttaactttattgaatcctcatattctttttcggtcaaaaattgaattgctaacgcatgtttcacgaaagaattgaaaaataaccagtgagctattttcttttttaaccaactatgattatgtaatgcctgtcttgttaatgagccacgaggaattataacataaggtattcttttacgtcttagctcatacgaaaataaaacctctttaattgcataaaatccttcaaacaccaccaagtcaggaaaggaaaaaggtacaggtaaatttttcaattccaaacgcctacactctcctatatcataaaaacattttacatctaaccaatgtttcattcgagcagacgttatattaatccaaaggacattatccaagtttgactgtgctcggatactagcaggcacactccaattgggacctgccgatattttgtcacttaaatgggaaatgtataagatatccataaacacacattatatcccccattcatatggaactaaatgattccaatcgggtctatacaataaaatcacaataaaatatgctgtatataagaatattattaccccatacacaaatatcttcatatatgaatttctcatattaaacaaaacagcactaataattatcaaggttacaatactaaaatacccagaaactcttcccattatattattagttaacccaataattgataggcctatcgtgataattagcgatatcctacaaaaatattcaagtgtaatagactgcttttttatacaaacatcatttatattaactaaagcaccatattgtggttgaccaaaatatcccattaattttgcatacaaatatataagtaacgtaatcaacaatcctaaaaatactgcagtatgattcatattgtcaaaacgttcctcatttacataaccctcatacagatccaaacttgttgttaaccattcaaaaaatgaggctcctaaatatgctataataattgaactaaatattataaatccgtgctctactctattatattttcttatacacagcggatacaatacgatgaaaataaatgatgatttatgaaaaaggcttgccaaaacgactaccaatagaaaggcccccagacgacgctttaatacacaaggtatcgcatatattaatatggctattgcacaatacatccgtataacattcattgttccccccatacgaaacatcgtaataaacaagaaacagcataatgctacattcaacgaataccatttaaaaaacttataaaaagaaaaataaatgaacgccgagattatacattgaaattgcaaatatgatagacctatttgattacataaccaagataaaaacaaatacccaatttccatccttccatcaagataaactatcacaaaatttggcatatatgacaatgaattatacgcgctcatatatgaaattgtatcatttccaatatttacagatcgtaacgctgtcaagataaacataggaaacactagaaaaaaagtataaatatttttatatttcgccgaaattggacgaaacgattctttcaatcccaaaatagaatacacgactaataatatgatataatatgtcatatcacgataaacaaacaaacaatttcttaatgtatgacactgcgtattaaattttaaataaatctatccaagaaccaatttcttcgtcaaaactttctggatcaaatttttcaaaaccgctaccaggataaaatgtaagctctccaaatttcaaaccctcaggaagaatataaaaatcaactcttacaaaaggaatatttttagataataccctggctttatcaagaagctcatctaaaagctgtggtttctctatttgaatttcttcatggctaggatcattaattgttgtccctttcatgtattcccacaatggggtataccaattagatttataatctgtttccacatcataatttactttaattaatttaggttctccgttacaacaaaaaaccttgtaatcttttaaacccgtttcggtttcactttccaaacattcttctgcaagtatacgaggcttaacatttttataaggccattctctgtattgctggtaaatattggattttaat

SEQ ID NO: 10776 - DNA, 5563 bp, Unknown
  gut microbiota DNA sequence
gaatctctctgttggggtggtgtggaagatcggtaacaacaagaagaaagagaacctgatgtacgcggctgcccgttcggttgccctggtagtagttcccatgaaagaagagactcgtccggtggtgaaagaggagcaaaaaccggttgtcaagcaagaagagaaaacggtagagaacgtggtgaaggtggaggcagtggagaaaacattcccggcgttaccgacaatccatttcaagcgtaatctggcggtcattgacacggcgcgttatgccggagaactgtctcgtatcgtggagacgttaaaggagttcccgggcgtgaaggttgacattcggggttacacggatcacacgggtaccgatcgggtgaacctaccgttatccttgaaacgggcagaggcgttgaaaacctacttgataggcaaaggcatttcggcagaccggatgacaacctttggagagggtaaggatatgtccgtggatcaaaaggatatttacacggaaaaagcccgtaaggttgaagtgaagaaacactaagactctctatatgatcacagggaggctgtgttaaaattctttttcacagcctcattctatgatttcaatagcttgagaattttttcttggtctttctgtaattgggtcctcaattcttcaatatcgttgaatttgcgttctccccggatgcgatcgatgaaatttatcgtgatgttttttccatacaggtcccggctaaaatcgaagatatatacctcgcaggaaacttgcccgtcattgctgaccgtgggccggattccgatattaagcatcccgttgaaaatttcttgttcgataattacttttacggcatacacgccaatggctggtaataatttccgttcctcggacacttgaatatttgctgtcgggaaaccgatcttgtggcctagatgatgcccgtaaacgacttctcccgtaacggaataaggatagccgaggaagcgatttactgtggtgatatctcccacggtcaaagcgttacggattttcgtggagctgacattaacatcgtcctcttcaaaaacgacttctttttcaaggaaaaaactgtattcattcgctagttcctgtaagttctcgaaatttccggctcgatctttcccgaatcgatgatcataacccacgacgagtcctttaatttttagtttgtcaataagaatctttttcacgaaatcattataggattgctgggcgaattcaagcgtgaatttcaaaataatcaagtgatcaacgccatatttttccaaaatggtaattttctcttccagcgtcgttaggattcctattttttgttcccggggataaagcacttctctcgggtggggttcaaagctgataatgacggattccccatcaatactggccgctttttcttttagatgttgtatcacgcaagcatgacctaaatgtacaccgtcaaaacttccaatcgtgacgaccgggcatttgatctctatattttcaactccgtagtgaaccttcatttctagtcgtttgaatagttaagggcaaaaataatacaaataactgaattatggggctaaataagccctaatccctgctatatatttatcaacgaataatataaagttgatagtgagaggatatgaccaaatagctacgaatgagatgaaatgtcctaaacgagcataatatgctatacatcaataagttgtaaatattattaaacgaacgtttattgattgttgaaattgttaaaagcaaagatgtgatattaagcaaatatttataaaaatatacatttatgtaaggcagatattttaatgagaaaagttacgttttaaagtgacttgatattttttaattaccaatataattctttttaagtatgaacaaaaaacggaattttgcaaaaatggcacttttaagtgctttgctttgtggtcttgcaagtccaacattcgtcggttgtaaggattacgatgacgatataaaagatttgcaggaacagattgatgctaataaagcaacgcttgaacaaattcaggaattagtaaaagcaggtgcagttgttactaaagtagaatctgataatgcaggtggtatttatttgacattatctgacggaacgaaacaccatatcacgaaaggtgaacaaggagaaaaaggtgaacagggaatacaaggtgaacaaggaatacagggaccggaaggaccgattggacctaaaggagatgttccgacattcaggatcgtggaaggaaaattaatcgcaacatggtctgatgaaacaacgactgatttaggacaagttataccggagatagagcttccggattttgactttacgattgataaagatggaaatttgacgttaaatggagagagtttaggtcaagttgttggaactcctgttgctgttgattttaaaattgatgagaatggggatctgtataagaagattggtgatggagaatggactcttttaggcaatgtaaagggaagtgatgcaacaatgccatctattaatttccaaatgaatggaaaagaactacaagtaaaggttggtgatggtgagtggaagaatgttggtacaatcggagttaatgcaagtgatttcgattttgaaattgtagatggaaaatgggaattgaatggagaagttattggtgatgcagttacttatccggatgtgaatttaaccgttgttgatgatcttctctatttgaacgaggtaaagattacacctgaaattcgagtaaatcaaagtatatacgtatttgataataatggtgtactgacgatcaacgtgcccaaaaaggatggaaccggttatgagggggttgagattcctaaaatgatagattttacgaatttgttaaatcgtattcaaagtttagtatacgtgccggaatattctgacgggaaagctactgtttataagtttgacgaattgatgagtgatatttctttcgagttcttggtaactccgaatgctttatccgaacaaattgttgctcttgcaaatgaagaagattctaaagctgtttctatgattatgcaggaagttctaagtagagcaacagctctacctgctttagaaaacattaaagtaacttctgcagaaaaagctggtcgctttgttgttagggctactccgaagaattttgaagatggtaagagctatagtacagctctgttactccaatctgagaatgataatcgtacatctagctttataaatattgcaactcctaaaactttaacgaaaacagatttatctattgtaaagagaactcaagaggtcggaaagcctgttgaattgagtgatgaaattatttatacaaataatgcaactgttattgatgtacttgatgtaaatactggtattattgaagctgcaaagtatgtgcgtgactttaattctgtgttctctcaagaaatttcatatgaaattgtaggagtagaaattggtacaggtgcagaacttccttatggaactaaaactgaaaaggaggctgctgttgctgctttgaaagttgcaggttttgttttaaccgaggatggagatgtgaagttaacacaagaagctgtaggtaatcgttcttttattaataatcaatgtacgattaaagtagaggcttttattggagagacgaaattagtttctagcaattataagattaagattgtggctcctgcgacaaaagctgattatgaggttgtaaatgatagaaaagataataaaggaactccggtatttgtttggaaaaatggtttagaagatgcaagtaataatatcattttgaatccagctattctttataacaagatcgagggtattacaagtgaagctgaattacttactgcattaggatccgatgtgactgaggctaaatattatgtacttgaagatggtgaatacgtagaaaagacagctaatagtgcattacttatggtaaatggaacacatggaatatttatacatttacctgctggagagtcttggaaatcttatgatcttaaaacgacatttaagttgaagggtgctgaggttgagttaaaagccaaagttgactttagttatccggatggaactattaatacggataaaaacccgagtatgtggttgtctaatggtcacatgtttatttcaggaaaacatgatgccgttaaagcaacagaatttaatttagctggtccgttatctgtaggatttgcttacgttccaacaggaagtgatggaatcaaatatgaatttgaaatcatccctacggtaggtacgcctgcacagaatccgacaggtgttactttaggtgctgacaagaatacattaaagtttgcaacttacacttataaccaagttgtaaaagtaaaaggatacatggtatttggagttggtggagataaagaaatcagagagccgttaactaactttgctgagtttattgtagaacctcaaagcccgattgcaactgaaatcacattagtgagcagtgctacggctgcaaagagaacttacacgaaagtgatggcttctaacggagataagatagagttagctaaattcttgtcattgaagaatgatagaggtaatgagttgatcgttgatggcgctttctctacagtagcaacagaatttgcaactgcacttacagaggcaacaatgtatggtttgaatactcctgtttataaagttaaatctgttaaagtaaaaggaacggatacagaaaggcctttgatgattgataatatggttattgatgcggatggtgaattctcaactacaaatttaggtaccggtcttgctgaagatttggaagtcgaaattgaagtatcaatagataataattggagtttgtttgaggctcccgcaaagagtagtccttatacaagtaaaggggtgattacaatctttgtagaaaaaacaagtaactaaaaaataatgaatttcgatattcattattgattgcaaccaggagaatgggggtgtctgattccagacacccctttctaatcaattattttaaatttacaggtatgagaaaaatagtattctctttttgttttctgatggttacttcccttttggtagcacagaatcaaaaaaaacaggcgtataatgacttttcccgttggagcctggggttgaacgggggaatatccattttccgtggagacatggtttccttctctgccgataaaacttacatcggtggacaaggtggtttacaactcggttatcaattcaccccgacattctgtttgtcgttgacagctgacatgggacagggaaaaggaagtgccaaaaaatgggagaaagagttcaagatttacccgagcggggagtcttattacgggacgaccccagaggctggtttcgctcgctataatgacctttacaccaaggtgaaatatttcacggttgggttgcacggtgatcttaacgtgaataacttcttcgggaagaaagaaatgcgtcgctggactgtgttgttgagcccggcggtttaccttcaaaagttctcgccgaagctctacaagaaagaggatgacaagcgt

SEQ ID NO: 10777 - DNA, 32057 bp, Unknown
  gut microbiota DNA sequence
cttcatattaccagcctctatatcccggttacccccggaaaataaagctattaaaaataaaatttgaataaagaaaaaaactcttttcatgccccttgatttttttgattattaaataaaatgcgtttacacactgtcagcaaagttaataattgtattcaacatcatatcagattcttacaaattatttttcaaattttaaggttgctcgttctactacgctcgttctttataaataatcgcaacaggtttatctgcaatattacggtattgacttatcaaaatagaagtcttcacatcataaacatataaatgccctttcaaagcttccgttccttctttttcgtacaaaccaacatataacaaggtcccatccgggttcatcgacaaactagtaatttccattcccacgggtatcgaaataacaggtgttgttgacaactgtttcttcaaatcccaataatatataccatcctcacacgtgtaatacaggcaactacatgatttactcccggcaaacaatgaattccggttaacttttagtgaaaccggactatcatagaattgaagaattgtcgggttgcctaaactgaaagtcgtctgggacaaataaatataggaaggcatgaccttataagtagccataacgtacacgctactcccaacagcacaaataccccaaatattaaaatcgacatacctgtttaaagagctagttacccctccgagcgagggagaataaaacacggacgtttcataatttacaaacacaggccgatccaccgaaactgccgcatcaacatccagatctttaaaatattctgtcagcattaattcatctaaaacataatcatacacgtagccccgcctgtcacgtgatacgagatatatgttattattagcagagaccccggcaaacttcacgaaagcacatcccggatatagttccttaaacgaagtcatgccttcaatatcaaaagtccgggaatccatgttataaatccttcccgcatcaccggaacaaaccaataaacgattatttacctgtaccatatcggtcacatcttccattttcgttcccgggttaatcagttccatgatatccgtccggaacacgggtactttcccagtattaatttcctcctttgtgagtgttctcataaaggaaatccgtccttttccatccccatcccgacttaatatcgttatcccctccgaaaactcggtatctacctgaagaacaaaatatttataccggatcgtttccccgttatcaactctcaatcgtaacccgaaagtgcctaattcccgaaaagcatatttcaattccggatcgtgcgacacgatatgtaacgaatctttaatcggataggacgccattccatcttcatccgtattcaacgttccgtaactccattcataagcgagaggtagttcttccccggactgttccacgctcaaatcacttaccacaaattcctcaccgaaataagccgtcaacgtgtcataaggtgcggaaatagtgatctccgataactcccgatcccccaacgaggatgaatcatccagacaggctcccaacccgaataaggtaaaacacaagatcccggtactgtatttaattttcatctccaataacttttatttgctcaacgaataaatcgatccggatcaaccatggcaaacccttcgtacgtgtttaccggatcacgataatactcgtaagcaggtttcaacacgtattttatccaaatcatatttcccggcatttggaaaaaagctgttggggcattttccagaaacttcccgtactccttcgctttttcagcataaaacacgggttttaactcttccaaagcccaaaagttttccaaaatcttcaaatacaatctatcattattattgctatattctcccaaataataactagcccaccaagccggttttgccagttttccatccataatggaaaggcaataatgatccccttctatcggtttgaaataatcattctcccgaaacttcaaataaagaagaacaggatgattcatcaggtcttccgtccgtttcaattttaaggacaatattccttccacttcatttttaggaatgatcaaagtaccgaactcgtaatgtttcccgaattccgccgtggtggaatcctccacgacttccaactcaaaatattgatcctcatcgacaggcattcccatacttttcatcgggatatgatattccacctccttctcttcataaattgcaaaactgaaaaacaccgtatcgggaaccatgttagaaatatatttactaagatcccaattaaaatagatacttctcttctgatccggattataataaatagctttgttcgaacaagctcctagcaaaagaaatattcctgtatatatcaaatactttgtagccatacgctttctaattttgtaatttaacgagggtcaagttcttccgtgggcaaaggtaaggtgtaaattttatcacctccttttaaagttgcatctaacgcatgaacataaacatcccgattcaatctttttaaacaaaaccaccattgcccttctccaaataactcttttcttcgttcattcataatatcctccaaggtaatatctttacttgtatcccgatctgcaaatttaaccatgcctctagccgacactactgcatccaaataatcccttgctcgctctctatctccttcctccaataatgcctctgccataatataatacatttccggaatacgaatcatactaaaaccaaaatatgcacctccggtatattcagagacatcatttgattcatccataattttagataaaatatctttagacttaccattatattctttagttataaaccaagcataataacgtttatcgtaattatcttcattctcttccactgttttataaatatctctccaatccacaggaagactcattttatttaacaataactggttatcatacaaatacgaactaatctttgtcgtatataatccccaaatcgtctcagacaaagaagtccgtctcttcataaatgtcgataaatcctcttgccctacaaattggaacttctccgattggatcaccttatccgcatacttttttgcattttccaaatcccctttcatccaatacactctagctaacattgcttgcgctgcatacaaattaaaatgcaattctctggcacctgtaaaacctttttctccacctttacgaatctttggcattaacacttcatcttcagccaaacaaatttctgcttctttcaaatctgcaatgattttctcatatacttcttccacagatgaaaaaggggtcactttaaaagtgtattttgttacgtaaggaatagcctttgcttttgccttctcatccgttgaatttatatgaacagcaaacaatcgtaacaaatcaaaatgaatagcagcccgtaaccctaaagcctcacctcgatataaattatagtatttaaaatctttcacactcttttgttccaaattctcgattatattattcaaataactaataacgagataactcccctgccacatttttttagtcatattacgagcatatgaattttcattatctaaacgtgaaacataaatcaaatacccatcatccgtaacaaaattctgtcccagcaactccggtatcaacaccgacatatccccaccatacatatcctctttcaccatcgacatatacaccccatacaatgcatcctccactccttccgccgtactgaacatatcatcgttcaccacctccgattcgggatttatatctaggaaatttccacatctcaagaataataaagagatacacgccaataatattcttttcatcatcatcttctacctttagtaattatcaaaatgtcggtctaaacgtgatatgaaaactccgttgaaaaggatattccgtacctcgttcctgtttcacggaagagaaccgggcaatatcggcaacgcctatgcctagattcagtctcttaatcccgatcttgcgcaaataaccgggtttaaactcgtaattcaacatgatactcgttatcgcaaacgtgttatcccgttccacgaaacgctcggaataccgattctcatcgctcacgttctccggaatccccaagaaacgtaccaagtcgcccggtttcttccaccgttcggtaaaagcccgacgatccacattcccgtagggatcaatacactccactttattcgccaaagtcgtgttgtaaatatcaccgccaaacttgtacgctgcggtgacattcaacgtgaatcccccgtacgacaagctcgtgaaaagacttccctccagcatgggattcgtgttcccgacttccactcgctcgttcttatcgtaagcaaacgtgtaattcccattcttcttgatatacacctcctgcccggaagccggatcaattcccgcagaacgcatggcataaataccgaactgagatcccccttccacgaacatcggctgaggtttcacgccatagtaagctgccatattctccgccttcaacgcatccgagatacttgtcagtttatcaaacacgtgcgatccgtttaccatcaccatcccaagcaggttatttcgcttgaccacttgtgcagaaatggaaaattcgtagcctgaattctgtaacttacccatattcaccaataccgaagagacaccgacagaagacggtaaggtcaaaggcatcaaggcatccttcgttttgttcacgtagtaactagcctccacgttcacccgttccttccagaaagtagccgtcaatccccaattatactttcgggtaacctgccatttcatatcgggatttcccatcgtgatcggcacagcccccattccgccataatgaatcaagtcgggatcataaagataagtggtcaaagcctgataaggcgtaaacgtcacgtttgccgtcgaaccaacgctaaaccgaagacgtaatacattcaaccaatcgaaattcataaatctttcctcgtgcagattccaaccgattcccgccgaccagaccggggcaaaacgatgcttactcccaaacttcgacgaacccgctgtcttgtaggaagcgttaataaaatatcgtcccagcaaatcaagactaccattcacgaagaaccccacttccgccgactccttctcgcctcccacgggacgagtggtcgcatattgtgaggcaaatttaatatctgtcatcttgtccttcataaacccttctgctttcacctgcatcgaggacgacttgtccttcccgatgtccgtacctgcgctcaaggaaagaatcgaatttccctcctcattcagtggcaaacgataatttagcaccagtttcccggcccaatccgtcttctcggttgaaagcgccgtgtaagttcctttcttgttctgaggaatctcctgcaaggtgaaactcgcatcctccggggaaacatacaccttattccatgcgtcaccctgtcgcacactcacgtttcccgtgataaacaaagcctcgttcacatcccagcgcaacgccaaagaattcgtcaccgctttattctgactcttcgaaaagctcgccagcgtggcattatacaacggattcacctgccgttccatcgtctggtttaccggatcgaagtaataattccgtatatatttcccgtcctcgtcatacaccggattgtacgggttcaacctcgtgtactgcgcaaaactcccataaggactattctttccctcagtcatggtataagctaactggtaagtggccaccacatcccgggcaaaccgatatgacaaagagacattcaccccgtaattccgacgataatcacctttcatcacaccatatgtatcagacaaccgtcccgttaccttgtactcgattccgccaccccgcccggtcatcgtggcagaatgactatgcgtgaaagcattccgcaaaggtttcgtcgcccaatccgtgttgacaccccggcggatattctccagcttgtaatcataagccgggtcaagactaccatctacccgatcatacaatcccgccaaacgttccaattccaacttttcttccgcgttacacaagcgaagagaggtcagatcgggaaaactgaacatcggtgtgaaattataactgaatctcggcttattcgactttccccgcacccgttccaccagaatcacaccgtttgccgctttctccccgtaaagcaccgccgcagaagcatccttcaacaccaaaatctgctctatatcgtaaatatccagatcatacaaatcctccacagaaatctctaccccgtccaacataatcaagggagcgttcaccccttcctgtccttttgtcatgattgaactcgccccacgaatcagaatctcaggtacgacattcgggtctgaccccgcctcgttattctctacaatcctcaatcccggcgttaagattgccaacgcttgtaacaggttcgtcggggacacccgcaataaatcctcacccttgatccgggtaatctccccggtaaaagcatttttcgcctgcgtgtaatatcccgtcacgatcacatcgtccaactccttcatatccttcaccatcgtcactcggatatgccgggttccggtaaccgtaacttcttgattcttcattccgacaaaccgaaaaagtaataccatctcctgttgttccgggaattccagtcgaaacttcccatccgtacccgtggcacatccccaagaagtcccttttaggacaaccgtcacgcccggaagcggttcgccatctgcatctttcacctctcccgtgatcacgatcaaggaagaacgtgattctcccgccacggggatttccgaaaaacatacacagcagaacaacagactccatttcacaacatcacataacttgcctctaaacccaaataccaagtctactctcatctaatttgtcctttaaataccatacatgcaaaatatgtttccatcaccttatttcctaaacatattattttgcacctaatatcattcattgtaccatgcggcacaaacccgtaaaaacatcatcacaccatcattgctacttaacgcaaactctcaactttattcattcacgttcaaatatttaatttacattctatccctgttttctacaactttttcaaaacaaggggagcaaaaataataaaataaataaaaaatttcaatcaagcaagtatcgattttggcgagttgcaagattagggaaaaaagagataccaagtttcaatttcacaaacaaaaacgacactgaagattctctttttgtcccgaagataagacaaatatacgaattataaatcaatgatatagaatattacaagcaaactattccttaaaagaaaaaacggagacaccattggtacggtcccatatttttgcgaagttgttttaacgcctctccctttttatttttaatcgtctgttcggaaagattcaactcctccgaaatctccttggtagaatacccttctagactcatcgccatgatttctttataatcacccgccaatcgggcaatttcagtccagataattcgtttcacctcatgttctatgatttccccttcaatatcgagacaggacgcctgttgcaacaggactttattctttatgtccagatgccgcaactcgttcagacaagcatttctcacgcaagtatacaaaaaactgataatcatctgaaacgaggtaaactgtttccttttctcccacgccttgataaaactctcatgcacgatgtccacgcaaacattctcttcacgcaagaaacgtcccgcgtaaactcctaatgttgcaaaatattgatcgtacaacaattccaaggctttctcatcccctttcacaaaacgctcatatacaacttcccgttccataaaatctatcatcatgcactttatacgaataaacattcggtttcccgcttacaaagtatcatcttctcggacaacactatttcaaaaatacacaaaatacttcttattcacaacaaaatagagaccgaaatgatttaccttcattcatatgacgagatattatttatgtcataaatcgtgtaaaggctaacagagcctttacacgatttttcatgaatcatttcacacaaacatttacgctatacacgttctttataaatcacacgaaccggcctgtccgcaatattatcatatgtttcaagcaattccccgctatctgcatcataaatatacaaacatcctttcaattccttcgtactacctgattcgtacaacccgacataaagtaatttttgatccggatcgacagcaatagtcgttatttccatacctgtcgggacagtgatagaaggagttgttggcaactgccgcccggggtcccaacgatatatttcattattgtacgtgtaatagatacaattatacacctttgtacccacagtcattgaattacgatccatgccaatgggctgcgaactttgataatccaccgtattcgctgcggtaggtttggcaaatgaggctgatgttcgaggtatataaatatgcaacggatcattcttatctgtggagaatacatacagataagtgttgataaaacaagcattaacgatgtcataattcgtaaaaatcgtcccactattcaccgcacctgaggacgtactaggggcatacatagttgaagttccataatttataaacaccggtttactatgagataccccggcatccacttccaaaccgtcaaaagcatccaataccaacaattcatccacgtccgtctcgtaaacataagctctcttattttccgaaagtacgtgcatattactatatgccgatatagcgacgaattgctgaatattggcccccggaaacttaccagcaaaagaggtcgcagtttcgatatcaaaagaacgggaatccatattgtaaattctaccgttacttcccgaactaaccatcaagcgccctccctgctgaatcatgtctgtcacattctccaactccattccgggattagctatttccattatatccgtacggaaagtcggtacctttcccccactgatctcctctttagtcaacgtcttcataaaagaaagccttcctttcccggcatcatcccggctcaaaatagtaattccctcggaaaattcggtatctatctgaagaataaagaacttgaatattgtcgtttcaccgttatccaccttcaaacgcaaggcaaacgtacccaattcccgaaaagcatatttaagctccggatctgtcgataccacgtgaagcgtgtctttaatcgggtaaggtttcacggctcccccggaaatatccagatccccgtacgcccactcgtaagttaaaggcaattcctccccggactgctctattttcaagtgattcaccacaagctcctccccgaaagaggtcgtaagcgtgtcatgagcagcggtaattgtcagtaacgacacctctttcctcccggaagtcgtatcatcatcatagcaggaatacatccccaccatgaggcaaaacagcatgattatatataacttcattttcataacttaccatttaattttaaattctcttttagcggataaaccgatccggattcaccatatcaaacccttcatacgtgttcgctgggtcagtatagaaaacgtaagcaggcttaaacacgtaatttatccaaataatattacccttcacctgatagaatcccgccttggcatactccaagtataacccgtattcttccactttctctttataaaagataggtttcaactcttccagttgccaaaaatattctagcatcttccggtaaaggcgatcattgttccgggcatacacccccaagaaattgggagcccaccattgcggttcgggcaaagcaccatccacgaccgacaaacgatagtaattattagcaatcggtttgaaataatcattctccttaaacttgagatagagtatgaccggatgatccataatatcctccgtacgatccaaaataatagacagatacccttcaatctcatttttcgggatcaccagtttcccgaatttaaaatgcttgtcatacttagccgttgaagaatccgcgacaacttccacctcgtaagtcaattcctcgccaagcggcattccggccaccttgatcggaactcgatactcgtactcggtctcgttgtacaaggcgaaactgaaaaacacggtgtcacttgctgttttcgtgacagaattataacgatcccaagtgaaataaatggatcttttctgattcacgtcatagtacacggcatcattgctacacgcccatattcccatgcagaggaatattccgatatatagtagatatttatttctcataacattcttattttaattattcaggacgataatcttcctcttccacgggcaacggcagaacatatatcttatcactgccgggaatggtggccccggtcgccccactcaatttcacgggactgttcaatctcttcagacagaaccaccattgtccctccccgataaattcctttcggcgttccgccataatatcactcagcgtaatatcgacaagaggagtccggtccgcaaatttctccatccctcgggcatcaaccaccgcatccagatattccatcgctccttctgcatttccggttgcaagcagagcctctgacataatataatacatttccggaattcgaatcatacttgttcccagataaggccccccgttataactcgtcgtgagagaagtcgtatcggatacatttcccatcactttcaccaatatatccaccggagttccgctcctattgtatgtcccaaaccaattatccaaacggtaatccttctttccggtaggcccttcataagcatagatacttttaaaatccgtggtcagatcacccaatccctgcctccgcacgtgctgggtcagccagtcggaatagacttccgcgttgtacagcccccatattgtttcctccatcgacaccgttttctgcatgaatgtattcaaggacgtcttactagcgaaacggaacttattggaccgaatcaccttgtccgcgtaaatccgggcactatccagatcacccttcatccagtaaacccgtgccagagtagcctgcgccccgtataaattgaaatgtaacacacgggccccggtaaatcccttttcatttcccacccgttcggcaggcatcagaacctcatcctccgacaaatacgcctccgctcttttaagctcggctatcactttcgagtaaatttcctccaccgaagaataaggtgtcaccttaaaatcatactccgtcacgtagggaatagctctcgcttttgccacttcatcggtagaagtcacgtgtacggcaaaaaagcgcagtaaatcaaaatgaataaccgcccttaatcccaaggcctcccccatgtataaattgtaatgccggaaatccttctcgctcttactttccagattatttataatattattcaaataactaatcgccagataactggtcttccagatattcttatacatatttctcgtttcactccgctcgtactcgaaacgccccaaataaggcaagtactgataagtcgaagtgaaattctgtgccagaatctccggtatcgtcgtggacatcagtcgtccatacatatcctttgttaccatcgtcatgtacacgccatagagggcatcctcaacaccgcttgccgaattgaacatatcgtcattcaccacttccgaatccggattcacatccaaaaaactatcgcaccggagaaagaagaatggtatacacagtagaattattatctttttcatactcgtttcaatttactgtttactaaaaagtcggtctgaaagtaatgttaaaactcctctcaaaaggataagaagttccccgttccaacttcatagaagaaaaacgggctatatcattcatcccgaacccgacattcaaccgtttaaccccaaatctcttcaaccattccggtttaaattcatagttaatcgatatgttccggatctcgaacaaattatcccgttcaacgaaacgctctgaataccgcttgttatcacttttactttccgggatacccagaaaacgtttcaaatcacccggttctttccaccgatcggtaaatgcccggcgatccacgttttcccacggatttatgttctccaccttgtcggccaacgtgttattgtaagcatcacccccgaatttataaccggtagttatattcagcgtgaaccccttgtacgataaactggaaaaaatacttccctccagaatcggattcgaatttccaacctctacccgttcatccttgtcgtaatcaaacgtgtactcgcctttgctattaataaaaatctcttttcccgatgccggatcaatcccggccgtacgcatggcatgaataccaaactgcgaaccgccctcttggaacatcaacgaaggacgagcccccaaagactgggcaacctcgattgacttcaaggcggttgacacgtttgtcaacttatccatcgtgtgagagccattcaccgtgaccatccagaagagtcctttttgcttgatcacgtgcgccgagatcgcaaactcgcatccggagttttccaattttcccatattcacctgcacggaggaaactcccacggaccaaggtaaagaaatcggcatcaaagcatctttcgttttattcttgtaataactggcatcaatatttatccgttcattaaacaacgtggcactcaacccccagttatatttcatcgtgatctgccagttcagatccgggtttcccatcgtgatcggtaccgccccgattcccgcgtaatgaatcagatctgtcgtgtaattataagtcgtcattgcctgatagggtgagaacgtcacgttagccgttgatcccacgctaaaacgcaaccgtagcatattcaaccaactcacgttacccataaaactctctttgtcaacgttccatccgatacctgccgaccacaccggggcaaagcgatgatcactcccgaaacgggatgatccggccgatttataggaaccgttcaggaaataacgtcccagcaactcgaaactaccggtcccgtaaaaaccgacttctctagttttcttatctccaccactcggacgggtagaggcatattgagaagcaaatttaatatctgtcataccatctttcaaaaatccttccgccttcgtcgtgatagaagaagaattccccattttaaaatctgtacccacgttcacggtcaacaccgtgttacctgtttcattcagaggtaaacgataatttaacgcaatctttcccgcccagttcgtactctcgttatgcgtgaaagaataagttcctttctggtttaaaaacttaccttcaaacgaagaatcatccggtgacacgtacaccttcgtgtaagaatcactcatattcacgttaatatcacccgtgatgaaaaatgcctttttaatatcccaccgcatactcaagtaattcgaaaacgacttgttccgtcccttgttaaaactggacaacgttgcatcgtacaacggatttccttgattccgggaatcattggcatttgaaaggtaaggatcaaaataatagagttttatatactccccgtattcgtcatacaccggattatacgggttcagtctcgtgtatttcccgaaatccccgtaaggacttgctttgctatcggtcatcgtgaaagcaaaacggtaattaaaagtcaatttatccgttaagtgatacgcgaaagaaaaattcaccccgtagttccgacggttatcccctttcatcacgccataggcatccctgaaactcccgcttgccctgtactcgatcccgtttcccctaccggtcaacgtcaccgaatgattgtgcgagaaagcccagcgtaaaggcttggatggccaatccgtgtaaacaccccggcggatattatccaacttgtagtaatacgccggatcaaggctcccattcacttcatcgtacaacccggccaaacgttccagttccaacttctgttctgcattacacaaacgcaaggatgtcaaatccggatagctgaaattaggcgtgaaattataactcaagcgaggcttggattccgtcactttcgttctctccaccaagataacgccactggcagctttatccccgtacaacaccgccgcagaagcatccttcaacacggtcacctgcccaatatcgtaaatatccaagtcatacaactcctgtatcgaaatctcaaccccatccagcataatcaaaggcgtattcacgtccgcctgattctcggtcatgatggaattcgccccccggatcagaatctcgggaatcgcattcggattggacccctgctcgttattttccacaatccgtaaacccggcaccaatgaggccagcgcctgaatcagattcgtcggggacactttcagcaaatcctcccctttcaccgtggtcaattcccccgtgtaggcatttttagcctgcgtgtaataaccggtaaccacgacatcttccaactcacgagtgtcttccttcaaaacaacatgcaactcctcggatttcgtcaccgtgatggtctggcttgccattccgataaaattaaatatcagtatcatctccttttgtgcgggaatttccagcttaaacttacccgtcgcatccgtggccactcctaaagaagttcctttcagcagaaccgtggctcccggtagcgggttaccgtcagcatccttaacatctccggtgatactcaccttgtcaaccgttttcgtttcctggcgctttttaataatcacaacatcattcacaagcgtgtacgtgtaaggtgtattctgcaaacagtaatccagaatctcccttaccgtcacattcttaaattctttagtaataagagggattccctgaatctcctcgtggttataaacgaaatcaagtgatgtctcctttttcaaggcattcaaaacctgcaacatcgtggctttctcgaatttcagattcaaaggtgttttctcatcgaatttaggtgacgttccgccaccaaaacccgaaaagctgaataaaatcaagcaaccaagcaacatgcatactttcgtagcccattggctatagctcgcctgtttcatagacaagttctttcccattttcagtttgtttaggtttgtaaaaaacacatagaagaccatttcgagatcttttcagcacttaaaaccccaaaaggttttaagtgcttgtaacatttattttttattcagagcatttaacgcttcgtccaaagcataaagcatcgtctgataatgtgctttcgtatcggaatctgccgaagccaatctactgttcaacaaattcttcacacgtaaagcataagcgtagaaatacgttttcgaatcatcgatcgtacgggtattcacccggtactgccaatcataaccatgtccgaaagaggtcagttgcttggccacaagtcccttcccatgaacttgttccaattcccgcaactcattctggtattgtcccaccaatccggtcgggtccaaaccgtaagctacaatctcatccacggacggcataaacgcattctccattcccagcccctcgtccggatcggctagcaccttcaccagcttactcttcttggtaatcacgtcagcagcctgatccaccaccaaacgttgtaatatcttctcccccgaagtcggcttacgcccctttatagcattctcccacacgtggttgtacaaatcatcaaagtaagccttcaacgtgtagggatcttgagacacgtgagcagacaacaccacgttcttatacgttcctaacaactccgttgccgtgtagtaacacacaatcggtggcaaggcaacccgtagtccgaactgatcagtcaatcccgtgttatgtaaccaatcactatttttcaattgcttgatcacccacacaaaagagttacgttgcaattctttcggcacggattgaaatgtctttccggcagtacccggtttcacctccgtcagataaatcccccccacattatgcatgacatttttcaaataacggtaatactgattccccagctcgttatacagattctcacgatgcgagccatccgtatcatccacaaaccaatcattcatgttggccacgatatatttcagattcttgatcccgtaatccccggccttaatagcatcgtcccctaaatcctcttccagcgcactcggatcgtaacgggcaatcacctgttgctttccataacgatatatgggatctcctgcatgttcgtcaatccaactctccaacatagcttgctcctctttagccgaaagaccgtacaggggcgagtacaaccacttaatcacatactcgtcataaatacccaaattaggcggggtcaacttcacacccttatcttcgggttgcaccacgtaattaaaccgggcataatccatgatggaaggtgtcgtcccgtacttttgagtaaactttgcagaacgtaacgaatcaaccggataggctgccgatgccgacatattgtgcatcaacccaagagtatgccccacctcgtgagccacgatatattcaatggattcttccagaatattatccggcattttcttggtacgcacggacggatcaacttgagaagtttgtaaaaaacgccattgattggccaacttcactacatcattaaaaataatgacagacgcattaatgatctcacctgttctcggatcagtccacgagggccccatagcattcgtgatcgcagccggaacataacgaatacaagagtatttcagattatccggatcaaaagtcggatcatccttcgggaaatcccgcacctggatcacgttcttcaacccgatcttctcgaaagcaacattccaacgcaaagcagccttccgcacgggttccttccacatggcaggaaaagcatcatccacataaaacacgatcggtttcacgggttccaccagctcacctcgtttataggcctccacatctttcggatccacccgccagcgattggccagcgtgtaaatctgaatccggtcctcgtcggtagaaatatgttgtttcgtattcgtaacaaacaccccaatccgggtatcactcacccgtggatgcatcttctcttccggcaacaacagcaaagtacgggttgctttcaccgtcaaaggctcgtttttcttcacaataaacatccccatcatcttggccgacacggaataggaaagatacgactttaccgtcacgttatcatcaaaagccttaattccatccaaaatagaacccgcactattaaacacggctgtaatctcaaccattccacctccactggaaatcggtgccaatcgctccgaattacccgtaaacaaagaggtcatatcaagcaaaaaagcagaactatcgttcgtgtagcaatagattttatatgaaccgataatcgggtccataaaactccttgccatcacttccctcatatgcccctcttgagggttacaagtcgcggacacattcacttcccgcataaaaatcgtgctgtccgtcttcgtgaattttatatgcattggatctttcggtttataaccgatagcacataggttattatcactcgcctccgaaatcgtcgaggctagtaacatttcccgccccagatatttcactggaaactcgaaataaaccttcccatccagcttatgcaaggtcacgaattccccccgggctgtctcacacgatttattctttaccaacttatcatatttactttgccgtttggtcggttcttttttcgtttccgttgccactgtctttttctttctcgcagaagcgaatgaagtctgagtgcatggcaatactaatagtattaccatacctagggtaatccatcttttcatgtatgaaattttaaataaaaattataataacacctgttttctattcctgatgcgtgtataccacgatctgtttattattcatcttaaaggttacatttgcagcttgttccataatttgcaggatagcatctatactctcgtacctgggcataaacccggaaaatttataatccttgatctcctcatcatcaaacacgaactccacgtcataccagcgggaaatcttttttaacaaatcctccagacgttcctcgctgaaactgaactgatctctcgtccaagaaatataggactccacgttcacttcccgggtcgtcactttcgaatcggccacggcagccatcagtccgggagtcaacgcaacaaccgtattcccgcactcaatattcacccgtccctcgactaacgtcgtcatcgaaacttcatcgttccggtaagcagaaatattaaacgtagtacctaacacacgcacggcatacttctcacaatgcacaataaagggtttcgcagcatcctttgccacctggaaaaatccttctccttccagatacacctcccgggtatcacccgaaaaagattgcgggaactttaaccgggaatcggaattcagcattaccttcgtaccatccgacaactgcaaggaataagccccgccacgaggtattttcagcgtattatacaccaaagaatccgccgtccggggagtatgatagatcaaggtttcaccattattactcacgaaaggtaattgctcgtcaagcgtgtccgccacccccggggcaatcagcaaagtatcccctcccggcagaatcagcgaggcacgcttcccaaaagaaaaatggttgcccgactccacccgggccacgggcagtactttctccccgcccgtcgaaaacatcagataagaagatacactcaataacacgatggcagccgcggcaactccacgatacaagcgtcgaatggaatgtctcttccgaatgtctttcatgacagacggccacgaccgacgagcattaaactgttcgtataaaggatattccgtatgttcctcatattcattttccaatcgttcatacaactcctcgttggccttggaacgtgatttccaagccgtgaagaaagtttcctcttcgggagacaagcctccttgaagtcttttcacgatcaactggataatatactctgtttcctttttcatttcgtgctattttaccttataacacttcacgaagaaaaaggtaccgataaattcgaatctttttttaataacttgtaaacaaatccctagtgagcctccccatactcaacagtgacttgcacctatgtctcactaatacctcaatcatttttcaagcaaaaaacaacaaaaagtttacaccctgtacagtcaacctatcgttaacctattagtgaaacacctaagagactgcgaaaagagtataacgcaatcatactaaattaacctctaggatttctccgtcaaccccagttccaaggttgaaacatactgaattttcccttcatccagcaatttccggatttgctcgaccacaacttccttgtcctcacctaattgatgtaccaactcccggatattcgtattttgcctggcaagcacctgcaaaatccgttcctccaagcttttccgctcttcccgatgcaagcgttttttcttcccgatacaaacatcacatatcccgcaaggcttgtcttctttctgcccaaaatactccataagcaaaagctggcgacacgtttcgtcatcccggatataacgggccatggccccgatcttcgtgacaaacaactccttccggttctcgtaagcctccctcccgattgtgatataggacaatggcaaccggggctggtaatacacgatgtaaggtttcacgtcccccggcacgtagcgaataatcttacgctttgccaaagaaataaaagcatcatacagcaccttgcgtgtcacgtcgagctgatcagccaaaaaaccttcgtccacgtaagcatcctgcacgaaaattccggcataatttctcatcaggagaaccataagtctttccaacaagggatcacccgtctcgaactcgtacaaccgatcccgtaacacggtgaacatcacccgggaacgggaatttatatccgtcgtgtaccccaagaaccccgcaacctccagaatactgatggcagacatcaccctcgcctcgttgagtttaaaattacgggcaaacagtttcaaattgaactcgaacgcctgtccctgtccctcgccctcacccaactggtaatagttcgccaaggcctcgtacaccctcaatatataatctttcgggggaaaagcatcatcaatccgtttttgtaaaccacccaaagctgcccggctggaaagtaacacggcgtatgccctttttccatcacgtccggcacgtcccgcctcttggaaataggcctccggactatccggcacgtcataatgcaccacgacccgcacgtccgccttatcaatccccatcccgaaagcgtttgtcgccacgaccacggggaccttcccgcttttccacgcctcctgcctacgtgcccgctgggctgaagacaacccggcatgataaaagtcagacttgatccccgacttgttcagaaaagcggcaatcgaagaagccttcaaccgggtacgcacgtacacgatcgcccctccctgcaccttggacaaaatattgaataattccaacggcttggcttccgtgtcccggatcacgtaggaaatattttcccgacggaaacttttagagaggacgttcggggttgaaaaatgcagttgtttctgaatatcttccacgacctctggagtagccgtggccgtgagtgccagcgtggccaccccgggaaagaattcacgcacctctgctattcgcaagtacgggggacgaaaatcatacccccattgagaaatacaatgagcctcatccacggtaatcagacacacgttcatcaacctcaatttttcccggaaccgttccgagtacaatcgctcgggtgacacgtacaagaacttaaccgtgtcatatatacacttattaatgatcgactccacccggtcacgcctcatccccgtgtagatcgcctcggccggaatccccctgttcttcaaatcctccacctgatccttcatcagggcaatcaagggcgtcaccaccagacagacgccctccatcgctagcccggacacctgatacgtgagcgactttccccctcccgtaggcatgagagcaagcgtgtccttcccgtctagtacggaacggattatctcttcctgcaaggatctgaaatcatcgtatccccagtaagtctttaatatctcttttatatcacgggtcattcttcgaattctattcgcaaaaatacaaaatagacgaaaaaactctcacaaactcgtatatttaaatcgctttttattattttcgcccgaatattaatcgcataaaatcatgaaactacaacatatactgatttttattcccttcctatgggcttgcaacgataagttcgcgaaaaacgagcaacccgtggcaaaggtttttgacaaatatctgttgaaatcggaagtttccggttttattccccaaggaacaccctcgaaagatagcctcatcatggcacaaagctacgtgcggaactggattaccaaggaattgctgctgcacaaagcgacccagaacctaagtgacgaggaaaaaaatatccggaaacaagtggaagactattcctcttctatcttgatccataaatacaaggaaaaactgatttcccagaaactcagccgggaaataagcgaacgtgaaatctcgcaatactacgatgcgaacaaattcaacttcgtgctgaacaccccggtcgtgagagccttgttcgtggtgattcctaaatccgccccgaaaatcgaggatgcccgcaagtggttccgctccaaggaagccaaagaccaggaagcgttggaagaatactgtatcacctcggccaaaaaattcgacagtttcaacgaccagtggattgaactgcgcaacctgctgaacctcttgcccatcacgtcggcagaatgggaaagcaagtataaaaataaggagtccatcgaaatcgaggacgatgagaattactattttctcaaaatcaacgagctgcgccaagcccatgaaacggcacctctcggttacgtgaaaaaagagattgagatattactactgaacaaacgtaaaatctccttcgaggagaatctggaaaaagacatcaacgcagaaggtctccggaaagattacgtcaaaatatattaacaggattagaaaaatgaaaataaaaatacgaaaacgaacggattattcgcggatttgaagaaaaagtattagtttagagcgtttttattgagtataaccttattcataaattatgagatatttatcactgcttgtattgttatttttagctagttacgcctcggcacaaaaaaacgtgatcgacaagattattgctgtcgtgggtgaagaaatcgtgttgaaatcggatattgagaaccaatttttacatgaacaatcccaaggattagtaaattcttcctccgattcacgtaccagaatattagaaaacttattagttcaaaaactattagtggctcaagctaagatagatagtatcacggtcaccgacacggaagtggaaaatgccttgaattcccagttggaacaatacgtgcaacatatcggttcacgggaacgcctggaaacttatttcggtaaatcatacgaggacatcaagaacgaaatgcggaccccgcttcgcgaacaaatgatcacgcaaagaatgcaatctaaaatcgtggacaacgttcgcgttaccccttcggaagtcaggtatttttaccggaaattcaacaaggacagccttccggaagtacctgataaatacgaaatccaacagatcgttatcaaaccgagaatcagcgacaccgagaaagaacgtattcgtaatcggttgagagattttcgagacgagattcttgccggcaaacaaacattcaacacgttagccgtactttactcggaagaccccggatctgcagccaaaggcggtgaattaggttaccagaccaaaagcgcattggccccggcattcgcggaagcagcattcagcttgaaacccggcagagtatctaaaatcgtggaaacagaattcggtttccatattcttcaatacatcgaccgccaaggagacaaagtaaacgtacgtcacatcctgcttcgtccccgtatctccgatgaagaacggcaagaagcaatccaacatctggactccgtgttgacttacattcataacggagaagccacgtttgaagaagccgcagcttatttctccatggacaaaaagaccagaaacaacggtggattgattttcaacgaggaagacgccgattccaaactgcctagagaaaccatcgaaggagaaatggcccgtcaggtaaacaagctgaaagtaggagaaatttcctctcctttcttggatcagacccgtacaggcgaagaatacaaggtgatcaaaatcaaggcttactatccttcccacacggctaacctggacgatgactggatcagctttgaaaacgggttaaaaagcaagaagcaacaagaagtacttgacaaatggatcaaggaaaaacaagcaaacacctatatccatatcgacgaagattacaagaactctaaattccattatgacggatggttcaagtaattgacaagttaaaatttacaagtaaagattgatgatttttccgcgatgagagcaggtttatgggttgggatactatgtattgtatggggattactccccttgcagacagttgtagcacagggaaataaaaaagctaaagtcaagatcgttaatgcggatagtttgctggtgggaacactgggcaaaccgtccagatttatcggtaacgtacacatgacgcatgaaaacacgctcatgtggtgcgatagtctctatcagtatgaactaccggactctaattatcttgaagcattcggccacgtgcgggtgatcaagaacgacagtattcgaatgtccggcgactacatgtactatgatgccaacaaaaaactgattcaagtccgccgaaacgtcacgctggaagatccccagatggtcttgaccaccgattttctggattatgacgggttattcgacatcggatattacttcaactggggacaactgaaagatagccagaacacgttggatagtaaaaaaggaaactactttacccaaacgaaaatagccctcttcaaggatagtgtaaaagtcaattctcccgaatatttgatcttctcggacaccttgaaatacaacacggagaccaaactggtttccattctaggccccacgaacatatacgggaaaggagaagataacaacaccctctactccgaggatggatggtatgattccaacttgggacatgccgaactatacaagaacaatcgggttacccacttgagttacgagggcgtggccgacaccatggtaatcgacagtataaccggtatggcttatctctactggaacgtcacgctcgtggacaccgggaacaacgtgattgtgaaaggtgaatatgcgcaaatggaccgggaacaaaacaaggcatttgtcaccgatagcgccctgttaatcatggtcggaaaacaagattctcttttcgtacacggagacaccctcttcatggatcaggactccgccaagaaccaaattttacgggcttactataaagtcaagttctttagtcaggacttgcaaggattgtgtgattctatggtctacctttctgtcgactccaccatcacactccacaatgagccggtggtatgggccagcggaaaccaaatgaccgcagaaaagatttccttgctcacgggaaacggaacgattaaggaattctacctgaatactaaggccttcatggtctctcgaagggaggaaaccgaaatgtacgaccagatcaaagggcgaaatatgaccggttatttccgggataacgaactctacatggtgtacgtgaacggtaatggggaaaccatctacttccccgatgataaaggaaacatcattggcgttaataccgccaatagctccaacatccgtatcatgatcgacaaacggaaagtcacggacatcgtcttcattaacaagcccgacggggaactcaatcccttgttcttggccgatcccgaagaagcccgtctgaaagacttccgctggttgaaatacatgcaaccattgaacaaattcgacatcttcaaagaaacccaagaacctgaacctgtcgagaaagaagaggaagaaaaagaataatgtaatcaaattaaacaatcctctattcctaaaataaatttgattatcagccataaattccctatctttgtaaatacaactaaaaaggatgcattatgacaacaaaaaaaccgaaaccatataaaataaaaatagaagaccaacaatctttgcatgagccatctgcaacttatcaatataatacagaccaaatagcagctttaaaattagaggctctagaagagattatggaccttaatcaaactgaattattacgaaaaatcatcaaatacctgaaaagaataaaacaaaattctacccccaaaattaatcctaatacattacaagcgatgcttgatgccaaagaaggtaataccatcaaatgtgatagttttgaagattaccttaaagctatcaaataatgtataaaattgaaattacgcatcaatatctaaaagatgtaaaactagcaagaaaacgccagttagatgaaaacaaattaaatcaaatcattcaattattagcaataggccaagcacttcccttgaaaaataaagatcatgcattaacagggacttattctggatttcgggagtgtcatattcaaccagattggttactcatctatgccatcaatcatcaaatacaaatcgtgcgattaatacgaaccggatctcactcggatttattctaaaacacctaaaattctcataatcttatcagaattccctaacgctgttcatagtatatttttctacatttgtgaaaaataaaacgatatgcagctccgaaaaaaccttaacctctacttatcgggcatcgtggtcttcacgctgaccttgcttttattatcaacggcattcgtcctagacgagagtttgggtaaccgggtagctaaaattttctggttctacaaagtcattatcgtggccggtatagcctgcatcccgctggcatggaaacgtccttttcgtttttcgctgctcgacctgctggttcttctgtacgcgggctacaccctctttaacgatcattacacaggctcgataactcccacccggacgggactcttcatattgatcatcgtcacgtatttcatattccgacagctgacaacattcgctccgctcggtttcacccacacggcacttcttctctccggggcaatagaagccatctggggactcgcccagttatacggtttcaccccctcccaacacagccgcttcgaattgaccggatcattctttaaccccggcccctattccggttttcttgttgccattctaccgatagccttacactacacgcttacaggccaccgaatcgcccgaatcctgtcgggagtagttctcgtacttctcttactcgtcctgcccgccacgttaagccgtggagcatggttagccgccctcactggatgcggcatcgtgctaagtaactacttccatctatataatcgattgaaagccctgtttcaaaaacataaactcacgatctccatcacaaccatctgcatattctttcttgtaaccgggacactcatcgggatataccatttaaaaaaagaatcagccgacggacgctggctcatttggaaagtctcctccaccctcgttacctcccacccgataacaggtgtcggattcgggcattttgccggagcttacggggaagctcaagccgcctattttgctgcagagaaacgtcccgcgggagaagaactcgtggccgatactcccgagacggccttcaatgaattcgtgcaaatcacgacggaaaccggaatcatcggtttattacttttcctgacaatcattattggagctttcaaagctgcccggcactccaacagcaaggccgcaacaggtatggtcggttcgttagccgccttcctcgtttttgcctgtttctcctacccgttcaacgtgttaccccttcttgtcctcttcacgttactcttggcccaatgcacacccatgcaaccgggttcccgctggctttccggcattttctacacgttcctgtttctccccgtctatttcctcgccacgggacagcaagaacgggaacaggcctacaaacgctggaaatccgaacaaatctacttcaacatgcagatattcgaacgcaccgtcgataattacaagaaactctatcctcttctaaaagaccaacccgcctttcttttcgaatacgggcaatgcctctcccgcgcgggacaacccgaaaccagcaatctcattcttgaagaggcctcccaactgtcagccgatccgatgatccgcaatatcatgggcaaaaactaccagaccatgaaacaatatacccaagcagaatccgctttcctgaaagcctctcgcatggtccccaaccgcctctacccgctctacctactcgcccaaatgtacaacgaaagcggccagatcgacaaagccatctcgactgcccgcctactactcgaaaaagtccccaaagtcccctcttctgccaccgaggaaatgaaacgggatatgcaaaaactaattaaagatcatcaacatgagcatgccaatcctacgtatcacgggcaactgtgattccaacacgctatacgcagtagacatcgacttggacttttgcatcttaacgtatgaaatataaatttattccagagtaattaattgataaaaacctccatatccgctacttaacgtgatcgactcatccggttttaagaatttccgcaatttggacatataagttgagagttcatctctctttactggattttcaactccccataacctttcacacaattcaatagtggaaacctcttcattttttcgtgtacacaacatccacatcacttttgcacacatgggtttcagaggatgttttttcccatccacgataagagttcttgtcatcctatcataagttgttttagccgacaatttaaaaatccattgctcacctcgctccacacgacttaacgtatcccgtaaccttttattcaaacgggttactaaagtttgatatgaccaatttttacttacgaagtcatctgcccctccatcctcatccagcacggaaagatcatccggatttagcccactaagaatcacgataggtacacgtcccccactgttacgaattaacttaattacccctgcaccatctattttcggcatatccatatccaacaaaacaatatcccatctctctttttgataacaatcccaagcctctattccatcttcaacagcatgtacgtcaaagcctttccccgacagtatccgagtataaagttcacgcatttccaattgatcctctgcatacaaaagctttatttttctttccatgatcatgtattttaattgtaaattttgtaccactacccaatgaactcaccacgaatacttttcccccgtgtctccgtacaatctttctcacggaagccagtcccaaaccatacccggttgttttcttttccttaccaacccgccaatactcctcgaaaatataaggtaaatccttttcagctattccttttccccgatctgccacggtaattatcaaatactttctttcccggtaaacagtaatcgtcacctctgctacatctccggaatatttcaccgcattatcaactaaattacgaatagcataaaccaattgcttcgacagcttgaattgtccgggcaaaacattaacacctatattcacctcttttttacctctattagccaacttaaactcgctagccaatttattcaattcttcctgcaaattcatttcctcccactcgactcgtttcgtgtacaacatgactgccatgttcaaagtttctgcaatctcctgtttcaccataaccgccgtgttcaccccggtttcaaaccaacgcctctcattttctttcttaaacacgtcaggattttcttcatatatactatgtaatacaatttctatcaccgaaataggatttcctaaatcgtgtagtcgctggcgaaacactctttcttgtaacatcttcattcgtcggtgctttctgatctgcattacaaaattaataatcaatataatcacaacattccctcctacaaccaatcccagtactcgccaccagaatttcatataaaaatctttccaagaataatcaaaaagtatttgaatcttttccccactaataaatcctaatttcaaacattctgcttcttccatgtccatatatctagtatttcctttcggataaacttttctcgtattacccaacgaatccaccagtctgtataccacaggaattttcagagtctcttcgcttaaacgagcttcgaccaaacgctctaaagtatctaaactaatcggatcacgtaaattcaagtcacaatctactctcatatttacttctctgacatctacgagagaatcaatctcaaatatatgctcctgatcctcgatataaatatgtacttcacgtttactctcattataagaatgagccctcacctttccatccggtttcatcagctttaattcattccaacaacacacggcaccaattgcttgttgactcaattcatttttgataaaacatttctcacttacgaataatacattcacaatgtataccaaggcactaattatcaatacaattataatcacacttataaacaactcactatgacacgtattttcctttatcttttctaaaattctcataattttatcagaattgaattgtccgtttgcaaattatttcatatatttttgttacatacagcgcaaaaattatatgcaatttaaataaaagttttacaaaatgaaagatttaataaaagaaattacatttttaaccacgacaatcctaatattaggattattttctagtttttctaccgactcgacaaaagaaaatagccaagcattacgcaatattgaagcattatcagaaggagaaaatacaccaagtatcgattgtacagtagatgtcggacgttgcataaagaacggaattatcacatacggcatgtctctaaaacacgaaaaccatgaaaaaacatattaatatctatatagccattctattactgacatcttgcacaacagaaaacaattatctttctgttgctccagatattcttacacgaggaaatgatgttccttctacttatgttgttaacctttctgattacggtatcaacactcccgttagaatttcaaaacatggggacatccttgccgtgggacagcgttacgaacttacaaacgttcatcttgtcaatctatcaacccacgctactcaaccttggctacccatgggagaaggtcaaaacgaagcgtactcgatagacaatctttcaataaatagtcatggtgaaatttcggcttttgactttgaaacaggaaaattacatcgctgtaatccatcctctttaagtcgttccacgactcccccactaacgttagccaacacggcgatccacctttcggctgttcaaggtgacaattttgtcatttccaccggattgtacgagcaaggtcgttatcgctattattctttagaagacgaaagtgaagaatattttattgattaccctgttcatccgggataccccgatctatctccctactcgaccagcattctttgggcaagcactgttttaggtcttcgccccgacaaccagatgtttgtctgtacagatatacgtagtgggcaaattgatttttgccgaatcgaagggaagaaaatttcacttgtttgccgccattgttattactatccacacgtggacgctcgcgataagggagatgttcgtgtagcgtactactccgataacatcaccggattccgggatgtcacggtatcggacgaccgggtctttgttctttactccggtaaaacatacaaagatgaaaaacaaaacattgcaaactgttcaaccctgcttgtcttcgactgggacgggacattgctggaaacccgcactcttccccaaatggcaacgttcatctcttacgatatggaagaaaacgcgctctacgggacaactcccgatgctcaactggttcgctataatatataggtataaaatcatgaaaaagaaacacaccatattattcatcgcgttaatgatcgcctccttgggtgtcatcgccacttggttcgcgttcaccactcaacccgacaactttagtagtgcgccactcacgaccatcgagattccacgagattctatcaacctgaaaacaatacgttatgacgagcaaccacaggcaacattcacgttaaagaacacgggtacacatccccttctcataaaagacgtgcttacaacctgcggctgtaccaacccgcaatgggagaaacgccccgtcctacccggacaaacaagggaaatcattgtcacgttcaagcccaactcgctcggacgtttcacgaaaacgatacaggtgttatgtaacaccaggctcaagttgcacgacctgaagctagaaggtttcgtgacagaataaagaagtcaaaccctataaaaacaataaaagggagaaaatggcggtgccggaacaatcctagcaagaaagccctccgacaccaccccatctcctaaaaaagaagaaagtgtaaagataagaaattttgagacacacgtcatctctctcgttgaaaggatatatacttgaaaaaggacggaaagaaagataaagtaaaatcatagc

SEQ ID NO: 10778 - DNA, 17176 bp, Unknown
  gut microbiota DNA sequence
agaattggtaataaataatttcaatttatactgatttgataaaatatcaggtatcgttttaaataataaaaatatactccaaactaaaaaaagataataaaatatttttaaaccattataatcattatgattattgggtcgtataatatatgaaagtattaatatatcaacagacaatgcaaaaaaccatcttattattgctaactcaacaccaaaatgatttaaaagtaaaccctcaaatggataaaatattacaagaaagaaaaggcaaaaaaataatatgtttgatctagctagcttcattcttatatcatttaaaatctgaaacatttagaaacttcgataaatctaattttatcttttgctcgttccaattccaccactcactttcttgcaattttactattgtttctttatcaaaacgatacttaatcaatttggcaggaactccaccaactattgcataaggtggtatatctttagtaacaacggcattatttgttataatagctccgtcacctatttttactccaaacataatggtagcatttgttccaatcaatacatcattaccaatgactatcgaaccatattcattaacataatttttatcgacaaaagtagtaaaaggcttagtattactgtaaaaagcaggatgtgtacttaccatattatatggatgtttccctagacctatttttacattgaaagatattgaacagaaagcacctataattgtattatttacactacttcctcctcccatatatgtatgtcgtcctatacaacttttgcttactctacatttatcaccaatccaaacataatctccaagcttcgaatcatttatctgagtatcaaaaccaatcgaaatatgatgtttgttatattttttatacaatcgatagtgtctaacaatcgaaagaaatcgttcaggtttaaatagtttttttatgtagagtaacaataaatttttattcatatatattccgattttctccacactattttatccaccactccagtataactttgtataatttttataacaacatttgaaacattcttactcacataattgggtactggttccccattatctcggttattattcatctcgatagctgtatcaacagcttgtagtaatgacttctcatcaatacccgcaaggataaaacaagctttgtctaaagcttcaggcctctccgttgatgttctaatacaaatagcaggaaaagaatggccaattgaagtaaagaatgaactttcctcgggaagcgtaccactatcagaaacaaccgcataagcattcatttgcaaacagttataatcatgaaaaccaagtggttcgtgttgtatcactcttcgatctaacttgaagtcactctgctccaaacgtttcttacttcttgggtggcatgaatacaaaattggcatatcatatttctcggccatagcattaatagcattgaaaagcgagaggaaattcttttccgtgtcaatattttcttcacgatgagcggaaagaagtatatattttcctttttgcaaacccaaacgctgatggatatctgaggtttctatttccttaagattctgatgtaatacttccgccataggagaaccagtgacatatgttctttctttaggcagtccacactcttgaagataacggcgagcatgttccgaataagctaaatttacatcagaaataatatccacgatacgacgatttgtttcttccggtaaacattcatctttacaacgattaccggcttccatgtggaaaatcggaatatgtagtcgtttagccgcaatagacgacagacaactattcgtatcacctagaatcaacaaggcatcaggtttaacctgtatcattaatttataggagcagttaataatatttcctaccgttgctcccagatcatcccccacggcatccatatagacttccggatccttaagcttcaaatccttgaaaaaaataccattaagattgtaatcataattctgaccggtatgggccaaaatacagtcaaaataccggcgacatttattgattaccgcagctaatctaataatttcagggcgagtaccaacaataatcaaaagtttaagtttgccgttattatcgaagttaatatcactataatctatcttcatttttacatctaataattatactatttctccaaaagtatccggtctgttcggatcaaacacttcattacagtacatcaccgtaaccaagtcctccgtatttgacaagtttatgatattatgtgtgtagccagggagcatgtgtactgcttctatcttttccccactgacctcaaattcaataatttcgtcagaatcaacacgacgttcctgtattaatccatgaccggccacaacaataaaaaattcccatttcgtgtggtgccaatgttgtcccttcgtaattccgggcttactgatattaattgaaacttgaccgcattttcccgtatgaagcaactctgtaaatgagcctctattatctatattcattttcaacggaaaagccactttttctttgggtaagtaggataaataagttgaatacagtttcttagcaaacgagttattcggaatttctggaatcatcaacgtttgcggttgatcatgaaacttatacaacaagtcaacaatttcacccaatgatattttgttcgtaacaggacaataacagtaacgaccggctaacgtgtgacaatttatgacctctaatccatcgtaattacaacgatgttcttctccttttaaagccaatatcatctcttccaccaaatcatcaatataaaggagttccaattcaacagaaggatcattcacctggatgggcagatcattagctatgttattacaaaacgtcgcaacaacactattataattaggtttacaccatttgccgaaaaggttcgggaaacgataaaccaatactttagcaccagatttattgccgtaatcaaagaacaactcttcccctgctttcttactacgaccgtattcgctattaccaaaacgccctaaaagagaggcttgcactgaagacgaaagcatcaccgggcaagtatttgtatattttttaagcgtatcaagcaacatcgaggcaaaaccaaagttgcctttcataaactcacttgtttctttaggacgattaacccctgccaagttaaagacaaaatcagcatttttacaataatgatcaaattcatcacttgtgctgtctatgtcatattcaaaaatttgttcaatctttaaatctccataataacgagcttttcctgattgaatatttttcaattctgctactaaattcttcccaacaaacccctttgctcctgttacaagtatattcatcgttgtttatttcttcaattttttactcgctacgtatatcccgtggctttgcccgttcaatcaatcctaaatcttcttgaataaaacgtaaacgcaataattgttctttcataccttccacgtcaagacgacgagtgttatgactatggtaatcttccacatgattcaaatcttcattcccttcagtaaaaaatttatcgtaattaagatcacgagtatcacaaggaatccggtaataatttcccatatcgatggctttagccatctcttctcgtgtgactaaagtctcataaagcttttcaccatgacgagtccctatgattttcacttctgtctttccatactggggattcactttcgcataagtttctttcaacgcttgggctaaagtttcaagcgaggcagcaggagctttttgaacaaacaaatcaccattatggccatgctggaatgcgtaaattaccaaatccacagcatcatcaagtgtcatcataaaacgtgtcatattgggatctgttatggtgattggctttcctcccattatctgttctacccaaagaggaattaccgaacctcgactagccattacattaccataacgcgtacaacaaattgtagtcacagcatcttccccaagttcacgtcctttagcaattgcaaccttttccattagagccttagagattcccatcgcattaatcggataggctgctttatccgtggagaggaccactacatttttcacgccatgctctatggctgaatccaacacattactcgttcctagcacattagtacgagtggcttccatgggaaaaaattcacaactaggtacttgttttaaagccgctgcagcaaacacgtaatcgactccatgcatggcaatatccacggatgctttatcacgcacattacctatgtagaattttactttagaattttgcaactgatgtcgcatgtcatcctgtttcttctcatcacgactaaaaattcggatttcttttatatctgaatccaaaaaacgacgtaatactgcattaccaaaagaacctgttcctccagtaatcaataatgtcttatctttaaatatggacatcctaaaaaattaataattataattgtcaaacaaactttctatcctaaaaagtttactgtggacgaagtaaaatcacgttagaaatagccattctcatataccatgctttcattaaaacaacatgatacaatttgtaagcaatttacttgttcattgctttctttaactccggaataaaatattccatatatttttttgcacccttatcattcatatgaacattatctttaaaataagtagaatctttaagaaaaatatctatatccgaaagatctataaaaggaatatcataatcatcacaaacctgtgctagagtcctatattgaacagtattttttatattatcaataataaacttgggtgaagatgttataataattttagtattatgctctatgcaattaactaatgtatttcttaacatctctactttatcactatttattttactctcatataaatcatttctaatcgtaggatatttataacccaaattttctatgggtacataaccatgatcaaaattttgtgccttaagaaatggaaaaatcaagcaatccaaagttgaattatatctatacaattttgatttcattttcattttttgttttatccccataccatcaataacatttttgcaatactccaaatcataatatggatataaatcattgatagcctgctctgaagaagtactagctaaacaattatcatcaatttcccaaataatatattttggagaatatctatccaaaagagtattaattacacaatttgaaaaaacaaaaaaatgcccatcctgaccgcaattataagtcgaaaattttgtactatcagtaatcaaacgagagatatagtggtgtgaagcccgagaagaacctataattataatatcttcatttgttttattgattgtataatatgtctttgagccaatattatagggaaacttttcacaaacagcgaattgaagtatacgatttatttttcctcctaaaaaatccactcccccgatgattaatataataattaaaacattaaaaacaaacaaacgtaataatttattcatgatattaaaattggaaataaataaattgtcctccatcaagaactccacagtataagatcgtaataacaacaacaatgtaactaatccaacgaattatcctttgattgttattaaataatctaattctatttggataaaactcttccataaactcttttatccctagaagaaaaacaaatggtgtcacatagaaaaaaacggtccaattagtataaacatttcctacttcattaaaaaatttagagataatgacaaacgcttcattaatagtgttagccctaaaaaatatccatgcgattgaaacaatacagaatgtcaaaataatacgaacaatgcaagagagagtaaattttctattcaaatttttaattttatctccatataacgatttctcgataatcatgcatgctccgtggaaagcaccccatatcaaaaatgtgtaagctgctccatgccaaataccactaacaatgaaaaccaccatcacattaaacatccatctccatttttttactcggtttccaccaagcgggaaataaatgtaatccctaaaccaagtcgttaatgaaatatgccatcttctccaaaaatcagtaacagtttgtgcaaaatatggacgaataaagttagtttgcagatctatccccaagagcttccccgctccaattgccatcaaggaatatcctgcaaaatcgcaataaatttgtatcgtataaaatacagatgctaaaaacaatgttattccatcatgttgtaaaatattgttatacacaacgtcaacatacaaacccaatctatcggcaatacaaagtttaataaaaaatccccaaagcaacatctgacatccttctctcgcttgcccgtaatcgaatactcttcttttcaagtattgaggtaattgatgtgttgccctgctgataggaccactcaatattgaaagaaaaaacatcacataagcgaaatatgccaaaatattcctctgtacaggaatttttccacgataaacatcaatagaataacttaatgcagtaaatgtataaaaactaattccaataggcaataaaacttttacagctgataaagaaagttctttcccgaaaaagctgaagacatcgacaaaaacctctgtaaaaaaattaaaatatttaaaatagaacaagataccgatattcaatatgatcgtagataaagatatccaccaacatctacgtttatcactttcatatttatcaaacaatattcctgcacaaaaggttgataaagctgtaattaataataatccaaggaatttccaatcacaccaagcatagaaaaatacattagcaatgattattaaaatattttgaagattcttggtcttgcctaaaaaccaatacaacacaaaaacgattgggaaaaatattaaaaaatcaatagaattaaaaaacataaaatcatttgttttatattagttgctcatgcaataccagcctaaatttcaatataccattaagattacaagcttccatccaccaattcacgccctaaaaatcctttcacatcaaaaacaacatatttattattgaacaaagcatgaatatcaactcccttgaacttgtcatgagccacagccaaaattatcgcatcgaatttctccacaggcatatcgcttatcacttctatcccatactcatgttgcacgatctccggatttgcccacggatcataaaccgtaatatcaagattatactcttttaaagccttgtatatatcaattactttggtattccgaacatccggacaattttccttgaacgtgaatcccatgatcaaaaccttggaacccaatacctgaatgcctttctttaacatcaatttaattacctcgttcgccacgtgttcccccatcccgtcgttcatccgacgtccggccagaatgatctcgggattatacccgtgccgttgggcacattgagccaagtaataaggatcaacgcctatacaatgtcccccgactaatcccggtttgaagggcaaaaagttccacttcgtacaggcggcttccaacacgtcttgcgtgtctattcccagcttgttaaatatttttgacaactcgttcacgaaagcgatattgatatcccgttgcgagttctcgatcaccttggcggcttccgccaccttgatactcggggcaaggtgtgtccctgccaaaataacggaagcgtaaatatcgtttactttttggccaatctcgagggtcgagccggaggttactttcttgattttctccaccgtgtgcaatttatctcccgggttgattcgttctggggaataaccggcgaaaaagtcctcgttgaatttcaaccccgacactttttccaccacggggatgcactcctcttccgtcaccccgggataaacggtcgactcgtaaacaacaatatcacccctggaaatcacctttcccaccgtggtactcgccccgtacaagggagttaaatccgggttattatttttatccacgggtgttggcaccgccaccacgtaaaaattacaatcccggatgtcctcgatacttgatgtgcaaacgaaaccgttagcgattgccgattgtaacaactcgtcactcacttccagggtagcgtcatgtccagccatcaaggcatccacccgcctttgattcatgtcaaagcctatcgttttatatcttgttgaaaacaaccgggcgaggggtaagcccacgtatcccagtccgatcacgcaaattttcacgtcttgcatagtaattcgttttattatagattgttccagtaccatttcaccgcttcctgcaacccttgcctcatgctgtattgcggggcgtaccccaataacgattttgccttgtcaatgcttgccaaagaatgagggatatctcccacccggttcggcccgtgcaatatctcgatgtttcttatttccccgtcaaattcccccaggaattctttcaagtaacccaccagctggttcaacgtcgtacgctccccgaacgccgtgttataaatttgattcaccgcacccgggttggtcacggtcaaggctagttcattcatctgtatcacgttatcgatatacgtaaagtccctgctgtactccccgtccccgttgatcaccgggctttcgtgtcgcatcaactgcttcacgaacaagggaatcaccgctgcataagccccgaaaggatcttgtcgcctgccgaacacgttaaaataacgcaatccgatatattccataccataagtccgggcgaacacgtcagcgtaaagctcgttcacgtatttcgttatggcgtaaggagagagcggtttacctatcacgtcttccaccttgggtaaagattgactgtccccgtaagtggaagagcttgcggcaaaaacgaagcgtttcaccccggcatcccgggaggctaccagcatgttcaagaaaccgcccacgttaacctcgttactcgtgatcgggtctttaatgctacgaggaactgaccccaacgcagcttcatgcaaaacgtactccatgccttccaccgccttccggcaatcctccattcgacgaatatcccccacgatcaatttgaacatcgccgggtaacgttctgtcaaaggaagtatgttttcaattttccccgtcgcaaaattatctaagcaacgaacttcatgccctgcttgtaacagatactcgcaaagattagaaccgataaacccggctcctcctgtaactaatattttcattatttatttatgaatttgatatatatttccctatcgcctccacatgtctcatcccgtgtacatcccccgcataataatcaatccatcccgcatcgtgcaacctttccgcaccccgttgtgcctccttcccgtaataccctgcaaacgagaggatattcacctgtaaccgacaattcttgttcttcaactccttcccgtgtcgaacgatatcatcctcccaaaaaacgtaacgctccggatgagccaacaccacctcgtatcccctggcctgtaattcgaacaccacctgatcgaaaaaaggtgaggaagataaaaagttatgttccaccagtacccgattatcgtccccggacaggatctctccccgttcgaccaaactcaacatatattccccgacacgatactcggctcctaaatccaattctatctctactccctccttttgcaaaccagctcgaagatcttccaacaagggatgaagattttcccgtccattcatcaaggcaggaaaataaacgtgggaagtacatgtcactcttttcactcccaacctagataagcctttcaacaccatgattgcctccccataagttctaaccccgtcatctactccgggcagaacatgcgaatgaatatcatgggtataatcaaaatgtaccttctcccgttttcgaaaccaccacatgactataacttaccctcttatctattttgcttgttgtaataattaccgtaaccatacttgtaatagtgtattctcctagataccccattaaccagcaccccgcaattcgtcacgtgatgctcgctttccagtactcgcaaggaagataacacccctcgcggcaacacgttcaagcgaacaacacacaaacaagcgtccgcttgcttgaccatcgtcaaagcatccgcaaggattcccaccgggggagtatctaggataatgcaatcatattctcccctcacctcttccaacaatgtcttgaacctatcgcttgaaagcagtgctaccgggttcggcgggacgtctcccccgaacaacacgcttaaattgtcttctagcaaatgtaccaaccgtctccattccggttccatccctgccaggtaagccgacaagccacgggaataattcttatgaagatacgagtgtaaccgaggatttcgcagatcacaaccaaccagtaacgtctttttacccgccttcgcgtaagccttcgccaagtgagcagccaccagtgtcttcccctctccgggaaccccggaagtcaccagtaacacgggacaagctttctcgcccaacatatagttcagtttctcccgtaccacttgcatcgattccgacaaggaaaaattttcccgtaacagggtgacctcttcttgagataactcgggtatatctcccagcacggggaacggtaacgaccgtttcacctcatcaacggaacgaaccttgtcgttcaacatctccagcaagaggataatcccgaccgggatacccacgcccaaaaacaaccccacgagcatgatcaacgccttgttcggctctacaggagcattacccgctgacgggtcttctataatttttgccgtcgccacgtaaatcaatttagcaatctccgcctcctcccgcttttgcatcaggaaaaggaaaaggttctccttcagttcctgttgacgagcgatgtctcgatactgtttttcctgcgtgggaaccgaggtcagcagctcgttcaccgacgcgttctccttctccacactcttcagcttgatcaaaaggccgctctccacgttggcgatcgtctcctgtatgttctttttcaatccttgcaactgggtatttagcccgattacaatcgggttactctcgctggcactctgcagcaacttgccccggcgcaacaccatctcgttatagcgggagatccccgcgttcaaaccctcgtccgagagacccaagttttccggcaacagcgagaactcttccgcccgtttctgcgtgatcgccgcccggatgcttcgcaacacgtccagctccgtttgcaatttcatcaactccgcctccgactgtttcttgcgttccatcacgaaagcggcatccgaggtaatatccgttaatttattcgtcttcttgaagtcttccgcccgtcgttcgatcgttcccaactcctggttgatcacgtccagccgctcgttgatgaactccaccgtcgcctctgacacgatcctcttgttatcgacaccgttctggttgtatcgcttgacaagagcgttaatcaccgcaattcctctcgccggtacggcgtctttcaaggaaaccagcacggagttcgtgttctttaccaggatttgcacgttcaagtttcccgagaaactattaaccgtttttcgaaaactagacagatcaacccggattttttccttggaagtaactttcctattaggctcgatcgaaaggttatagtttcccatgggaacgctctccgagtaatgaccgctccacatcttctccccgtcaagattcatcaatatcacgaggttcgccgtgtccaacaacacgtgaaaagacgtgtcccggatctcaccggggttatccacaagaactttcaccggcgaatcgttataaagttcccgatcacgcaaaaaaccttcacggacataacgaacattcaagtccagttcctccacgacctcccgcatcaggtttttagattgtaactccacaatctcgttctccacgaacatatctgccgccgccaagcccaactctttcatcattacgttcgtacctagctccccctttttcgagtcactgatcatcaccttacccgtcacgttgtaaataggcactcggctctgacatattaacaaagcgatgaccaaacacaaaggcaccgacaccgcaaaccaacgccaacgggtgataaacttttcaactaatacttttatatctatactttcggactcacgttccctgttcaagttattctcttccatataattccggttctaggttaacgaattgcgatggcaaggatagccaccaacgtggaaatactcgataaaacgtaaggcaggaatgccccggcatttcctcccacaatccgagccttattgggttcaacatagaccacgtcattctgttgcaagtagaaaaaaggcgaatgaatgatattttccgatgtcaaatccagttgggcgaaaactttctcgtccccgtcttcccgcattaccagcacgttcttacgctttgcattaatttgtaaatctccggccattcccaaagcatcaaagatggagactcgttcactatttaccttgtaactcccgggagctttcacttcacccaacacggttaccttgaaattcaaatactggatggtcacgatcgggttcttcaggtagttactcaactcctttttcaatttagctgccagttccgtccgggataaaccttccactttaatcttccccaataccggaaaatcaatcgtcccgtccgtgtccaccagatacccgtaaagttgctctgaagttgtcacagtactattccgccccaacccgatcatcggcgtgttaaaaggcagggccgtctcgatatcatcacaggaaaccacgattgataatagatcatccacgtggatcaccgtgcgatactgcaaagctgctttcactctagaattaatcttcacatcttgcaggtacaccacgtccttcggggaagcgcaagcccccaacaggcaaaccagcataccgataaaaaacattcttccagttcccgtcatcacttgtaagtctttattttagttaattatttattttatccagtatttcgaaccgggagttcttcgatttaaactccggcaccacctgtttcatcaaccgcacggtatcctcaatccgtactgccaatgctaattccgcaagttgatcataagctctcaacacctcgtcccgcttgtacttccggactcttgctacccgaattttagcattccccgtcgggatcgtgttctcctcgttacttaaaacctcctcgtacaatttctctcccggccgcaagccgataaacttgatcttgatatcctcgttcgggacgtaccccgccaggcgaatcatccgttccgccagatcgacgatcttcacgggttctcccatgtcaaaaacgtaaatttgattgcctgtactcatcgtggccgcctccatcaccaaccggcaggcctccgggatagtcatgaaaaagcgggtgattcccgggtcagtaaccgtcaccgggcctccccgctcgatctgtttccggaaatagggaatcacgctaccgttacttcccagcacgtttccgaaacgagtcgtgacaaaacgagttttacctttcacttccccacgctctattgctaatcctaaactttgcacgtatatctccgccaatcgtttggaagcccccatcacgttggtcgggttcaccgccttgtccgtggagatcatcaccatcatgtccacgttatactccacgcaaaaatccgccaccagtcttgaaccgatcacattcacccgaaccgcctcgcaagggttttcttccattaggggaacatgcttgtaggcagccgcatggaacactacacgaggacgatatttttcaaaaaccatccgtaaccgttctttctgacgaacatcaccgacaaaaggggtgaacttcaagttcgggaaattccgttccagttccaagcgcaactcgtgcatcggggtttccgcgttatcaaataacaccagataccccacaccaaaagtagctaactggcgacatagctcgctaccgatactaccagccgcacccgtcaccatcaccaccttacccgcaaaatacgcctcgatctccctcgtgttcaccttgatctcctcccgtcccagcaagtcctctatacggatctcccggataatcgtcttttttaaaccatcgcccagcacgtctattggcggggaaaacaagttctttactccaaactcctgacaaaaacgaaccaaccgatccgcttcccgacgagcctcctcgcgcgagggatataacacaccgtttatattatattttttcacaaaacgggaaaaatgctgttcatcctcaaaatagtaaaccggcaattccgaaagcacgcaagatttcaggtatctatccggattcacgaatcctaccacgtgatagtgcttactagtgtgcattctcgtcttcagggccacgcttttatcaccggttccgtagaccagtaccctcgtcttccccgaaccatacagagaaatcgtaaaatcataaaccagcacaagtgtaacccgaaaacccaccagaatcaccgatgtcacgagaaaatcaatcacggcacaggcaaaaaggtgttgcccgaacagccgagaaccggacacgaggatcattcctgccaacaggagttcttttaggaaaattgcaaatcccattttcccaatgctctttatcgtggcatgccggatgatatttcggtttaccctcagtccccagaaaaccagcaaactaaacacgcaagaaccgccaataatcaccacataggttgattgggagagattgatgataaaactatcagcaaaaagaagcgtgataaacgaactcatgacagacaaaaagatatccaccaagagaatcgtgttagcattcacgtacttcttattctcgtgtaaacgattacatatcgagtgaaacgagtatttcatttatttttggtattttcaaaaggagcgtcccctccggtatttaatagcttgatccggcgtatgaagtaccgtttaaaggagacgctgttaccgggggttgcatgtcccggtatcgaatttttagtgtgaattggtatatttattctttcttttcatacttctcgttgcaagcaacaaactcccgtttcgctaaaatataaaacacctgccccacatcaacagaggagacctctcccatccgcacaaattgttcaatcatatcatcctccacttgtcgtacccgtacggccaaccgtacccgctcttctttcaaccgttcctgttcttcaatgggtaattccatcaagcctaccacgttatcatacaaacaaatcgcatcccaccatcccaacagatcgccccggtggtttccccgcgtatatcccaaagcttccgtcaccaatttaccagccaattcgccacattccgcatctcccgtaaaataataacaattacacaataaccggcaaatattagaagtacggcacggtaacaccagtttttggcttccccaaggtgttagtatatcgtatgcagcatccacgcctttttccaaaaaatccaaatccgagtacaactggtaaacgtccatcaagtccgcagcgtaaccggcacgaaaatttgccggaagttctttcttctgcaccaacacctcataccaacgggcaatttcttttgccctttcgtgaatatcgtaaagaactccaaactcggtctctaaccacggatatatccgcaccatcgcataaaccgtaagataaccgtgaagataagcagacaacttgtcgggggagtacgaacggaaattaacttcacgtaaccgatcgtacaaatcataaaataaacctttctccatcatctttttctactctattcgttccaaaaaggaacccggaatataggacgttgcaattgacacaactccttccaaacggatgaccacacgtttgtgtcccatcaaacgaaccaactcgccttccaatccttgcaaggggcctttaatcactcgtacccggtctccccgtttcagatttttgtttaacacctctatcccgctcggggaaaaatccaacaaaaacatgaaatcatgcatttgtttatcgggaacaatcaacgagtgacgtccctcaatatctttcaagtaaacaatattaagcccatggtcatttattaatgaaaaacttgttgctttatccgtgtgaataaaaatcatcccgtgaatcaagagtacccggatcgttttacgccccaagggtgtttcccgcacttgttcttcctgaggtagaaaattctcgatacccaactcatcaagcttcttctttatccacaactcctgattcacccgagtgtgagccacgtaccaatttatctttttattatcaaccatgtaccttttgatttcccctgtcaaggtattaaatcgaattttggacagctttctccacatttcccgaccggatgcgcttcgcgcattaaccctcgtaccggccctgatttatttccacgtgtttctatcgtctcactataatacagcgattcaacgaaagaaagctgtccgcactaaaagtttcaaaaaacgatcgattaataatattgtcacttaataataaattgtcggattttgtaaaattgtaattgcttgattgctaaaaagaaaaaatattttgttttgatttgcgcaattcgaaaatttactatctttgcaaagcattaaatgatcctataataaatctcaaaaaccgatataaacaactgatttaaaccgcattaaaaacaacaagcattccattccacacatcttacatttaaccattgtctccacttgcataatcattaccctaccccctctctagtccataatccaaacacatacacaacaaaaacacagcatcaacacggtttcatgttcatgctatgtatatgctatgttcatgttttgtacttggggtagaggaaccatagtccacccttaaaccaaagatttccttaccttaacgtaagcttgatattatttaagactccaaatccacgtcatttatctgtcttatcctaaaaaagttgacttgttcaacaagtaaacttatgtcagtagcaacaaaatccagtggtttg

SEQ ID NO: 10779 - DNA, 31191 bp, Unknown
  gut microbiota DNA sequence
atgtctctgcctaaactgcaggcataaaaacaatcttcgccgaatattttgatgttctatcttcatatcggaatacaaaattatgcataatttccatccgaacaaaacgattttccaatttattttccaaaatatttctcacaaaaacgagaatttctgcaaacgaacctgttacaagaaaaaaaattcaccccaaaaatcccatgtataaactacaaccgggaagcaatctgatctacgatatctttagcaacctccacctttgtcttcaactcatagacagtcttattccccgctttatccagaattgtcaccttgttcgtatctacactaaaacccgcacctttatcattcaaactattcaagacgatcatatccaaattctttcgctgcatcttagaaagagcattcacctcttcatcattcgtttccaaggcaaacccaactaataattgtgacgcagtttttattcttcctaattcagcagcaatatcttttgtcggtaacaattccagcaacagatcatccttaccccgtttaattttgtgatcagctttttccttcggggtaaaatcagccacagcagcactcaaaaccgcaacatcactgttaacaaactcttttgatgttacttcgtacatctgagcagcagactccacgtccactcgacgaatcgcagggtgactcgttttcagatttacaggaccacacacaagcaccacttctgccccccgtcctgcaaattcctccgcaatagccaatcccattttcccggaagaataattcccgataaaacgtacaggatctattttctcgtaagtaggtcctgctgttaccaccacttttttacctttgaaatcctcctgtcgagcaaaataatcagcaataaaagcaactatcctttccggttcctccattcgtcctttcccaatcaagccactagccagttccccactctccggttcgataataatattgccaaaagattgcaataccttcaaatttcgttgcgttgccggatgtttatacatatccaaatccattgccggagcaaccatcaccggacatttggcagacaaatatgtcgtcagcaaaagattatctgctatacctcctgccatctttccaatcgtattcgcggaggccggagctatcagatacaaatcagcccacaaccccaaatcaacatgagagttccaatccccattttccgggttataaaaatcgaccataatcggactcttggaaagagtcgccattgtcaagggagtaataaactctttcgccaagggggtcataaccactttcacgttcgccccttctttcacaagcagacgagttaatgttgcggccttgtatgcggcaatactgcccgtcactcccaatataatatgttttccttttaacatcacttatttataacgttataaattcacgttcctcgaattcaaataccaaagaaagatgaacttgcttggcaaatttaaaataaaaaacctgaaagtataacactctcaggtatattcttttccttaaagacaggggctattcctcgtctgcattatttgcatcacctttctctttcgaggaaacacggaaataaatgtccccgtcctcaaattcctgggtagcaatcaacacgggtttcggcaaacgctcgtaatacttggaaatctcgatctgttcccgattttcaaatatctcttccaaattatccgcataagaggcaaactcttgaagtttcctacttaactcctctttcatttcaaccgaaatctgattagcccttttaccgatcacggctactgcctcgtagatgttatccgctttactggccaatgatgccggattccgggtaatagtattattcggcgctttaactttcttaaaatctaccatggttaatttgaatattatttgttttatctgattattcttcttcatcaacatcatacggtttcaagaactcgttgatgatttcatattttcgagccatttccttggcataacgactttccgggtattcatcaaggaaataataatactcctctttagccgcattataacgttcgtattgtttatcttcaacactatttacagccatctcgtacttggaattgaacaacatatacatgatttcttcccgatatttagatcccgggtaatcctttaaacaattctcaagactcactacagccgatttatatttttctctcaaatagtaatttcttgcactcaagtaatccttgtaagataacttgtcccgcatctcgtccatgtattcattaatttgctctttgcgagaagaattcgggtaacgactcaaataaagttgaaaactttccatcgccttctcggttaccgtttgatccaatcgtgctttcggagaagccaagaaattacaatacccgatcatgtacaaacattcttccacgtaagaactttccggataaatcgaaacgaattgtttgaataattccgctgcaacttcataatctttctggttataactacagaaagcccggtaataagctacactctgagccttggatgttccttgaaaaaccatccgaatcccatcaaacaaattggaagctttcgtgtaatctccattattataatactctaccgctttcttatacatggcttgagaatcaccacttttcaagagtttctgatactcactacatgaactcatcaaaattattacgagcagaaatcctataaaattcttcatcataaagtgccttttttgcatcacgcaaagataaattataaatatcaatccacaaaataatttacgacttatgattgacgattttagattttaaattaaaagcgcccaagcaactgacttggcgagtttataacctgcaatttgtaacctataaacttgtaactttttccaccaggacaaaaaagcaactaagtatttaaacgtatttccactcccgaaactgcaacttttcaaaagaactcatttggaatacatttttttagttacctttgtttccacattgtaaataataagattaagaatttcaaaatatttatcgaagtggacatttttgaaagagtaagacaacagaagggaaacattggtcaatatgccaaacaagctcatggctatttctctttcccgaaattagagggcgaaattggtccccgcatgaaattccgtggtaaggaagttttaaactggagtttaaataattatatcggtcttgcaaacgacccggaagtacgtaaagctgacgctgaggccgctgcaaaatacggtatggcttacccgatgggggcacgtatgatgagtgggcaaacttctcgtcacgagtacttggaatctcaactggcagaatttgtgggaaaaccggacgctttcttattaaacttcggctaccagggaatggtttccattattgatgccatgaccagccgtcatgattgtatcgtgtacgatgctgaagaccatgcttgtatcatggacggtcttcgtttgtctcccgcaaaaagatacgtgtaccagcacaatgacatggaaagcctgcgtaaacaactggaaagagcgaccaaatgggtggaaaacaccggtggtggtattctagttattacggaaggtctgttcgggatggctggtgacctcggaaaattagacgaaattgttgccatgaaaaaggactttaacttccgcttgctcgtggatgatgcacacggattcggaaccatgggacctcatggagccggaacaggtgaccatttcggagtaatggacggtattgacctttactttgccactttcgcgaaagcaatggccggaatcggagcatttatcgcttgtgatgaagatatttgcatgtatttgagatataatatgcgttctcagactttcgcaaaatcactccccatgcctatggttgaaggtgcgatcaaacgtttggaattattgagaaccaaaccggaattacgtgagagattatggactattgttcgtgctttacaagccggattaaaagctgacggtctgaatattggaagaaccaattctcctgtaactcccgtttacctatctggtagcgtggcagaaggaacccaagtagccatggatttaagagagaactataacctgttctgttctatcgtggtttaccccgttattccgaaaggccagttattactccgcttgatcccgactgctatgcataccttagaagacgtggagtacacggtaaaagcattcaaaaacgttgctcaaaaattagctaacggagaatacaataaagacgtggttgttgatgccaacgctctttaatttaccaagaagctcataaatatcaatcagccccgaaagtcagatattgaactttcggggctgatattaaggaaaccttttaccaaaagttatatttcgacctccacatatccactaaacaccaattcactgtcgcctcgttcacataaagttcgtgccatacatttcgccgttctcgccagcttcttttcaaataaaaccttccctttataagtcaccttaacaggtttatccatatccaccatccgatcatttagataaattctcaatttcggataatcacacgcttctattttaatctcattaccggaaagctctgccaccactgccatacccggacgagctgtttcaaggtcaactcccaaccagtacatgaaaggacgcataacttcctcctgacgccaaacaatctttttcggcaaagcatttcgcttatattttgtcatccacgcgattgccgcagtatccgcccgatccatccaatgcccctttcctttcacgatatgtgtttcatgtatatacccctccggttctgcctgttgcaaagaatccatcactcgccctttctctacagccaacttattccgatcgtaagctccatcatactcccccatccagatcatgaaaggcacgttacgcaaattcacttgcgacacttctcccggatgcccggccatcatggaagccgccgcccaacgatcggccatacggggagccatcctccataccccatcaccaccggctgaataccccaacaaatataccttatcgggattaacctccatctccacgactgccgtctgaatcaaggcttcaaaaaactcgtccaatcctggtttaaaccacatattccaatcatcccagggagcccttggggccacgtaaacaccctcccggggttcatacaaacgaatctgattcttccattgctgcgtgttcaacgcttccggtgcattcccccctccatgcatagaaataaacaaactccttccatcttccggacgttcaccaaatacccggtaatcgaacttcatctgcaatccgtccctggaaaaattcttcaacacccaaaaacgatgatatttcctcttcacctccttcttccacgcctcaagcaaaacctgttccgcctcaatcgctcccttctctgtcagttttttgtcggcaaacccttgatctgccacatttcccaatacattctccttcaagtaattttttaattttcccacattctgggcaaatacccctgtactcacaagcacgcaaagtactaacaatctgatttttatcatttttattcaatacttattatattcaacactttgttctctaaatagatacgcttacatccgttcgttatctcgtcgttatactctcattattcctccgatatagggaacagagggataacgaaaagatattaccccctcaacgaacagatacaaacgttggtataaagttactattgagtaggaccaactttactcctgtcatctcaacacccgatattttagtaaatgcgttccgtcactccctgcaaacaagtaaaaaccggcacttccattatctccaaaagctattgaaaacggtgaatttccccgtattggaaaacctttggaaacctctttcatgtccaacaagaaaagacgttctcctttaccatccataatcccgattcttgaatcccgagccgagaaacgatagatatacggaaaatccaattccgaatcttcccaatgcttctcgaataacaatttccccttgttatccatcaccacaatcctgtttttcaacgtataaataaactcatcctgcccgtcattattaacatcctccacgttgaacattccaccgccaatcatctcttctcccctgattcgttctacttgacctcgaaaattcaccaatactatttctccattagcatccataaaagccatcttcatctggccgttctgcttcgtcaggtacaaagacgtgttagcggacaaattcaataaagtagatactttcacccgttctttccctttacgatccaagatatacaaacgataccggtctgcatacacgagataatctttcccttccacccggaaatgataaattttagagactatatcattatcactctttggcacatcccaacctttcacgaaattaccggacacctcatacaaatacacgtgatgatcagccccaggagcaaacactcggtaattcttgttattctcgtaatcagccaccgagattccccgttcgcaaggagacttaaatgccagcggaaaccgaggtaaataattaccattccggtcaatcaaataaagatgaccgggtgtagaaaataaatattgcaacttcccgttcttaaacatatccacttgataaacctcgctattgatcttcccatcgatcggcaatttccacaagatccgtcccacatcattaatcaagtaaattgtatttccctcatcctgcacgaaaagttcacgttctcccgtgttatgattcaccacaatcgccggtttcatgctcattctagcatccaaccgtgtctgccacatgatctgagcttgtttctgttccacctcttccgtgcttaaaaacaacgtgtgatacagcatatcgccctcgcacccccattgtaacccgagagaagaaaatgcctccattccctccttatttctctctaacaattcacgcaaagcccctttagtcacctgttcgtaataaggtaacatcgaaaccatctcggacaaatacatccagttaaacttcgaggataatttcgttctcagcttctgataccattcctgatccctcacgctcaggcgacgcatataatcacttgcgaaagactgaagtcctttttcagaagaagcaaacaccacgtaattatcttccaccaacacgtaattcgttgctatccctcccaacacatatccccacatcaccccggcaaaatcgggaacgggcatcttgaaatagctcactttcttatctttatccaaggcaaatgaacgatataacgaagtttcggaaatcccggacttcgaggcatacgatttcaacatcttttccaacaaacctccagccaagcttccggctttcacgtgaaccaccacgatcccttcttcctgtttccggctcgcatcataagaaagcgttcctttcccccattcaccttttaacaaagcctgccactcctcctccaacttatccccaaaaagacgagcaaactcctgtttccgtttccggacattctcaatctgtcccgccccgtaacgataactctcaagagaagccaagtaatttttcacatcattcagagccagaatactaacacacttcacgtcggcaggtatcacggcgtccagtttggaatcctggggaacttgccccttaaacgcaatagggaatgcggccttcaacccgtcataatgcacaaaaccgttaaaactgaccccattcggctttatatcgccatccaacgccccccacttaaaccatttagcgatattcgtctgtttagcaataaaatctttttgtaataataaaggaagtaaatcggaaaaacaagtcgtgttcaaaaacacgttcaaaccggctcctgcggagaaataacgattcacatttttaaaacggggagccccgtctttttcatcctcaccggaatgacctaattggtttacggcatcttccacgtatagttcagaattagaaaccaataccatacccccgacaatagcgtaacacacctcatccttcccccgacttgccaagtatatcttctggttattatattttcgctctttcacctgtagcccggcaaacatcttttgcaaaaaagcatgtacatcccccctggaaaacaaaccactccggttcaacacgtacaaaaaacgaatcgattgtttcccttccacccgaatcgccatcacataagaggaagtatctacctgagacacttgtttcaacgtatctacgacccgagataacatacttttccgaaatgccttaatttcccgatcaaaagcggtagcaatcttcggtgataaattcgcattcgcattcacattaatcacaacagcagaattatagggaataaacgattccttcgggatatccacctcccgttcccgctcgttcacccaccatagcgcaaatcctattcctccgagaaggacaatcccaaaaacgattaatgcaattttcttcaccacgttctaattttagattttaaattttagattgaagattagagatcattcgattaaaagaaacgctcgcctcgtgcggctgaaatctaaaatctagaatcatcaagtctaaaattgataagctttttcattggaacaaatttagtaaaatcaagcctttttcctacttttgtgaaaaggaaaatcaacatgaaaaagatgtatacactcccagagctggaaaacatgctgacttgtcggggagaagaagaaaatcggctttactcggaagccaaaagagtaaaaaacgaaaacatcggcaacaacgtctatctccggggattaattgaaatttcaaacatttgcaccaaagactgttattactgcggtatccgaaaatccaacacggaaactgcacgatacacactttcggacaacgagatcattgaggccgcagactttgcctacacgcatcatttcggttccatcgtgttacagggtggagaacgttccgataaagaattcgtgaatcgaatcacccgtttgttgcgagaaatcaaaaaaaacagtaacaacgagttaggtatcacactttcgctgggagaacaaacggaagatacttacaaacgctggaaagatgccggggcacatcgctatttgctacgcatcgaaacctccaatcccgaattatacgccaagattcacccgaacaacccgctccactcccattcaacacgtttgaaatgcctggaaagcctgcaacactgcggatatcaaacgggtaccggcgtgatgatcgggctaccgtttcaaaccattaccgatctggcaaacgacttgctgttcctacaatccatggacatcgacatggtaggcatggggccttacttggaacaccatgctacccccctgtacgaataccgccatttgctccttccccttcaggaaagattgcgcctgtccattcacatggtagcggcactccggcttctcatgccggacattaatatcgcagccaccacggcccttcaagccattgaccccgccggaagagaaaaagcactggaaatcggggcgaacgtggtgatgcccaacattactcccacgacgaaccgtaccctttacaaactctacgagaacaaaccgggaacccatgaaggagccgcagaatccatgcgcaaactggaagaaagcatttttaaaagcggttgtaaagtagcctacgggacttggggagattcccgacatttccaatcaagaacggaaaattaaattcaaaaatccgaatcgggtaatcaatgaatcaccaggtttttaaaaggagcgaaagcggctaaaataaccagagcccccaaaatcgtgatgactaacccggaaacccggttaatcgtgattaacacgcgtaaccggaacttcttacgaaagatatttaccaaagtcgagagcgtgtaccaccacacgccaccgcctaacaacacccccatcaccaccaacaactctcccagcatagaagaagattctccgaaaacggacattccggcaaaaactgccataaagacgaccaccgtgatcggattggaaaccgtcaaaaaaaacaatgaaagataatcccccagcaacccggtcttgctcacccgaccttgacgtcgttgacgaatctgacgaatcgggttatcaaaataaatttttaacccgatacacagaagaaaaattccaccgataatctgtaacaatagctcgtgggtctgcacggtatttatcacgtaccccaacccgaatgccgccaccgaagcataaaagaaatctgcagaagcagcacccatgccggcaatgaaacctgatagcgcacccttatgcaaggttttttggataatcaatacacccattggccctaatggaatcgataccattaaaccaaccaacattcccttgaaaagatacaatatatcgtacatgctattctatcggaaatttacagttccacactatccgaagagaatcggctcaatatcgtgtcatcatttatctcttttgacaacgactcgatcgttttcatcggcacgtcaaaaatatctaaaataagtaaaccatccaaacacatattaaacttcggatcgatattaaaaccgataatcttggcattcaacgaaatatatttcttcaacaaaaccggtaacttatcactcgacggctcaatatccccgatcatcttgtccagcacggatatatccttttgagcggcatccagcatcacctgaaccccaggctcttccgaatgaacctgatacttggaacgcgggatcacgtattttgccagttcatgactataatgattctcctgaataaaacgcatgatcaactctttcgacacttccgtgtacttcccactgattgtcaccggaccgatcagataacgatactccgggtttttcaacaagaaataaagaatacctttccacaacatgaacaaggggagtggtttacgctggtactcctccgtgataaaagaacgtcccaactcgatcgattcgtacaacacgggtagcatctcttttcgcatcttaaacaacgagttgatataaaaccccttcatcccgtaacggtcaataatctcttttcctttccctacgcgataagccccgacaattttctcttcctcccgatcccaaataaacaagtgatagtaataaagatcgtattcatccaaatcgatactacgattcgttccttctcccaccgcacggaaagtaacttcccgcaaacgaccaatctcgttcaacacgttcggaatcttcacggaaggggaacaatatatatcgtaattcttcatgttaaacaacaggtagtcttccgctatcccctcgatttctttcttcaatactacactctcggtctctgccgcaatcggttctgctttaggcattgctttctgtgatttaataaaaaacttcttcacttctaacgcagatcccaataaataagttttcgcccgcaagaacttaccatactgagctatatcatgaaatgtattctgagtctccacactgatcgggttcccgatccttaacttcaccaccctgtttttcttgttcaacaactcggaaggcaacttaatcgttttcaataccggatgaatcatccccagtaaataaaacaacaaactgttagaacctttaaaatatatcgggataacaggcactttcgccattttcaccaacttcaaaaccgaagaatcccactccttatcctccacatgattcgaatcagcttggtaagaagaaacctctccggcagggaatattcccaagggtttcccgtcaacgacatgacgtatcgcctctttaattactcgcatatttgaatctttcttgccctcctccgggtccagccccaatatataatcctgtaacggaacaattttcttcaacagaaaattagacatgattttataatccggacgtaatttacatagcaaacgcaccaggacgataccatccagtcccccgaacgggtgattggaaaccgtgataaaagtaccgtttttaggaattttttccaaatcctccttactcacctcgatagtcacccccaaagcctcgatcaaactatccaaaaggacttccggatcatcatcatttaccttcacattcaacttatccagtttatgcaaccgcaagatatacatcaccaacttggataccaagctttctcgaaaacggttcaacccatgagagccaagcaaaaaatcattcgtatcaattaatttcatctatatccttattaaatgttctacaactagaacactacaatatctttcacaacattatccccgacccgatcattcagggcttttattaatccctctttcaccatcagaatctcgttctttaccacggaagaagtgaaactcacgaacacttttccctctgaaattcgcaaacttttcgtccgggaagcaatcattccccccacaacatccggccaaacctggcacacctccctctctttgaactgacgggataaccccatctgctccaagtaaagatttaccagctcatccattgtcaacgtcttaccctgcttcaaaacattcctattttattatgattctacagttaaattcattctacaaaaatacgattttctgaacaacccgaatgaattttagattttaaatttcaaatccctccaaatttagtgatttatgattcacgatttatgatactctaattccgtgattagaacgtgtattcggtggtaaagaatcacataatcgtaaatcataaatcacaaattcatcacttctcccccttcaacatgaaatatcttgtattccatggcatgttgcttcaaaatttcgtctatatgttcacgattggtatccgtaacaaaaacctgaccaaagtccgtacttgaaacaattcgaatgatctggcttacccgatcagcatccagcttatcaaaaatatcatccaacagtagcaacggcttcacccccttctgcttcaccaagtaagcaaactgtgccaatttcaacgctgtcaggaaactttttttctgtccctgagaccccagctttttcacggggtacccttccaggctcaaattcaaatcatcccgatgcactcccaccgtcgtgtaagtcaatatccgatcccgctcgaaactaccacgcaatgaagccaagaaatcatcattctttatagtcgtagaatactccagcataaccttttccctccccaaggaaacccgatcataatacatttggaacatctcttccaactccgccacgaaagccctacgccgttcaagaataacacgcccgctatccgcaagttgttcatcccacacagacaacatatctgtatcaatcgactgtcccgcatattccttcaaaaaactatttcgctgcatcaacacccggttatagcgaatcaataactgcaagtactccttatcacattgactgatcaccccgtcaataaaacgtcttctctcctcgctagcaccatcaatcaataccacatccgcaggtgaaataataactaacggcaacaacccgatgtgatcggaaagtcgggtataagcctttttattctttttaaaaatcttcttctgtcctcgtttcaccccgcaatacacgtcaatttcctcgtccccgtgcatatattgtccctcgatcacgaaaaaagcctccccatgacaaatattctgcgcatcaggcaagttgaaatagcttttacacattgacaactgatacacggcatccagaatattggtcttccccacgccattattcccgataaaacagttaaaccggggagaacacgcaacactcgcctcggcaatattcttatagttgacaacattcaagttctttaaaatcattcacttcaactgttagtggttacaagcaacaagttccaacgcaaacgtgaaacaaacaaccaaaagtaaggaaaagaaggatataatccaccggacagataattttttgcataaaatttcacggagatccttttggtataaaaaaaaaaattaattttgcacgttgacgagcgatacgtctaggaataagaaaagtaaataacaaaaacatataaccatgtcaaaagagaaacagaaacgtgcggatggctttgaacaaattgaagaagccacgatttcaaccgaacaattcatcgagaaaaatcaaaagttattggtaagaggagtcctcgttattatcatcgtggtaggcgtgatcttgggatactatagattctacaaagccccgatggaagaagaagcattgaaacaaatgttcgttgccgagaatctttttgaaaaagactctttcaacatggctcttaacggcgatgggaacgcccccggtttcttggaaatcattgacaaatacagttctactcctagcggaaatttggctaattattatgcaggaatctgttatttgcacttgggtgacaaccaaaacgccattaaacacttggaaaaattctcttctgacgatgtgattttttccagtatggtaacggcaaacttgggtgacgcttacatgcaattgggcgatttcaaaaaagcgtctagctattatcaaaaagcaactaccggaacgaccaatatggcaaccaccccggttatcatgatgaaagccggacttgctttcgaaaaagccaacgactataaaagtgcattgaacatgtacgaaagattggagaaagaatttcccgcttcttatgaagctcgcgacatcgagaaatacatcactcgtgcaaaactgcacatgaaataagaaattttctaaactactgaaaaaagctatccttaaagggtagctttttttacgccctacacggtcgtgtcaacttttcatccacgaaagctgatgaagacccggattgattacggtgacaaacctttgtagttccgatcgaaacagtggatatcctcggtgcactttcgctacatcttcggtgcaccttcgctcgtggagcgtccgtgtggcgtaggtgttctgtgagcgtgtcggggaagagtattaatatggacgggatatgaaagggattacatcgggttttctaccccaaaacaattagacattcaaagggaaaagctgaaggattggataagttccttctataacttggaataatcctaaaaaaataccccgcctcaacgagacggggtcaccattatatagtcttgattacttctcgaacaactttccgaaatcctccatagatatctcttgctcttccaatttcacgccctctttaataacactgaaaatcttgttttccaatgctcggtcgtaaagactggcacgctgtttctcattctcaagcaaacgaacggcaaaaccatccaattgctcgtctgacaaaccgtataacccgtattgttgtaattgagcggcagcaacctcacgtccaacaaccttcatatcctcgtcctcaacttttatgttattttctttgatcatatcgcccttgatcaactgccacttgaattcatcccgataagaatcgaaatctttatcaacagcctcttgagttaattctttattggtagccaacatccaacgcttcaagaatgcttcaggaagaaccacatcctcgtttttcttcaacatcttgtcacgagcatctaccgtcaaacggtactcgctatgagctttgaactgtttagccaaatcttctttcacacgggcacggaactcctcaacactcttcacgttaccttccccgtaaactttatcaaataaggcctggttcacttctgcctcaacgtaacgtttgatctcgctaatgataaagcagaaatcagaagtaacatgctcggcctcttccttgcttatttgtaacaaagcagcataatccgttttgttgggataagctttggacgggttgaaaatcacttcgtttccggcttgcttgccagtgaaaactttcacttgctcttcatccttcatgtgttcaactgacaatgaagcatcttcaacatggattccaccttccttgggtttcccatcttctcccaactcgatcaactcacccttcacgtattcagatccctcgatcatgtcaaccggggtcaactctccattgcttttgcaaatgctttcaatctgtttgtctatcatttcatcatcgaccttgatgatgtaataaggaactttctctcttttgctcaatttcacgttcatcgcgggagacaaagcaatatcataaacaaactcgaaactttcctcatccaaattcaactccttctgttctgtctcgctcggaagtggttcacccaagatattcaaatcgttctcttggatataattagacaaactctctccgatcaacttgttgatctcctcaatcaaaacggctttaccgtacattttcttgataataccgaaaggagttttccctttccggaaaccatcaatcaccgctttcttctggtaatctttcaacgcgtcgctcacgcaagttgcgtaatcatccttatccaattgaatcttaatggttgcattaagatcgtcgatttggttctttgttacattcatacttctctatgataatacaataattgataaaacaaacaaaaaggccacctcattgtaaggcggccatctcttcaagtgcgggcgaagggactcgaacccccacgccttgcggcactagatcctaagtctagtgcgtctaccagtttcgccacgcccgcttgctattttgacggtgcaaatatattgctttttcgtgaaaagcaaaacgatttgaccgtttttttattttttcctgcgtaattcaaaatttttccccaggtaaacccttctaacttccggatcattagccaaatcctccgcagaaccggattgtaaaattcgcccgtcatacaacagataagcccggtctgtaatacacaaagtctcctgaacgttgtggtccgtaatcagaatcccgatatttttctcttttaacttgatcacgatactctgaatatcctccacggcaatcgggtccacgccggcaaaaggttcatccaacaggataaatttcggggcaatcgacaaagcccgcgcaatctccgtacgccgacgctcacctcccgataattgaattcccttactcttgcgaatatgttgtaaaccgaactcatccagcatctcctccaaacggtgacgctggtaatccttcggtaaattactcatttccaaaacagccctaatattatcctccacgctcaactgccggaacactgaagcttcctgggcaagataccccacgccaagctgggcacgacgatacacgggttctgtcgtgatctccgtgtcatccaagaaaatacgtcccccattcggtttaatcaatcccacaatcatataaaatgacgtggttttcccagccccgttcggtcccaataacccgacgatctccccttgttccacgttcacggaaactccttttaccaccgtacggctcttgtatttttttactaagtcctcagctcttaatttcatatcttactattttaccgcgctaagatagtcttttacaattgaaaattgaaaattgaaaattgaaaaatatcagaaatttaggtgtaacgagaaattaatagcaaaattatccacatcctgccccgaacgatccccacgatgcgttaaccgccagatagcatccactcggataagacggaaaatattctcgatcccgacaccggcttctatataaggttttgacacagaagacatgccctccggaaaccggaaaatagcatccgtgttaggcaaactaccgttattcttatccgacaacgtaccccacaaggccttcacggttgccacctctcgccatttcagtcgtttcatcaacggaattttactcaagaaaaatcctttaaaatgatgttcccagaacacggctccccatagatcggacgcaaactcgtagaaattcatacaagagaaagcgtaaggatcataaaaataggtagcattcccctcatgtagcttcaacaacgggtaaggaaccttgttaaatatctttcccccagataacatgatatcactgtaccctaacggagctatattgaaatcatgtttcacggacaattccagacggtaatactcgtaatccccgttcaatatatccttcaacccggctaccaagtcaattcccacgatcgggaaatccgaccccatagaaactttatcaaaggtctgtcgcacaacaatctcattcctcgacaaacgtgttcccaaacggaactgagttgtatgaatctgatccacgatctccccgttcgggcgaacaaaatcgacatatttcgtgggaaacatctgacggtattccaaagtaaaggaattcgaaaatccttgccgccactctttctcataacgcacgtcaaatgaattaattaacgtcagtttatcattattacccctagaaaatattgaacttaatatattacccgtggtaaaagcattctcgctggctcccaactgtaacacatcatgccgaccactaatcgtgaacttcgacgtcggttgattattaaaaatatattcaacggttccgcctcctttaaattcaccatctttcgtgctatacgccccgtatccggtaagccgtacatgcttgctaaaatcactcgtagttttgactcccaactggaaacgacatccctccagcttattaaaactcatcaatttataataaggcccgaaaccaatatacttcgtgttatagtatccaagcaaggcagtctgtattatgtcatatacatttttatatagcgggacattctttatcgagtccaccatattatatatattctgttccttctcacttaactcataaggacgcacagattgccagtaattttcgtcattttgaagcacatccttattaatgatcacatcattatccagtttctgaatctcggtaggaatatcctcgttcaccttcacattcgaatagtcaatctggcggtgccccataaacgagattaacttggacgagtccttcatctgcacggtaaaatcggccaatattttatcctgtttcaaaaaccaggtggaatcgtttatcaactcgttcgtgttctcgatggccagatcccgaatccagttcacgttcaaccctttcgccattctcaaccgggcagattccaacgcccatgtcgtggagtctatatttacctccccgtcaaataccggtgttgacttccctttagggtgaaaacggatcttgtatatctttcgcccctccttctgaacactatccaccagaaaatacttgtaatacatcaacccgtgttcgctcaacgggctggcgaaattcacctcgaatatattaatgtaattatcatacaagttgacattcacatgcagatgccccgtgaactgggccagactgtaatcctcctcgatacccgaaatccgactggctttcacgatctcccttgataatttcggggaacggcgataatagtaatctgccgaagcctctgagatcatcaccggtagataagcctttcccgtgatggccgaagtgtccatatactggaaaataaaaccgaaattcttctgtaattttttattcttaaactccggtttcatgttcgcaatatccagttccatcttagtataggtggtgtaactatacgaatccttttctgccgggttatttctcttcttattctttgaaatattccgcaagatcgcgtgagccggattctctccgggttttaccttcacctcgtccaaatgagtcacgattggtaccagtttaaaatcgatcgtgttaaaagcacccttcttgaccgccactgtctgacgctcataagagacaaaagatgccatgatttcgctgacatcctcacgagtctcgatatcataattcccgtcaaaatcagtcgttacaccaatcgtagtacccacaaatacgatacttaccaatggcatcggctcccccgtttctgcatctactacttttcccctaaccttcgtcgtctgtgcctctacaacagacacccacgccaataatagtaagacaaaacacaacttcaaatatttcattacaaaaaaatttacgattttagatttacgatttcagatcaggaacaaccattcaagatgaagataataccccatcataaatcatcaatcacaaatcatacattaaaccactccttcacgcaatatgtcgtgtatgtgtaccattcctttgtaatgacgatcattatcaacaacaaccagttgagtgatgctattctgctccatcatccggtaggcattgtacgccagttcgtcctccgatattgtcttgggagattttgacatgacatcctttgccgtcaacccgtccacatcatcatatttctccatcatccgtcgcaagtcaccatccgtgataattccttccaaacgttcttcctcgtcgacgatcgccaccgcacccaaacgtcctttggacatggccaagatcacggggcgaattcccgtttctctcgtgatacaaggccgattcgttccatcgtaaacatccgaaacccgcgtgtacaaacgttttcctaaacttccgcccggatggaatctcgcaaaatccctgcttgagaaactgcgacactctaccaaacacattgctaatgcatctcccagcactaactgtgccgtagttgaatttgtcggagctaaatttaaaggacaagcctctttttccactttcgctttcagcacataaagcgagttcttagccagaaaagagtccgtatttgacaccattgccacgatattattatttccgttattccgtatcaacgggatcaaaacttttatttccggagtgtttccactcttagaaacacaaattaccacatcctcttcccggatcattcctaaatcaccatgaatagcgtccgcggcatgcataaacacagccggagttccggtggaattcatcgttgccacgatttttgtcgcgataattgcactttttccaataccagtgataatcacccgccccttattttcataaattaatctaacgaccgcctcaaaatcatcatctatgtagtttatcagattttgaatagctactgtctcatcttgaatcactttgcgcgcaaccgattttatatctaccatgactatctaattataaatattcattcaaaagtcgtccttacagcaaaaaaagaaaaaaactattgcacttatcattttttgctataactttactagggacaaaagtatcattttttatgatagctcaaaaacgagtgatgatagatttattatagaagattttgtttgtagaaacaaattaagttataaatttgcgcacccgtgtaaaaatggggtgtgtgaaaataaaaaaaacaatgggattgcaaatagatttacatgctaaactaaaagagtatttcggctttgataacttcaaagggaaccaggagcaaataataaagaacgtcctcgccgggaacaacacgtttgtactgatgccaacggggggaggaaaatctttatgttaccagttgccggccttgatacttgacggaacagcaatagtgatatcaccgctaattgctttaatgaaaaatcaggttgatgcaatgcgctcgttcagcgcatcggagggagttgcccacttcatgaattcgtctcttagcaaaagtgatattctaaaagtgaaagaagacgtgttgagtggtaaaacaaaactattatatgtagccccagagtcactgaccaaagaaagtaatattgaattcttacgaaaagtacgcatctccttctttgcggttgacgaagcacactgtatttcagaatggggacacgatttccgtaccgaatatcgtaagatcagaccgatcgtggagcaaatcgggaaagcaccaattatcgctttaacggcaactgctaccccgaaagtccaacacgatattcagaaaaacctagatatgcaggatgcccaagtgttcaaatcttcctttaaccgttccaacctctattacgaggttcgtccgaaggtagacccgacaaaagatattatcaaattcatcaaaaacaacgaaggcaaatcaggtattatctactgtctgagccgtaaaaaagtggaagaactcacggaagtcctttgcgttaacggaatcaaggctgcctcctaccacgccggcatggatgcctcggctcgtagtgccaatcaagacaaattcctaatggaagaagtcaatgtcatcgtggcaacaatcgcttttggtatgggtattgacaaaccggacgttcgattcgtcatccattatgatattccgaaaagtcttgagggatattaccaggagaccggaagagccggacgggacggaggtgaaggatattgcctgacattttacagctacaaagacatccaaaaactggaaaagttcatgcagggtaaaccgattgccgaacaggaaatcgggaaacaacttctcatggaaaccgtttcctacgcagaaacttctctttgccgcagaaaagttctattacactacttcggtgaaaactatgatgaagaaaattgcggggcctgtgacaactgcctattcccgaagaaagaattcgaaggaaaagaatacttaatcgatgccttaaatgccatccttgaagtaaaagagaaattcaaggtggaccacatggtaaatattcttctcggggaaaccgattccatgataaaatcgtatcaccatgacgaactggaatcttttggtgtcggttctgaaaagaacgtacagttctggaacatggtattcagacgcgctttaattgctaattatatagaaaaagacattgaacaatacggggtcataaaattaactgaaaagggccacgaatttttaaaagaacctaaagactttatgctgatggaagatcataactttgaagaatcagaagagaaacttcaggaaaaagggggagtatcagcactcgacaacaccttatttgccatcctgaaagatttacggaaaaagattgccaaaaagaacaatctgccaccgtacgtgattttccaagatccgtccctagaggacatgtgtaccaattacccgatcacgttggaagagctagccaacatacagggtgtaggttcaggaaaagctcaaaaatacggacaggaattcgtagaggtaatcaaacaatacgttgaagacaacgagatcgaaagagcgcaagacttggtggttaaaaccgttgccaacaaatcgaaattcaaagtatatatcattcaaaatattgaccgccaaattgatctggaagacatcgcctctgcggaaggtcttaccttcgaagaactgatcaaagaaatggaagccatcgtcttctccggaaccaaacttaacattgattactacatcaaccaaattctggatgaagaacaacaacaagaaatcatggattacttcatggaagccaagagcgacaatattggagatgcctatgatgaattcgaaggcgactactctgaagaagatcttcgtctgatgcgactaaaactacactccaaacatggaaattaaataaaaagcgaccttaggtcgctttttttattccatccgatcaatcatcacatccggcaaatgctgtataaactggaatagcaaagtttcatctccagccttatgggttcgaataaccatcgtcacccggaaagtagtcatatctcccaacttggacgactcggtagagtaagaactgatcgtatgctttttacgctttatctcgtcagtaacctccttgattacctcttgacttgttgtcgtaaatattaacaatacattcctctggctaatcttttggaaaagatatcctaaaccttccaagcctaacaaagtcaacaacattgcactgattcccagccaatattgcccggctccaactgcaagtccaatggcagaagtagcccatatcccggcagccgtggtcaaccctctcacgaataatttctggataataatagtccccgctcccaaaaaaccgataccactcaccacttgagccgcaatacgactcgggtcaagaccgatccccgtatccccaagaatatcccagaatccatatttcgacacaatcataaaaagagcgctacccaaagctaccaagaaatgagttctaaatcccgcctccttcgcccggtattcacgatccaagcctatgatagcccctaaaactccggccacaagtaatctaaagaagaaatcccatgtcatcatatccgtatctattttactcgattcttatcttcacacaaagataaaccaatctacgcaaagttgcgtatgaaagatacagtaggataaaaaaactttattaagatatggcattattactcgtaattctgtttattagcggctacattctgattgccctggaacatcagactggaattaataaaagtgccatagcactccttctagggacactgctatggactctcattccacatactgacaacgaaattattaatcacctcggagatactgccgagattttgttttacctgctcggggcaatgacaatcgtggaatggattgacacacacaacgggttcaccttgatcacggaccatatcaccacacgtaacaaacgaaaattattgtggatcattgccttgatcacttttatcatgtcttccgtacttgataacttaaccacagccattgtcatgatcatgttacttcgccgcctagttgacgagcaaagagaacgatggatattcggcagcatcgttattattgccgctaacgcgggtggagcatggaccccgatcggggacgttaccacgattatgctctggattaatgataacatcacctctctgaatattatccgtcacttattcctcccaagtctggtttcattaatcattccactaaccatcacaacctactggctacagggggaaacagaacctcaacaaacaacaagcacaaacacgctcctagccatcagtcacagagaacaaataaccatcctgatcatcggcattgccagcctcctatttgttcctgtttttaaagaattcacgaatctccctccattcatggggatcatgctagctttgggaggcgtgtggacatatacagaaattctctataatcgaaaaagaaaccttcccccagaaaagatacaccgtattccatccatacttacaaaagttgattacagtacccttctattctttttgggaatccttatggccgtcactaccttacaaatagcaggcatacttgaccaaatgtccacgttcttaaatgacaaaatacacaacgtttacctaataaacatgatcataggttttctttcctccgtgatcgacaatgttccgcttgtcgctgccgccataggaatgtatcccttgattcacacaagcggcaccttatcaccatacctcatgaatttcacgacggatggaacattttgggaactccttgcatattgtgctggaatcggtggcagcatcctaatcattggttctgcagccggagttgtcgttatgggtatggaacgtattaatttcatgtggtacatgaagcacatcacctggattgcccttctcggttatctggccggaatcggcgtatattatctacaatctcttttataattaagaaagaccgtcctaccaaacagcaagacggtctttttattttatctaaatattctttattccatatagcgaataatcgtttgttcccgatccggtcccacggacacaatcttgatcggtaccccagtctcctcttccaagaatgccaaataattattgaactcttccgggaattcgtcctctgaagtcatttttgtcatatcacatttccaacccggtaactcagtatagatcggttttactccttctgtaatatcaaacgggaaataatctacctcttctccatccacctcgtaagcaacgcaagcagaaatcgtgtcaaaagtatccagcacatcactcttcatcatgatcaactgcgtcactccattaatcatgatagcatatttcaatgccaccaagtctatccatccgcaacgacgtttacgaccagttacggctccaaactcatggcccagcttacaaagtttttcacccgtttcattttccagttccgttggaaatggtccgctacctacacgggtacaatatgctttgaagataccataaacctccccaatacgatgaggagcaactcccaatcccgtacaagccccagcacaaaccgtgttggaagaagttacgaaaggataagaaccaaaatctatatccaacatggtaccctgagccccttcggccaaaatggatttttcatcatctaataatcggttaatctcatgctcactgtccactaactcgaattgtttcagatactcgattccttccaaccactctttctccgtagttgctaaatcgtaagtaaagtttaaacttttcaatatctgttcgtgacgagctttcgcctttgcgtattttatatcgaaatcatgtagaatatcaccaacacgaacaccatttctactaattttatccgtgtatgtcggtccgatcccctttccggtagtccccactttagcatcacccttggcagcctcataagccgcatcaaggaatcgatgggtcggcaaaatcagatgtgctttcttggatatatgaagtctttttctcaaatcatgcccagacgccgccaatgcttctgcttccgctttaaacaaagcaggatcaatcacgacaccattaccgatgatattgactttatctccttgaaaaattccggatggaatggaacgaagtacatatttctgaccttcgaattcaagcgtgtgccctgcattaggccctccttgaaaacgagccacgacatcatagttcggggttaacacgtcaactacttttcccttaccttcatctccccactgtaatcccaacaatacatctactttcatctgatactatatttttatgaaacaaacgtgcaaaattaatatttatttcttacctgtcaacttacaattgctgcaaataccataaatataaagcatatgatgatgaacggtaaaatcatacttttcttccacatgttcgacgatttcctccaaccgagaatcagcgaattcctccactttcccacacactttgcatacaatatgttcgtgtttccggttattgtatgctcgttcgaattgagctatattattcccgaactgatgtttgatcaccagcttacattctaataacaaatcaatcgtattgtacaatgttgcacggctaaccctgtaatttttattcttcataaacacgtacaaggattctatatcaaagtgcccggaatgagaataaatctcatctaaaatagcgtatctctctggcgtctttcgatgccctttctgctgcaggtaagtggtaaaaatctcttttaccgtctcctttattttttccattgagtccaaagctaattctatttacaacatcgctaagttacaataattatccgaagttctatccttatttagacaaaatttaatttagacatctaaattctctacccgggaaacgttctccactcccttcagagatgcaatcttcatcattaaattattcaagtctgccgtgttatgcacgtacaaatggatcatcccctcaaaaatcccatccttggtttcaaaatgcaccgtcctcatgttcacattactctcttttgatataatcatcgtaatatcactcacgattcctatgctatcaataccatttaatttgatcacagcaaggaaagacatgatcttgtgactgacccatttcaccggaacaattttgtccccgtaactggacatcaatcggattgcctccggacatttccgtttatgtacagtaatcttatccccgtcaatcttcatgccgacaacatcgtcacccgggatcggattacagcacggagcaatgataaaatcagaagcatcatcagtaatatcattaatcactttccccttttcttcctctttgtccggtacggacttatccttatcgctcttgaagaactggagtttccaatacttgacaaatttattttctgactttttctttaaggctttacgcacctcctctatgtccaaatgccctttagcaagactcacgtatagatcatctttatgctgcaacttcaaatgcaataaagccttattcaaattttccgccccgaaaggcagtttcatatcttccagcaatttttcaaacatggtagttccgatacggatttgctcttttttctccctccggaaaaccataagtatattattccgagctttagcagtaacgataaaatcaagccaatcactctgcggtttctgtttatcgctggtcagcacctcaacctgatcgccactctgtaaccgatgactcatcgggaccaatttgtgattcaccttgccgcctatacatgaattcccgatctccgtgtgaatatcataagcaaaatctaaaacggaagctcctttcggaagtgttcgcatctccccctttggggtaaacacccggatctccttggcaaaaagattaagtttaaattcgtctaaaaattccaacgcatcagttcccggttgctccaacatctccttaatacccgccaaccacttgtccacctcgttactcgcttcagcattatcccccttgtatttccagtgtgcagccaatcccttctcggcaatctcatccatccgacgggaacgaatctgcacctctatccacttccccccgggccccataacggtaagatgtaaggcctcgtatccattagccttcgggacactgacccaatcccggattctctccggttttggactatacatatcagtaatcaacgagtaaatattccaacattgccatttctccggttgattatccttcggatcgaacacgatcctcacggcaagcaaatcatatatctcttcaaaagaaatgtgtctacgctgcatcttggaccacacagagtagacacttttcgttcgtgctgttatatcataacgatacccactctctgttaaacgctcccgaatcggagcaataaattgctgatacaaaccggtatgttcatcccggtaatcatgaattcgtttttccagttcctggtattcaaccggattctcgtacttcaaactcaaatcctctaactccgtcttaatcgcatgcaatcccatacgatgcgccaggggggcatatatatagagtgtttcactcgctatcttcacttgtttatgttccggcatggaatcaagcgttcgcatattatgcaaacggtcagcaatcttgatcaaaattacccgcacatcatctgccaacgtcagaatcatcttacgaaaactctcggcctgcttggtcgtgttagaccccataacctcactgattttcgtcaacccgtcaacaagtgaagctattttaggaccaaaaagattggctatatcctccaccgtgtaatcggtatcttccaccacatcatgcaggagtgcggctacagccgatttcgtacccaatccgatctccttcaccgcaatcttcgccacggccaagggatgcaatatataaggttcccccgatttacgtctaaccccctgatgagcttcccgggcaaattcaaatgccctacgaatcattttcacactctcctcagtcgtcccctttcgcaaagattttattaaatcatcgaaagccgtttcaatcatttcctgctcgtccataacccaaataactttagatttaagattctaaatttaagattaaaatattaatcgtaaatcacaaatcataaatcgcttaatcactaaattttacagttctatatgccgggaagtcacttccgcctgcataaatagcgctgccatcttatcaaacattccacctttctccgtggtcaagaattcaatctgccccccccgggaaagttctcgttccatctccggatgccgccacaaatagtctttcaaacttcgtgctacaatttcaccctgctggatgacggttatcccttccggaataaagcggtcaataacacttctcaacaacggataatgcgtacaagccaacacgagagtgtcaatctgcggatcagcttgtagaattgtatctatatacttctgtacaaagaaagccgcccccggagaattcatctcgttattctccacgatcggaacccacatgggacaagcctgctgcgtgaccagaaatcccctctccgaatgaattttggcaatctccaacaaatatgactccgacgccacggttcccgaagttgccaagataccgatatgcccattccctgtaaaatccgccacagcctctacgctgggacgaataactcctaacactcttcgttgagaatctatccggggcaaatcgacttgctgtattgtccgtagagctttcgccgaggccgtgttacacgccaggataaccagcttacaccccatcccgaacaactttaaaaccgcctctcgcgtgtacttgtaaacaacatcaaaagaacgagttccataaggtgtacgagcattatctcccaagtaaatataatcatactcaggcatctcttttacaatatctttcaatatcgtcaatcccccatatccggaatcaaacaccccaatcggacaagacatatgtctattatattaagtttatagctgctaatataccttttattcccaaagaatgcaaaaaaaaagccgcccaaaagggcgactttatttcattatatatataaattattgaatacctaattttttctttaccagcggtaacacatcctcactattatcagccgtatacaataatgcaccttgaccgaaattaggagttgcagcaaaaatataagtgaaaccaccttctttacctacggcttgaactgcattttgaattttagtaataattggtgctaacaaatcttcctgtgttttagccatttgttcttgagctaattgttggaagttttgaattctctctgccaatccttgaatttcttgttctttagctgtacggcttaattcagtcagtgttttagcattagcctgatattcttgcatcaatttctgataattctcatgcattgctgtcaattcttttctaatctcttgctccttagctgctaaatcatcctgagccttcttgaattccggcatac

SEQ ID NO: 10780 - DNA, 3056 bp, Unknown
  gut microbiota DNA sequence
aggggaagcaagtggtggcgttaagcgcgggaacggctgcgttacatttggggttgatacttttaggtgttggcgagggggacgaggttatttgccagagtttcacgttttcggcatcggcgaacccgattgcttatctaggggcgacgccggtgtttgtggatagcgaagtagatacctggaacatggatccggagttgttggaggaggcgattaaggatcgtctaaagaagaccggacgtttaccgaaagctattattccggtgcatttgtacgggatgccgggaaaattggacgtaattttggaagttgctaggcgttataaaattccggtattagaggattcggcagaggcattaggatcagaatataaagggaagaagtgtgggacgttcggggaatatgcggcgttgtcgtttaacgggaacaaaattatcacgacatccggtggaggggcgttggtttgcccgagcgaggaacgtgcaaagcgggcgttgttttatgccacgcaggcaagggaacaagcaccgcattaccagcacgagaagatcggttataattaccggatgagtaatatctgtgcgggaatcgggagggggcagatgttcgtgttggatgaacacgttgcccggagacgggaaattcatgatttgtacgtgaagttgttggcaggggtgaagggggtgaaggtgatgtgccaaccggaaggggaggattttaactcgaattactggttaacgtgtatcacggtggatccggaggaggccggattcacgagggaggatgttcggttggctcttgatgaggataatatagagagtcgcccgttgtggaaaccgatgcatttacagcccgtgttcaaaaatgctccattttatggaaacgggacgagtgaacggttattcgagatcggtttgtgcttgccgtcggggccgacgttgacggatgaggacgtggaaagagtggtgaaagtgatttacgatttatgattttaaattttagattgaaggactgaaagatttgtgattttggattgaatgattgagagacttgagagggtatgatgatgtgatttcctgattccgattttaaaattaagaatatttcccgggtaatgacgcccgggaatttttatttattttaaattttaaaactatgacagaattactggagacaaggttctttgctttattagcgggagaatcatttgaggagatcacgaaagaggatttggaggatgagttaggaaaatttgtagaagaggttgctggactatgtgacttgggagatgattatttgtcgacgtgccgtgcgttgaattacacgaagactcgattgcaggcattattggagatgtacaaggactgcgatggagtgggggaaaaaaggggcgtgtcggttatgctttatcgggcgaggattacaagtggttgaggatgaatggcagcttttccacgagaggatggataatccggcgaggtttttgaagaatgaggggaaggaggcgttggtgttttggcagacgaaaaatgtatcgacgaaggtgatagagctgttgattggtttcgaggctctcggggagttttattcgccgacgggaaagttactggagtttcgtgagttggtggctattgccgaacaggtttggggtatacggattaaaaattttcggcagttgaaaagcagggtgttgaaacggtataaggaaaagacggttttagaccaaatggagaggttgattgagaaattgagggaacaggagtacaagtaggttagaatttagagtgaaaagttggtaagattttagggtagtaagagtttgagatacttttgctacccttttttgttgctttgaaagtggggaatgagtactttttggagtgctggtaatcatagtgttgcggattatttcgttagacgtaactgtgacgtataacaagcggggagttgaatagctgtaatattgcattcggaaatcagcgagagttgatgagacagaagtagtattcattaaaaaaaatagttatggctttagttcgtaatgaatttggaataaaggggcgagtagggaatgtcgttttctgcaagttgaacgggaaatcttatatgaggagtgttcccgatagaattgatccaaacacgccgcaacagcaagaggtaaggtcccgttttcgggtggctgtgcgtttttaccaaaagataaaggagacacccctgaagggaattttggatctttcggcagacaaaatctgtagtagtggctacgcactttttatgaagaagaatttgaaagcgtttcgggcaaacgggaagatcggtgatttttcgcagttgcatttttctgccgggaaacgacaacaggcgtataatctgcaggggagaatggatgagcaggggatggtcacgttggattgggagaatgacgaggaggcatataattttgaggcgacagatcgtttgaatgtggtcgtgctttattcgaatcgttcatttagcccgaagttgttggagggattggaggtgttacgggtggcagaaaaagtaacttttccgttagagcgtggcaagggggtgaggatttatttgtattgtttcttcgtgtccccggatgggaaacgattctcgaattcgcaatgcattaaattgtgaacggggatgaagccgataagtggaattgttaattcgatcagcgagttgattggtcaattaacactcccgacgagggagaaaaaagagctggaaatcggattgttgaaattgattcaagaattggagagagaattaacacaggcaagagctgtcacggtgcaggaggaggtgaaggggaattggttgcagcgatcgtggcgcccgctggtgatgttgacgtttgccagtgttattttgatcggaacttttaccagtttaccgatactagcagaaacttcccggttctgggatttattggaaatcgggttgggagggtacgtggtgggaaggagcggggaaaaaatggcggaggccatttttaagataaaaggtaaaagataaaaactaaaagataagcaatttgaatt

SEQ ID NO: 10781 - DNA, 18169 bp, Unknown
  gut microbiota DNA sequence
atgggttccgtgtgtactcctgcgatgtgttctacgcagcagatagcctcggcagatgccacatgagccagagccggaccgtgaacgatgtcaccgatagcgtaaacgccttccacgttcgtgcggtagtagtcgtctactttcacacgacctctttccatttcaatattcaattcttccagaccgatgttttccacgttcggggcgatacccacggcagacaacacgatttcagcctcgtgtacttcgatctcgcctttcttgtttttgatgttcactttcaataggccttctccgctttccacgctttccacggaagatttcaccatcacgtcgataccggcttttttgaaggaacgtcccacttgtttagaaacttcctcgtcttcaagtggcaggatggtcggcatgaattcaaccagcaatactttggtccccatggcattgtagaaatatgctaattcggaaccgattgccccggagcctaccacgatcatggattccggcttgtggtcaagagttaaggcctgacggtaaccgataatccgttttccatcctgagggatattcggtagttgacgggaacgtgcgcccgtggctaaaacgatatgtcgagcctcgaaaatggtcttttctccagcagcatttgttacctctactgttttgtctgcagtcaattttccatgaccttcgatcacggtgatgttattctttttgaataagtattgaattcctttgctcatcttgtcggcaactccccggctgcgggcgatgatggcatcgaaatcgggagtggcattctcgatttttaccccgtaatctgcggcgtgatgtgcatattccagcacctgagccgatttgagcaaagatttcgtgggaatacatccccagttcaagcaaattccacccagttcggcacgttctacgacggccacggtcattcctaattgagacgcacgaatggcggccacgtatcctccgggaccactaccaattacgattaagtcgtatttcatttcttatatttttaataatgtgaataattttagtgttgaatcatcgggacacaaaattaggggatttgtttagaatagaaaataaaattacttcaaaagtcggttctattgcaaatgtctgtgtgttatatgttttatttcagaggtttatatggtcattttggtaagagttgatgttaaaattttggttttataagttgaaatagtatctttacacgcttaaaattttattagtgttgaaaatatttggtatatggagtattccgtggcgtgaattcatgtctctggttgtagatcaaaggaatatttcatgtcacttggaacataaaattggatattaatatgaaaggactaaaaattgttgttcttgctaagcaggttcccgatacgagaaatgtggggaaagatgcgatgaaagcagacggaactgtaaacagggcagctttacctgccatcttcaatcctgaggatttaaatgctttagagcaagctttaagattaaaagatacaattgaagggacgaccgttcatgtgctgacgatggggcccggccgtgctgccgagatcatccgtgaggctatgtaccggggtgcagatggaggttatttattgtctgatcgtgcttttgccggttcggatacgttggcaacttcttacgctttgtcttgtgcattacgtaatttggaatatgatctgatcatttgcggtcgtcaggctattgacggggataccgctcaggtggggccgcaggtagcagagaaattggctttaccgcaggtcacttatgcagaagaaattcaaggctgtgacgggaagatcgtgacgatcaaacgccgtttggaaagaggtattgaagtggtgacttgcccgatgccttgcgtggtaaccgtgaacggttctgccgcagcttgtcgtccgagaaatgcacgtttcgtgatgaaatacaaaaatgcgaaaggaactcaagaggctcaggatgctaacgaggattattttgcactggtgaacgaacgcccgtatttgaaattgaccgaatggagcgtgaacgatattcagagtaacccggaagatctcggtttgagcggatcaccaaccaaggtgaagaatatcgagagtgtggtattccaagctaaagaggccaaagtacttaccggcacggatgctgaattggatgccatgatgaaagagttgataacgaaccatacaatcgggtaattttagattttaaattgtaaattttaaattgaagagtattaaaacgaggcaatttgaatttatagaatctaaaatctaaaatctaaaattttaaatgatatgaacagtgtatttgtatattgcgaaatagaagagggaacggttgccgacgtgagtctcgaattattgaccaaaggacgtgcccttgcaacaaaacttggcgtgaagttggaggctatcgctttaggcgaaggattgaaaaatattgaaaaacaagtattcccttatggtgtggacgtgctttgggttggtgacgatgctcgactggctccttacacgacgttacctcacacgaaaatgttggtacgtttgtttgacgccgagaaaccacaggtggctttgatgggagctaccagcgtgggacgtgatttaggacctcgtgtgtcttctgcgttacatagcggtttgacggcagactgtacgagtcttgaaattggtgaatataccgacgccaagagcgggaaaaaatacgagaatttgttataccagattcgtccggcctttggaggaaacatcgtggccacgatcgtgaacccggaatgtcgtccgcagatggccacggttcgcgagggtgtgatgaagaaagaaatcttcaatcttcaacatcagggagaagtgaagaaattgaacgtggacgagtatctggatgataccgacttggtggtaaaggtgatcgagcgtcacatggagaaatccaaagtgaatattaaggctgctccgatcattgttgccggtgggtacggagtaggttccaaggagaactttaacttattatacgagctggccgctgttttaggcggggaagtgggtgcttctcgtgccgctgttgatgccgggttctgcgaacatgaacgtcagatcggacagacaggaacaacggttcgtcctaaattatatattgcttgcggtatttccgggcagattcagcatacagccggaatggaagagtcttctatggtaattgctattaacacggatgcaaacgctccgattaataaatttgccgattacgtgatcacgggagacttgaacgtggttatccccaagatgatccagtactataagaagaacagcaagtagacaattgtaaattttagattgtaaattttaaattgaaatggaggcgtcgggaaatacaatctaaaatctaaaatttaaaatttaaaatggaataaggtatggcaaatttctatacagataacgaggatttaaagttccacttgggacatcccttgatgaagaaaattgttgctttgaaagagcgcaatttcgaggatgcaggaaaatgcgagatcgcaccgcgtgatttcgaggatgcaatggataattatgatagagtgttggagatcgtgggagatatttgtggtaacgtgctggctgaaaatgcagagggcgtggatcacgagggaccggaagtaattgacggtcgggtaaaatatgctgctggaactcaacaaaatcatgatatgctggctcaggccggattgtacggtatgtcattaccgcgtgagtatgacgggttgaacttcccgatggtaccttacgtgatggcggcagagttggtttcccgtggagatggcggttttgctaacatttggggattacaggattgtgctgaaacgattcacgagttcgccagtgaggagcaaaaacgtcaatacttacctcgtgccgctaaaggcgatacttacgcgatggacttgaccgagccggatgccgggtcggatttgcagtccgtacagttgaaagctacctactgcgagaaagacgggaaatggtatttgaatggtgtgaaacgtttcatcacgaatggtgatgctcatatttcattggtacttgcccgttctgaagaaggtactcatgacggacgcggtttgtccatgtttatctatgacaaggctaacggtggaatgaccgttcgtcgtatcgagaataaattgggtatcaaaggttccccgacttgcgagttggtgttcaaggatgccccggctgaattagtgggagagcgtaaacttggattgatcaagtacgtgatgtctttgatgaatggtgcccgtttgggtgttggtgctcaatctgtgggtattgctgaagccgcttaccgtgaaggtttgaaatatgctcaggaaagacgtcagttcggtaaagcaattatcgaattcccggctgtatacgagatgttgactaacatggaggctaaattacaagcttctcgttctgttctttacgagaccagccgtttcgttgatatgtacaaggcttacacgcacatcgctaacgagcgtacattaaataaagaagagcgcgaggagatgaagaaataccagaagttggctgatatcttcaccccgctattgaaattgttctccagcgagtacgcgaacgagattgcttatgatgcgttgcagattcacggaggttccggattcatgaaggattacccgatcgagcgtctggtgcgtgatgcgcgtatcacgaatatttacgaaggaacttctcagttgcaggtcgtggctgctattcgcggtgtgaccacgggacaattcttgaaacaaatccgtgaagaatacgaacaagcctctatccgtccggaacaagaatatgttcgtgagatattgaaaggcatgaccggagcgttcgaggctgccgtgacaaaagtaacagctgtcggggagacggaatacgtggatttccatgctcgtcgtttggttgaaatggcagggtatattattttaggttacttgctgttgttagattctcaacgttgtgatcgttttgctaaatctgccgagatattcgtgaaatacggtcagtcaaaggttgccggatatgcagcatttatcaatgacttcgaattgaaggatttgggaatgtataagaaataatatgatcgaagtatgatcatggaaaagggaggctttaagacctccctttttattttgctttttttatttcaattggtttgtaacttgctctttccttgcgatccgtggtggctgcacaactgatacctcgttctttcatggctttattttttccgatatgggtatccggaaatttctttttcttgctgaaaaaggtcgaaattcccagtcctaagaaagccaggccgataattacggctataataataaaatagattcctatcataactgtttatttatatatacaaatatacccatattatttcgctttcccaaggaaataaacgggattctcgatgaaggtattttaaagataaccaatgaattgtaatgttaatgataaagggaatgtttgattcggaatgagaaagaaagaggtgtaaatgcatttttatatggtgtttggtgatgtcttttatatgtaaaaacgagaatcgataaaaaaaaagattaaaaaaggctatttattactttgttttttctacatttgaggtgcgaagtcaaataaaattgagaaacaatggaaggatacgaacaaaacgacggaatggatacgaacgatagagatgaaatctattccaatgcagtgaaagcagggaaaagaacttatttttttgatgtgaaggcgactcgtaataatgattactatttgacgatcaccgagagcaagaaaaaatttgataataatggtaatccaagctacgagaaacataaagtgttcttgtataaagaagactttgacaagtttgtcgaaggcttagaagaggctattggcgtggtaaaagctgcaatcaatggcgaacttccggaaaagaatactgacctgtaaatagtactgtaataaaatattgaagcgggatacacgatgagtgggtcccgctttttgtatgaactcccttttatgttttttctccactgaatttttgagtatctttgtgtggacagaaagaagagaaacatggagaataagccgttggcagagcgaatgagaccgaagtctttagaagactatatcgggcagcaacatctggtaggaccgggcaaggtgctacgaaagatgattgattcgggagttgtgtcttcctttattttatgggggcctccgggagtcgggaaaacgacattggcgatgattatcgcggaacagttgaaacgtccgttttacgtgttgagtgccgtgagttccggggtaaaagatgtgcgtgaagtgattcagaaagccgagggacaacgattttttaacacgccgaatcctattctgtttatcgatgaaatccatcgattctccaaagcccagcaggattctttgttggcagccgttgagaaaggtaccgtgacgcttatcggggccacgactgaaaatccttccttcgaggtgatttccccgcttttatcgcgttgtcaggtgtacgtgttaaagtctcaagagaaaaaggatctcgaggacttgatagaccgtgccgtgaccaaggattattatttgagtaagcgtaatatcacggtgaaggagaaagaggccatgatttcttatagtggcggtgatgcccggaaattgttgaatatcttggaattggtggtgaatggattgggagagggggatattgtgattgataacgagacggtgcatcgggagttacatgagaatccgttgatgtatgataaggacggggaacagcattatgatattgtttctgcgatgatcaaatccatccggggaggggacccgaacgcggcggtttattggatggctcgtatgttgcaagggggagaggacccgaagtttatagcccgtcgtttgattatttccgcggcggaggatattggattggcgaacccgaatgcaattttgatagcgaatacttgctttgaagtcgtgcataaaatcggtatgccggaagcccggattcctttgtcggaatgtgtgatttatttggcgacttcgccgaagagtaattccgcttacctggctattgatgcggctattgctaccgtgaaacagaccggaaattctccggtgccgttacatttacgtaatgccccgacgaagttgatgaaagatttgaattacgggctggattacaagtacccgcatgattatccgggaaatttcgtggaacagccgtatttgccggaagagttgaaaaataaaaagttctaccagcctcaacagaatgcacaagaggtaaagattttggagcgtctgaaggcttggtggaggaagtacaggggatgataatttagcatgtggaatttaaaatgaaatcataaatctaaaattatagcatggataagttgattaatcagaagatgttttttttgttggccggaccttgcgtgatcgagggagaggatatggctttaaatatcgcggaacacgtgaagaaggttacggatcgcttgggaatcccgtacgtgttcaaggggtcgttcaagaaggccaaccgttcgcgtctggattctttcacgggaatcggggacgagaaagcattgaagatattggctaaggtgagagccgaattcggcattccggtggtcacggatattcacacggaacgggacgcagagatggctgccgagtacgtggatgtgttacagatcccggctttcttatgtcgccagaccgatttgctggtggcagccgctagaacgggaaagatcgtgaatatcaagaagggacagttcctttctcccgatgccatgaaatttgccgtggataaggtgagagaatccggggatgacaaagtgatggttacagaacggggaacgacattcgggtatcaggatttgatcgtggactaccgcgggatcagtatcatgcaacaggcttgccagtgtccggtggttgtggatgtgacacattctttgcaacaaccgaatcaagcttccggggtaaccgggggacagccggcattaattgaaacgattgctaaggccggaattgccgtgggtgctgatggtatttttattgaaactcatgcggatcctcgttgtgcgaaatcggatggagcaaatatgttacgtctggatttaatcgaaggattactggaaaaactggttcgcatcagagaggcgataagatagtttataaaattataaggttcataaagtttataaggtaatcttcacgttataaactttatgaactttaccgataattattattcagtaggtttaatgtcctgcatttgtcatataaaccacgttttgtttcttttctgtattacattcgtaactcccgttttaaccatacggccatcacgggatcgggaataattacttggcgtttttctatttctacaagttctttctttaccaaggctcgttttacggtgctaacattagccgacgagccgagttggtacttatgcaaaatctcctgtgtggtaaactcactatgaactccatctatgattgctcgtaaaaaattcatctgataagttgtaagactctcggtctgcttttcgaacagcggtgtgttttgatcgataatatcttgatatgctgtctcgaaatcttgttccgtggcaattttgtccgtatgaatccatactaaccatgccaactgctgcacgtatgaagaatgattatctactatttggcagattttttcggctaacttttctgaaattcgtttgcctgtggcttcgaaacgcctgcatatatagtctatccagtctcgtgtctcgatttttgacaaatagatagcgtccccgaatttatagaaggggaggctctttttttcgaagagttcattcatcaaatgctttttgctgccgaacagacaatacgataccgacttttgtaattgccaaatcgagcgtaatcgcttttggaaagttttagaatctttaaactcggcaatctgctggaattcgtcgatacaaacaacgatattgcaaccttttttctgcgctattttttcagggagctgcaagatttcatcgatattgttgctcttgggatttatttcaagtgatatggaaaaatccgtcatcggatctgtacccatcgaaattttaggactgatacgggaaaggaacaatttagcgtgctcgagccattcatccaattttgaagatgtctgtttgagaatagcggaagcgaatgcttcataaaaatcactatcactgcgacaagaaaaaatgtcgagatagacaatttttaatttatctgattgtgccaaactgcacgctttctgtaccaaagaagttttcccccagcggcgaggtgagattagcaccgtatttacaccatgctgaaaattcaataccaagcgcaacgtttctttttctcggtccgtgaaattgtcgcctgatgttgcaactccaaatataaaaggcttattttccataattcttcggatatgattcaaacgtaaagataagtaatacttttatgactaacaacattgttactaataaaagtattacttatcttatgccttttaactcttactcttccacgtatatttccaggacttgggtaatgtcgtccgggtatagcgtgagatttttaaagcaagcgggaacgagaacggtttcccctttgttgaccaataccggttcacattccccggttgtgatggtgaatttgccttgcaggcacatatagatgacaaatgaatcgaggtgaacgtactctttctctatgtcccggtcaaatacgagtaaatttgtggtaaaataggggcatttcacgagttttgcggattgattatcctgtggggtatagtttacccggtgttgtggttgatagctgtaatcgatcacgtcggtggctaaatccgtgtgtagttcacgggtgttcccgttggcatctttccggttatagtcataaattcggtacgtgatgtcggaagtttgttgaatctctgcaatcaagcatcctttcccgatagcgtgtaccagtccggcgggaataaagaagctttctccttttttcactttctggacattcaatagatccataagtttgttttggtgtaatgcttgaagataggtcgccttgtcaatttcatggttgaatcccaacacaagagaggcatctttatccgcatcaacgatataccacatttcggttttaccgtaagcattatgacgttcttttgccgtttcgtcatccgggtgaacctggatggacaggtcgtcgtttgcgtcaatgtatttaattaatagagggaattcgacaccgaatttctcgtatatatgatccccgacaaggtcccccatgtacacttcgattagctcttgcaaatcattgtctgcaaggattccgtttgaaaccacagagatgttgtcttctacggctgatatttcccaactttcaccaatggattcgtcgtgttctttacttttataagctagtctctcacctccccatatcttttttttgagaattggatggaattttaacgggtataacatgatttattattttgttaggcataattattgtactaagaacaaagataggaattttgtgaatgggggattataatttatggattaattttgtgcatagaattacgattaatgatataaaaacggagtgaaatgaagaaattaggaatgttaagtctcatcgtggggagcttgtggttgggcgcttgtagtgacgatgataaagattttatgttggatgtcaatcgaatgacaggtgttgattggtattacaatagaaccacgagtaagaattatttgtctttctcggatgaaaacgtgctggaaataaatcgttttgataaaagtggggaaataaagggtattgatctgagaggtgtgattgattctgtggccggaacgtggagggatgaaggggagaatatacttgccgtggattggaagaatgggaattccgagacgtggatggtggagaattgtacgtccaagaagttagtagtgaataatggatggggagaacgtgagtatatcacgaaaccatcttaccttgaaaacttgactggcgacgctttttgggtaaataagtttgtagatggtgtgagtaaaccccaacttggtttccggatttcaaatgaccggagtatgcggcaggggtttgtgcttgctttgttatcggatgatgagtctgtaaaactgaaaaattataataatgtttggaaaggagagactgatattagccgagtagaagatcgaagaatacgtttttcctgccgtattggctctgattacgtgaaatttgatgaatttatcacggcagataatttcgcatccatgcgattgacagatattgattttacttcatcaataaaggctgggtatcctaatcagctggaaatcgaatggaataagtttgagggtgaaaacgtgtattataagatggaggtgtattcaaaggataatgaagctgatgtgtattttgagagtggattattcccttatgataatggtaaatatacccttaacgggagcactatcgggaaaattaataaattgaataaaattgattcaaagaaagagtatacccttcgtttgactgcggttatgttggaacccggtgtagcctcgaatagtgtgatcgcggagagtcgtattcaggctgtcgtgtatgtcacggataaatgcttgcttggtagataacaggctgggattattctataaggaagtttctaattgcttgagctagtttttccggttgttcgctatgaatccaatgaccacattgtgggagttcgataaggcgggcagccggaaattctttttgcaggcatcctgttcccgtgatgagattggattgttctcctttaataaataggatttctttgtcatacgtgttgttggggagtgaggacgggcaaccgctgatctcgtcaaaatgtttgctgattactcggtggttgattttccactcgaaaccggaagatgtctttttgatgtttttcaaaaacaattgttgagaacgttccgttctgaaatgttgttgaatggcttccttgacttcttctcggctatgtaatcgggaaagatcgaagtttgccatgaaatcgataatccggttatgacttcccccgtctcgttgagaataggatacgggggcaatatccacgaccacggctttattcacaagttcaggccttttaagtaataaagccatcactatcttgccacccatggagtgtcccacgatatggggctgtacggggagttttaagtcttcaacgagttcaatgacatcattactcattacctcgtaattcatggcctcatcatggggcgattgaccgtgattacgggcatccggtaaaatgacttggaatttatcttctagtaaatgggcaataggaagccaattttcggaagctccccatagtccgtgaagtataattaaaggtgttccctctccaatggtacgaaagaataatttcatattaactcggtgtgttttgtggtacaaatttacaaatagagaataaataatgatagtacagtgcaaaaaaagaccgctataaagcggtctttttcatattacacgaagtaaaattagtctttcaatttagctttcaagaactctctgttcaaacgagcgatgtgttcgatagagatgcttttcggacattctgattcgcaggctcccgtgttggtacagttaccgaatccgagttcatccattttagctaccatggctttagcacgacgtgcggcttcgatttttccttgcgggagaagagccaactgagaaactttagcagccacgaaaagcatagctgaagagttcttacaagttgcggcacaagctccacaaccgatacaagcagcagcatccatagcttcgtcggcatccggcttagcgattggaattgcattaccgtcaggtactccacccgtgtttactgaaacgtatccaccggcttgcagaatcttctcgtaagcaccacggtctacgatcaagtctttaattaccgggaaagccccgcaacgccacggctcgatcgtgatggttgccccatcttcgaaacgacgcatgtgtaattgacaagtggtcacgtcatcatccggtccgtgggcacgtccatcgatgaataaactacaggttccacagataccctcgcgacagtcgtgatcgaaagccaccggttctttgttctcgctaaccagttgttcattcagaatgtcaagcatttcaaggaatgagctaccggttgaaatatcatgaatcttgtaagtttcaaacccaccttttgattttgcatctttttgacgccagatctttagggttagttcttttaatattttatctgccataacgatttttcatttaagattatttataagaacgttgagctacctgaatgttttcaaatacaagctcttccttgtgtaattcaggctctttgttgtctcccttgtattcccaaacggaaacatactggtagtgctcgtcatcacgttttgcttcaccttcctcggtaactgattccaaacggaagtgacctccacaggattcgttacgattcaaggcatccaatgccatcaggtgtgcgatgtcgatgaagtctgccacacgtccggctttttcaagctcgttgttcatggcggtaaactctccggttacgcgcaaatccttgtaaaattcttctttcaactcagcaattaatttgattgcttttttcaaaccctcagcctcgcgagccattccgatgtaatcccacatgatgtgtcccaacattttgtggaagtgatccggtgatttcgtacccttgatgtcatacaatctacgcaagtggtcggtaacgttcttttcagcagcatcgaactccggcgtgtttgttttgattttcggggtctgaatatcgtgtgcgagataatctccaatcgtgtacggcagaacgaaatatccgtcagccaaaccttgcatcaaagcagatgctcccaagcggttagcaccgtggtcagagaagttacattctccgatagcgtacaatcccgggatggttgtcatcaagttgtagtcaacccaaagacctcccatagagtagtggattgccgggtaaatcatcatcggattgtggtacgggtcaacagcagtgatcttttcgtacatctggaacaagtttccgtaacgttcctcgattacgtgtcttcccaaacggtcgatagcgtatttgaaatccaggaacacggctttaccggtgttgtttactccgaatccggcgtcgcatctttctttagcggcacgggatgccacgtcacgcggaaccaagtttccgaatgccgggtaacggcgctccaagtagaagtcacgatcttcgtccgggatgtcgttcgggtttaacgtaccggcttgtaatttcttggcatcttccaattttttcggaacccaaacacgtccgtcattacgtaatgattcggacatcaaagtcaacttactttgttggtctccgtgtaccggaatacaagttgggtggatctgcacgaaacaaggatttccgaacatggcaccgcgtttgtaagcttgccaagcggcactaccgttacatcccatcgcgttggttgacaagaagaacacgttaccgtatcctccggtagccagaaccacggcatgagctccgaaacgttcgatctttccggtaactaagttacgggcaataacacctcttgcttttccatctacgataacgatatccaatacttcgtgacgggtatatgatttgattttacctttttcaatctgacggttcatggccccgtagcatcctaacaacaattgttgtccggtctgaccgcgggcgtagaacgtacggcttaccaatgctccaccgaaagaacggttatccaaaagaccgccgtaatcacgagcaaacggtacaccttgagcgacacactggtcgatgatggcgttacttacctctgccaaacgatacacgttagcctcacgagcacggtagtcaccacctttaatagtttcataaaatagcctgtatacagagtcgttatcattcgtgtagttcttagcggcgttgatacctccttgtgcagcgatagagtgtgcacgacggggagagtcctgatagcagaatgtggttacattgtatcctaattcagcaagactggcagcagccgatccaccggcaagtccggtacccacgatgataacatcaagttttcttttattagcaggactcacaacattgatatgggctttgtgattcgaccatttctgggctagcgggcctgctggtattttagcgtttaattctgtcataaccttagtaattttagattttaaattttaaattttaaatttagatcgttgatttatgcaatttaaaatctacaatctataaatttaaaattgttgttagtttgccagtccaagcatgaaataaagcggaatgatgctaaagcctgcagcaatgatgaaagcgaagattttagccaggcattccagtctttttctccaaatttggttacagaaaccgatagattggaaagctgaccagaaaccgtgggtcaagtgtaatcccaagaaaatgcctcccaagatgtaaagcaaacagtagatgatgcttgatttaaatagtccggaaaccaaagcataggtattttccatggcagtaccgtccacgttgatctcggttaaaagaggatctccggcaaacttgattttccaccagaagttccaaaggtgaacaagcaagaagatcaaaaccaaacctcccaagatgtacatgtttctggatgaccatgtacaatttcctgattgtctgcgaagatcgtacttgataggacgtgcgcctctgttttgaagagtcaagatagaagccaagatgatatggataatgaatcctatggcaagaatcggttctacgattttaatgataggattcgtagccatgaaatgggccccgatgttaaataactctccactattatctacaatcaaaagtagattcagtgctaagtggacgcacaaaaacgcaataagaaaaaggcctgataaactcagaatgatctttttcccgatcgacgatgttaagaaattactcataattaggtctatttattgataactatttaaattctttatccggcacaaaagtatctatttttccgtcattttaaacgggtttatctattttaaaatcattctaaatatacagaattttttccgtaatgaaataagttatcaaggtttataaagtttataaggttcataaagtatttacagtgttttatcccttgtacacgatgatttacaataaatgtgccaaggggtctttgggttatgcgaatacttgaaatattactttataaactctatttcaaaattgctttataaatgacctcttgaatttttgtacggatattgtctttgataagtttgtcgttgaattcgttggggtaaatccggttggatagaaagatgtagattaattggttgtccggatcgttccatgcgatggctcctgtgaatcccgtgtgtccgtaactggaacaaggggcttccttgcaggtcgggcctgatttgttgggcaaggtttccggtttgtcgaatccgagaccccgtctgttttggtcgagaggtaagtgtgtttgagtgaaaaggtcgatagtcgtagaatcaatgagacgttctcccccgtatgtcccgcggttcaagtaaacactcatgattttggctaggtcttctgccgtggagaacaaaccggcattaccggacactccgcccatgagtgccgcgatcgggtcatgcacgtacccgtgtaattgggattttctgaaaatatcatctttattggcgggaaccactcttttcatgtcgagattaaaatgagcgttgaagtccgtgttataggctcccagtcttttaaagaaatgtttccggcaataaacatcaaaaggtgtggcggattgttcttccacgatgtcttttaatagtacgaatccaaggtcgctgtaagtgtattttttctggggtagcagtttggagtttaaaatcaaattgtgaatggagtcttggaaatgcttgtgaatatagaaatgcggggaaacgaccaagtagccttcgccccccgtgaaattaaacgtgctgtcccggtaggtgaatttgggattcaggtacagtcgatcccggagtttacgggtattggttttcgtgtattttgtcgtgaacaaccggccttgcattttatcccagtcaatggcgtgctggaagaaagaaaatgatgcccttaatccggctgaatgtaataacaattccttgacagtaatatcttgcttgtcggtttcccgaagagaataagaataccggacaataggggagtcgagtgctatatattgctggtcataaagcatcatgactgccggaagagtcgccgctattttcgtgatggaggcgatgtcgtatatgttgtcggtcgtatttttcttttttttgtcataagtgttgaaaccaaaggctttgttgtagacaacataaccatcttttgccacgagaacctgacagccaggagtcgcttttgcttttatggcggcttggcatatgctgtcaattttaaggaggagctgtgaatccataccgcaactttccggttggtagtatcctaaccgcagtttcggggtggataacccggtacctgcggggtaatagtggttaatactcacgggcaatttcccgttcacgttgatgcccccgaagatggcttgggcggcaaactgttgcgcgggagtgtcatgtgagtagctcacgatgatggcatccatgggaaggtaactgtacaagtcgatcccgtaaggcgtggccgggtggcagaacacaacatgtttccctttcagttgtttgataatgttgacaagttccatggtggccccgaattgccgggatgccgtgttgcgggcggcactgttgtacaggataacgcaattgtattttgatagacttttgatcagttgttccactttttcttttgaggatccgggagatagagaaaagtgggcacaaggggcatatttttccaat

SEQ ID NO: 10782 - DNA, 4585 bp, Unknown
  gut microbiota DNA sequence
catgtgaatagctcacgatgatggcatccatggggaggtagctgtacaagtcaattccgtaaggcgtggccgggtggcagaacacgatgtgttttcctttcagtagcttaataacattaacaagttccatggtcgccccgaattgccgggatgccgtgttacgggcagcactgttatacaggataacacaattgtatttcgatagattgttaatcagtttctccactttttcttttgaggcaccgggtgatagagaaaagtgagcgcaaggggcgtatttctctagtgtactctcgaaaacgggggctttccggtctccaaaattcaatgaggcaatgcgtagcgtgtctaaatgtgtcaacgggagcaggaggccgtcatttttcacgagagtaattgctttggcgtatgtttcttgtaataaagctttggctgatggggaactcaatcgttcggtcagccgggcggtgtccacggcagcagcatacgggagtacgaattctgcttttgcttcaagtacttttcggcatttttcgtcgatcatctcttccgtgagaacacctttgcggatagctgctttgatttttttcacggaggcttccacgttttccgggaataacagaatatcgtttcctgctgctagcgcctctacatcagcctctccgggagttcttcctttggtgacacctttcatgttcatggcatccgtgaaacacagaccgtcaaagtgtaatttcttgcgtagcagatccgtgatgatctgtttggatagagaagccgggatattggttgtatcgtaggaaggtacgtttagatgggcaatcatgacgcccggtatcccagcctcgaaaagttgacggaaggggtacaattcaaccgtgtcaatacgtgccgcagagtggcgaatcaaggggagtgtcaagtgtgaatcaacgtctgtgtccccgtgtcccgggaaatgtttagccacggccatcacgtgctgggattgcaagcctcgcatatattgaagggtacggttgccgacttcttctttcttttccccgaatgaccggatgccgatgaccgggtttttggggttaacgttaatatcggccacgggtgcaaaattcacgtgaatgcccattgcccggcattgctgtccgatggctgctcccagacggtaaatgaggttcgtgtctcgaatggctcccaacaaggtctggttgggaaattccatggcgggcttaatccgccagccgactccgttttctgcatccatgccgattatgagaggaatttttgcactccgttggtacttatttgtcattagagcttgtcttagtggactgccttgaaaaaagataattcccccgatatgatacttttcaatggttgttcccaggtgattctcgtacacgctgtctttgttgctataggcggccaccatgatcaactgtccgattttttcatccagattcatggtatttaatgtcgaatcggcccatgaggactgagcttgaccgtggagtgagggtaggagcatgcagaatagtccgattgcggaaaggagcttgtgcatggtagttatgagttttaacgttagaggttggttaaaaaaagtgcggcaaacatgaatagattgccgcacttgtatcaatagattggatattatttcaataattcagcaatcttttgttttaattcatcacctcttaaatttttagcaatgattttgttattttcgtccaataatactgtgtgaggaattccgcttacactgtataattgtgcaggagctgattgccagcctttcaaatcagaaccgtgtttccataccaaaccgtcatcagcgatagcttttacccaagcctctttgttgttatccaaagatacaccgaagatttccaatcctttcgggtggtattctttgtagatttcaactacatgaggattttcaccgcggcaaggaccacaccatgaagcccaaaaatcgattaatttcactttacccttgatgtcatacaaagagattgattctccttccggggttgtgatcgtgaagttcggagcgatttggccaatagctgtgctttctaatttagcgatttgagcagcaatagctttaccttgtgcgctagcttttgctttttcacccagtaagttatatctttctttcaactgctcgtattccatttgtcccatgccggatacgataacgaaagttgaaacataagaatccgggttagctttgattaattcagtttctttagcttgagcatctgtcattaatttagcgtaagcttcttgtacagcctgcattttagcctgatctccattagctgcttgatattcttgttgtaatttcatggcctcttgttgagttgtcgtgttgatagccatgaattggtcatatattttttgaccttcgctaccagtaacagttaatcctgcctgtccagcattgactgtaatatttgcattttctaacatgaatggaatagctcctctctgaccgataaccatgatataagcaccggtaggttcacttacgtttccggtaaattcaaatgaaccgttcttcacgtcagcttttgctaatgtgtcaaggctactgccattaacagttgcgataatagccttaccatccggcattccttctaccgttccggtaactttgtaaccactttgggcgttacatgctgcaagggtcatacttgctgcaacgattgataataaaagttttctcatgtgtttttagttttctaaatatgaaatattgtgtctttaatgaatcttagctttcatgaaccagatctccttaaaggcaatgtttattcttaattttgcgtatttctctaaaatttgattatttcggtgagttccgcgcatacctaaatcaacggcaacccccaacatcaactcttgtcgggctagacgaagaggcatttgggtgccgacggttaggccataagtgttaatgtctgtgtaattgaatttgagttgagagcgagtaaaataagctccagcagtatatttattcctttgccaccaataacgcccagactcgttgggttgtaatgaccctccaatggctgctttatggtagtcttggaattcctgattcgttccgaattcttcgtaagctgacattttctgaaatgtgtaatctcctgcaaatatccattttttattgtattgataggaggctccaacaatcattctgaaaggaaaaaatacctctccattgtcccagctttcgtcgttaacatttatgatggcaccgcttgtattactaattttattggcaacaaaagttctatttccatgcaatgatgtaccaaaattaaaactacctccaagcgttagttctgatttttttgttaatggtaagggtaattgaaagcctaatgtaaacaaactactattgatgcgagttaaggtttgtgatttaagatagtatccacttgtggctggttgcatcacaagagttagacggtcttcaactttgccgaatacataagaggcatttacccccactgataatcggccaaattggtaagccactcctaaataggcttcgttcaatccacccaatccctctaattgctgtacataaaacatggtaggatcctcgattaaaggataggaatagatcaaatcgaatccccggtctgatctctgtactaagcccagcgaaacgaatgtttttttatatactcggaatgccatgtttagcgaggcattttgagccactttatagttggaatgatctttataagtagaaacatcgacgtactctcctgtgactcccatttggaaatagaatctcattgaatctaatgccgtgtaagatgccgggtttaagaagttgatattataattatccctcatggcagcagaaactccacccattccagtataggctccataattatcgggtaataatccaactccgaatttggaatagggggtacccatattgttttgtccccatgctccgagggtaaaaagtaatattgcaatgcttgtaaatatttttttcatactcattgttataaacggcaataattttttactaatagtttgcgtaataaattcgtaataccggggtcttgtcaacgataagtctttggaacgtgagattgtttgctcccacgaatgtattgatttcatcgacgccgacttgtacagggctacctgctaaaccgattagtaaattaagttccggatcaatacctccggtcccattacttaccatactgttataataatccgtgatgtctattctatatttccggtcttccttgtagttcgggtttgcttcgagatacccgaataccgaattaccagataaatcggtcagtttaccggagattctggagtatttatctaaagtgaatacttggatagttgtaggttccgggatgtcttcaaaattatcgatttggggctccagaacaatttctacctttaagattgttcggtagggattcacatccgatttgaagggtaatttcatctttaacatatacccgttttgaccttgaataacagctttgttttcttgagaatatggtaaaggattgttccacgaaacattgct

SEQ ID NO: 10783 - DNA, 7601 bp, Unknown
  gut microbiota DNA sequence
gcaaagccaacaaagtcgttaatgttccggctcccacgatcaagggaaatactaacggtacaatagatgccgttcctgatggactgtcatttttgaaaatagggattccgaagatcatttctactgccagtacgaagatcacgagagaaccggccacggcaaacgaggaaatgtccacgctgaacaagttgagcaagccatccccgacgaaaaggaatgccacgagaagaatatatgatgccaaagcggcttttatggcactaattttgtgtcctttattttgaatatcgttaatgataggcacggctcccgtgatgtcaattacggcaaacaggaccatgaatgcactcgcaagttcttgtatactaatgtctgaaaaactcatatcaaaaagattggtttattcttgattaaaggttatttttgcctacaaagatacagaaacaagaggtgttatcaaaatgaatgaaaatagaaaagttatggcgtatacgaaactaattgttgagaaacaggataatatttgcacggttaaaattaataacccggaagcgttgaatgctttgaattcgacgattttgaaagaattggatgctgctttcacggctatcggggaggatgacagtattgatgttgttattctgacgggtgaaggacgctcgttcgtggcgggtgcggatatatcccagatgagtacgttgaatgcggtggaggggaaagtgtttggagagctgggagcggctgttttccgtaaaatcgaattgttgaacaaggtggttattgccggggtgaatggttttgccctgggtggagggtgtgaattagccatggcttgtgacatccgtattgcttcggtgaaggctaaattcggtcaaccggaagtcggattgggaattaccccgggattctccggtacgcaacggttgccgcgtatcgtgggattgggtaaggcaaaagaactgatctacacggctgacgtgattgttgccgaggaggcgtatcgtatcgggttggtgaacaaggtggtggaaccggaagcactgatggatgaatgtatggctatggcgaagaagattgcttcgaaagctccgctggctgtacgttacgcgaaagaagcgatcaaccggggagtagagacggatattgacacgggtatttctatcgaaagtgatttgttcggactctgtttttcaaccgaggatcagaaagaaggaatgcaggcatttctaggcaaaagaggagcggaattcaagaaaagataaaagctgaaaaagctggcgtttgtacgataatagagaatttgatattatataattgaaggttttaaattaagaggaaatgaaaatttgcgttgtaggtacaggtacgatgggtaatggtattgcccaaacctttgctcaggccgggcatgacgtgttgttaaaaggtcgttcagaggcgtctttaggtaaagctcacaaggctatcgagaagagcctttccaagctggtagaaaaaggcaagatggaagctgccgagaaagatgctatcaatgcccgcatcaaagacacgatggcatacgaggattgtaaggatgccgatttagtgatcgaggtggttgccgaggatatggctacgaagaacgagatattcaagactttggatgctatttgtaaaccggaggcaatcctggctacgaatacttcttctctttctatcacggaaatcgctgccgcaaccagccgtccggagaaagtgatcggaatgcacttctttaacccggtaccgatgatgaaattggtagaggtgattaaagggcagttgacttctcaagaagttcacgacaaggtgatggcaatcgctgcagaagtgggtaagactccggtaagcgtgaacgaggctcccggattcgtggtaaatagaatcttgatcccgatggtgaacgagggtatcggtatctatgcagacggtgttgctaccaaggaagagattgacgaggctatgaaattaggggctaaccatccgatgggacctttggcgttaggtgacttgatcggtttggacgtgtgtctggctatcatggaggtgctgtataatgaattcggtgattccaagtatcgtcctcacccgctgttacggaaaatggttcgtgctaacttgttaggacgtaagaccggaatcggtttctatgattaccggaaatagggaataaaaagtttataaagttcataaagtttgtaaggttcataaagttgcatttgagagcaatggatcttataaattttatgaactttgtttttgaatggtggttgatttgtctaaacaactatgtttgttcccttgtctttcagaaagaaactacagaattcattgagttgttgttgcatcaattcttttggtattaataagcgtttgtattcagcgaccattgttggactcatacttcggttcatcgcatattctacaaccacctcgtcggcttctgggcacaaaataatgccgatagaaggattctcgttagtacgtttcacatctctatcaagtgcttccaggtaaaattctagttggccgaggtctcttggatggaactttgttttctttaattctaccgctattaaggcctgtaagcctctgtgaaagaataataaatcagccttgaaagtagaaccgccaactggtaggctatactcttggtccataaacaagaagtctttacctaattctaagataaactgcttcatgtgctcaatcaatctgttgcgtagttttgattcgctatgcttcttgggtaggccaaggaagtcaaggaatactgtgtccttgaatattacaggtgcatacggataagactctaataatccttttgatagattcttcttatcactaagcagcgttgaaaatgtctgattggttaaactgcgatctaactcttttacattcagacgttctttgtgagcgtataatatatagaataatcgttcttcgttattacgacaacggctaagtatcatcgtatgattggtgaaagtggtcattgtaagaacttgaggcattcgtgcagttgacaactgcacaatctcattattttccccttcatttatgttatcatcttgggcttctaaatgagccgattgtaattgtgcagttgttgactgcacgaattcatgtgacagaaatttctctaccgttaagctaaattgaggcgtggaatactcttcaaaatactgaaccatattgtagatgtttcttcggctatatcctcttaaatcaggacggcgagcacgaatgtattctgatagttggctcaccaccttgcttccccattcttcacttttcagctttgctgatacatagcttcccacgtaccatgcagtctgtagcaattcctcgttcaccatacgagaggctttgctttggtgcaattgaatgatgctaatcacttcgtcaaactgcttttcatgcagaactataatacttttgttctcgtccatattgcaaatttacgcattattggtattttgaacaataatcttcgccattgtaattgatgctttgaatttcagtcacaaaggtagttattattaatgaaattatatccttttcaatgaactgcttgctgtgatgaaaagtaaaatttcctgtgatattttattgtcctaattgtattacttgacgtttttgcgggtgagaatcgtctgctgacggacgggatttgaagttgttaaaattgaatgttaacccgatccagtaagcatgggtggcttctttgctgtaatttgccagacgataggtgtccgtgtttgaacgggcttgccattcggacgtgtcgaagacgtcggaaacggagaaactgacttgaaggcggttgttaaagaaaccttgtttgattgctaggtcaagatagtaattctcttcaattttgaattgtggtacttttgttggtgattgataggagaagagggcttgaaattcggtatgttttttagaatttaagtttaattccaagttgcctgaccaggagaaatcgtcaacatgaaggtttattccttgatatttcccgttggcatgagtgtggaagagggatatagaaggtgtgattgtcatccatgaggtgggagagccggatagattgatgtccaagcctaccttgttttccatactaccattcgcgtaagacagggttaacgtgttgtcttccgaaaataacgtgacaggggtgataaacctttcggtagaattgaaataaagactcccgtttagctggatctttttcccgtgtagaagataattgatttcggctcggttcttgatttcggggcgtaacagcgggttaccctgctcgaaggtctggtgatcgatcgggcttgtaaacgggtttagttgggtgtaatccgggagagtggcttttctggtaaaatgaaaggccagttcttgctggtcagaaggcatgtaccggagggttaggtagggataaaagtatagttgatcagaattatgtttgtctgtggcttctgcgagtttggtgtgggtaacatcgtaatcggcgagtacacctattttataatgccaggattctccttgttgttgggaataggagagatgtatcgtgtaaatgtactctttatggtttaggccgttattgggatttaaattcgacaaccaattatcgggattttttttcttgtcgtgaagatggtaccgggttttattccacctggagaaaaattgaattccgctttcgagttgtccttggtttgcgaacgtgtagaggtaatccatttgcaagcggacgagttcgggttgctcgtttccggtagaggtgtaagcgagaagatcatcaatttgatacgtgcttggacgggaatctttcgtgtgggaaaagatgccgtttagggatagttcgtgtttgtctttttcgtacacgtgtttgtagaataaagaaccttcaattattttccgactgaatgctattcggtggtgtaggtcatattcgtttgcttgcgtgcggttatttatgtcccggtttgttgtgatcttggggaattgtagcttgagactccataggaatagattgtgcgaggaaggtcgcatgtctagttggagggcgatgcaatggcttaaatggtgctgttctgtttctagtagttgagatgtttctgtcgaaaaagagcgaaatagttcactgctaatttcaatccggtctgaatggccggagtaatccaggaataaatcccagttcttttgggtatatcctaggtttacgtttcccgtgaaattgttcgtgaaatcatagtttagggaaactgaaccgctccatgggtttttggcctttttctcgttttcttgggcgtaaatgtctgtattcgtgtaaaaagtaaggagactgaagagtatctgtgtgatgcgctttttcatatacctatattgttgttttgtgaatttgacaaggatatagatgaaaacttgcgcctgtggagggattttttcagagttgtattagatgagacatttattggatgtttccttgtggacggaagggtgtgaagaacagattgaattattgcaactggataaatccggcataaaagtggctcggtatatgacaatttatttgagatttgctgcaaagaactcctttaaaggttgtagtgtatcaacatttaaattccaataatgggggttatcaaataaccaatctccagaaccgaatcttttacacaattttcgaggcaatttctgtgcggccatataagtatgtagtttcccctttagattgggaacattgtacttaggttcacctgattcatcttttgaaccagaaacacatctttcataatcttcaaagcaatcaaaaaatgtagaatgcaaatcgcgtcgtgcagcattttccattagtttttctacatctccgtcattttgattattgggatagaggaaataatggaatgacacattatgtgtcgtcataccattttcgatttccttttttcgcttttcatatccaattcctttgtcttccgtgtcagcatcggcaaaaacgataacttgttctccgatttcttgtgctaactttatctggttgagaatcgtttcattatacaaattaccaatgccatccatgaatataaattcaacatccatcttgggaaagaagatgtttataatcgtttgaagaaagtggtattctgatgttttgttgtttttagcctcaataaaaatcttagtcatattacctcacttcaatttcttggttaatagaataatccaaactttctaaagaatagtgatatgcctttaattcatcatcagaagttttcagcaatttaaaagcagccacgatattgtcaaacttattaagcgcagcatctcggagtccttttatagaatccgtatcatgtgtcgttataaatagctgagtgttgttcctaatagctgcatttataagaactttccataaattgcacatcacagaataatgaaaaccattactaatctcatcaacgagtaaagcaccatccttgcaatcatacacagcagttagaagagatacaatctttcttgctccatctcccatcatatttacaggaatacgttttgcgaggcctacatcaacaagcatttccttatctgtaaaaatgaaatcttttacacgaggttctattaatttaagaccttccacaataaagtgctcgtctttattttgaagaatatttttaagaccttgtattgatgcactaaaatcatacttagggcttaaatatgtacatcgcaatgattctacatattgttttgacacactatgtgttgcatcggttgaatttgccgagtcaaaacgtaattgtgattcaaaatgtttatcatttattttaaaatcaaattttaatccgtatttttcctctgcaacatttgaaagaatatttgtatcatcagcatttagagatacattgttttgattttgttcaaaaaggttaatcctcaaatcacgcttttcttcattttccattcggatatgaattggttgacttgaatctaaattgtagaaatctaatttaaggtcattcaaacgagctttgctataaccacgcataaagttcacatggattggtagcaatggatttgataacccactggctaaaaacaaagattctaacaatgaagactttccacaattattctttccaaagaaaagattaatctgcttaaagccctctatagaagcatactttatgcctctgaatcgctctatttcgattttgtcaaacattgtttctgcagttattcgattataaatcaatatgcaaagttaagcaaaatatctagtataaggttgtttttttacattgttttctacaaagaatcacacaaatctcaatttttgcactataggacacatgaatctcaaaatattgacaacctcgactttcttgctgtcaacgatttgtaggctcggcaaataacgcctttcgccttacagcggtagattgccgtttacctgccccccgaaccgtacttacacgtcttcatgtatacggctctccatctgtaccattatttttacttaatacagctgctgttctgacttccgtccggatatgcagggagggatcgcggtagttcggtac

SEQ ID NO: 10784 - DNA, 13787 bp, Unknown
  gut microbiota DNA sequence
cagtttaaattacattctcgttcacgttcccaaccaaaccaactcttcgagatttagactcagaaccggaaggtttaccatctttctcatactgaagtgccatcgacaaaaagtctaatgattcgtcagaaaaaccttctactccaaacgcatacgaacgcccggtcgtttcatcaagttccgcattcaaaccagcatatactaaatgtttctcggcaaacaattttctaaaattcaccatgaaactagcctcgtattttaagttctttccatttccgtacttataactaccttttcgtgcaatatcatcccctgtataagaaacaaagtcggaatgcgtcgatggtttaaacacgtcggattcattcatctgccaagaaatacctacacgtccctgaacagtcaatgcctccatcggtctccattcaatagagaaattgttggtaatattcgtataattactcttatcatacgttttcaaagtggcgttatacaacggattaggaacccctttttccgtgtcaacgcccgacgaattagcccaatatccccagttataaggttcaaaataacgacggatctttccatcctcatcatagggactccagtaaggatttaatttcacataatcagaaaaggcaccataaggagaattttttgcaccattcaaccctatcgatagacggttattgaagatcaattcttgatgcttatactgcaaatttatttccccgttaaaattttctctttttgaatctttcatgactccttctgtcaaattatattgcagagaaagcgaatatcgaaaactcttatctcctccttcgattctcatattatggcgatgtccgacccctgtacgcaaaggaatggataaccaatctgtatccacgcctttttcgacttgagctaaaacggcattataatattctttaaactgaatctcatactctggtcctaaagttgttgtatgataataaccggacaactcttctaaacgcaatttgtcacgagagttcagcacatgataatcactcaaatccggagtttcgatattcaactctcctttgtaatagaatttcaacttaccgggttccggctctctcgtcgtgattacaataaccccgttagctccccgggacccgtaaagagccgttgccgatccgtcttttagtatcgtaatagaagaaacttcattctcgtccaagtccatcatccgttgtaaagttgtctcaaaaccatccaaaataattaacggtgtattcaactcggcactggaattatcctgtaactccccgatattcggtaaacttgccgctccacgaatttgcacttgtggcaaagaattagggttcgatcccaaatcattatttgcaatcatattgaaagccggatcgatattggccaatgttgttatcaaattacgacctttaaactccttcaattccttatccgtcacaaccctcacggctcctgtatagctttctttacttttcttaaaaatacccgtgacaaccacatcatctaatgtttccaactgggccaccatcaccacatgaaccgtgtctttacccacgtattttacctcttgcgtctgcatcccgacaaacgaaaacaccaaaatgcaatccttcatttcaggaatcgtcaacttataactaccatcaacatttgttgccgtacccaaagaagttccttttaataagattgttgctccaggaatcggttcttttttctcatccgtcactcttccggtaatcgtgatctctttcttctcttcttgttggttcatgttcattaactgttcacgaataacaataatatccccttcaaaacgataagttaatcccgtattagctaacactcgctttaacacactctccacactttcgtctttcgctttcactgaaacacgttccagtccctgtgtctgttccgtgttaaatacaaaagacaaagccgtttgcttctgtatctccccaaataaaactttaatagatacattctttaaatctaaattcactttctcttgctgtgcatgcgtattcgctacaagagtaaaggaaaatacaaacataaacaacgtgtacaatttcataatcaaccatttttttcgccacccatgttcacaacgatggggacacaatcgtttttttttcataactttgtgaaataaaatttgtattaatgataaaagatgctcgaacatcttttattgatttgctttgtttagaccggaatcagctcgaactcattccggttttttgcttacctcattttgatatccagatttcctttccttccacggcaaaagtaacaccaaccgcacttttaattgccctcaaaatattatcaatcttttcgtaacgtttcacgtgacctgtaaagtgtaactcctttaattgttcattagtataaaaaatatccacgtcataccacaaagaaagcgtgttcataatctgctccatcgtttgattctcaaatacaaaaaaaccatctttccaagcaatataaggctcaatatccacgtttttcacgttcaaggaagcatccgttcgtctatattcacctaattgtgaaggtttcatccgaatttcttgtcctccattctctgcactcaaaccgattgatccttctaccaatacggtctgcacccgttctcgatcatgcgtatttacgttaaaagacgtcccgtacactcggattctcacaccatcagcaattacgtaaaaaggacgcttttcatcttttttcacttcgaaaaaggcttcccccgtcaaatacacctctcttctcttcttatcaaacatcaccgggaactttaattgagtggcagagtttaattgtaccgttgaaccatcagccaaggtaatccggtattcccctcccctcggcgtttgtaacacattatattgcaaattttccctcttattcccatccgcaaaatacacgattccaccaccggaattctttgcgttaaccccttcgctcacgacaatatcacggactgtatcatgttgcaaaaccatcgacttcccatccgccaaaatcaaagttgccttcgtttcccccggaagaatatccacggtagcaacctccaccggttgctttcgttcattatttcttaacatcacgaaaattgcccccaagggaagtaataacatcgccgcgtatttcaaccatacccggatactccttctctttataccgacacgtttttcacaacgctcgtaagctactctatggtcaatttttttgtacatcctgtacttgtataaaatatcctttccctcacaaatccgatcaaacatagcccggttctctggtgccacatccatccatctttgcaattcctgcatttcttcatccgtaatcatcccggataaataaagatgcatcatttcaaccattctaaatttataatcatccatagcttatccttttctataattagaacaacaacctatttcaagagaggtacaaaaaataaaagaaatttcatccaaaaagtaacattctttacggacgactcattctcaatacattacaaaataaaaaaatcagattattcccaaagacatcatcacgaaatacacccgtcccaaacgttcccgaatatatgacatggcccgttttttctgtgttttaaccgttaatatggataaattcaacaaaagagcaatctcctcgtttccttttccttccaaatgcaataaaaagatattcctacatttatccggaagttcatctatcgtcttaaacaacagacgatacaactcttcctccatcattttcaaatcaatatcatccccttcatcctcaagattcaacgaagcaagatacttctcctccacattcttgtgtttcagatgattcagactggcattcttcaccgaattataaaggaaactacgaaaagcattgtaagtcggatatcgagcatctcgttcccaaacggcaataaacacctcctgcacaatatcctccgccacgtcctgttgctcgacaaatcccattgcgaaaagaaccagcgaattataaaattcgctgaacaattcacgaaatgcttctgtctgtttcgtgtttatacgttgtaagaactgttcttccttttctggcatgaatacaattttcaatccgatcacaaaattagaaattcaaatgaacaaacctatgaatcataaaaataaaatcattctccaccataaaaagatccgacaaaaaaaggaccgattcctatactatatagaaaccagtccctcaactatgtaaactacgaagatcttaaattcgttctttttgcaatccttgaaatttcatttgtattaatcctcgccaataatgaaaacctccacacaaaatcttacacatcagcacgcattcggtactttgcttccggattaattgtaacgaggaagtgtacaaaagcctatccaagttgttaacacgtatccggataatccttttctctactactccggaagtactggttaatcaatccacatcgaacattcccagaagagaataacaataaaaagcagaatgctcgtaggcataccaatttccatcctcctgataaagaaaaatatattcttcattccgtttttccttttgcaatatctcttccagttccatacacatatgaattttattgaacaatgattattttacacgcttttgtcttaccgccaacaaccgaactcatctgcacccttccgcttctgttgcttccgaaaccgatatgcagataagcatgagtataataattactattaagctccgataaaaaaccgtctacacccgggaaggcagcgggcaagctggcggtaggatgcaaggccaaccaggtagtagacgacggattcataatctgtatggtccagttatgatttgtaacattcaataaatccaaaacatacgaatcgctatcttttagggttgagatttccgggttccaactaacatcaacaaactgggacaaattatcacaagttaatgtcaagattgtagatacagctgcagaggctgctgcaaaatctcctgtaatcttatatttattactccctaacgattgaacttgtaaattagtaagccaagttgccccacccgttaccacaggagtaataccacgacttgaatataccgtgcaaatttcaataccgtcagcaacagaggtcgtttggtttttaccgtacaagttaaacacgttattggacatcgtcatccggtgttgggcgtcagccacgatacaagggaaatcggaatcttcatccgtcaactccaccttcaaggcatttgacggggcaaaattgatagcatccgtcacgttggtatatcccggaccattcacgcttaccaccgtaattatataacgatgattccgcacgacattcaaaggtgtctccccattatctaccatcaccactttataatacccctctttccctttatacttggccttaataatcacacccatataatcagctacagtacaattccgctcgtagatatacaaagaaggagtttctccgtcagaccatccatttgcataattcaaagtactaccggaaagaggacgtcccgtcacgggagtaacaactgttgaataatttgcgggagtcaagtaaccacgatcaaatcctttatccaccgtaacactttgaatgataaaatcattcaaaccgttcgtggcatcgcccacacctttctttacctgtacacaagctgcaacacgcaataacttcacgccatcagctttcgttacgatatttattcctgtcgggagttcaacacgtccccacataatcaaaggcatcacttgatcctccaaacttccgaaaatcatcgctgttgtccccaaagcgggaatagctgcactctccaacataccggaagtaatatcattaaaattcaatcgatccgtccccccatcaggagaacgcccgttagtcaccagatgaatgacacgtcgttttgaggtagcatccaaacgtatggagaaagaaatttcggtcccacttggtgtcaactcccctccatccactttcacccgctccatgaacttaccctcctcatcaaacacaagcacgtccacattcttgatctcgctgtccgtgtaagaacgggcaagcgaatgtacgttttctggctccgacaaggttaccgaaagagcaacgttcactttaccataagtgggctcctgattctcatccctatcggaacacgaaataagtccccaaatgatcagtatacctattatatattctattttcatgcctatatcctattttcgttattcatactaaagttatccttcatcatgtattttatggtacagcagcccaaactttaattgatgccgagtgttttacacgatcgtaagtaatagttgcaactttagtatatcctcccgtggtcgcactgtaattacttgcacctttcgttgttgtaatcataacaatatgcgccttgtcatacaaaggctcagtctcccctccaacatgaacgaaattagtaccacttggctgcatcgagcctcctttataagcatacatcgttaatgtcattgtatctggagcccgatcggaagtataccatgtggcataaacatcaagtttgattttccggggagaattgacatccccttccaataccggagcattaaagaaaactgtttcaccttgtcctcctgtcgcatcaccaccccactgtaaaagggtttgtcccctatactcaaaagacaccctccccgtactggtaccaccagcagtgcctattacctcaggtgctttccctttattatggttatgcattgaataacctaccggtattttatcatacgtactattattcgccccaatactagtgaggtgattacctgcaaattccactgcaatatctacatcattattcttccatgtaaatttcaccacaaagaaatggaacggaggaattgtcaccaatatatcttgataaacattagcagtcaccacgtaatccggacacgtggcatgtctgaatgtcatcttacccgaacgaggttcgtcatcatcttccggatctggatttcccacgttacgatccgtggtaaatgtcaatttctgaccaataaaatcccaggaaatattacgaatccagttctgaggagatgaaaaattctcaattatcctatctccaccatatacaattacatcctctgaaatagtctctgcactcgatgctcctccttccggagctttcgctgcaatcgtattattatcatcaacatagatataacaattcgtcaatcgtatcgtatccgtatcaagcgtcatcatatttttaacgataaccgtcgtatctccataaacaagatgtccctcgtccaacgtcttgttgtaagcaacagaagaacgagtaaagcttactgtactgtttcccgcaacaccattctgtttattcgctgtggctttcctaggattcgtagtcaaaaatttccagtcccctccgatactcgtaatctcaatctgcctgttctcgtgaagattcggacagaaaaccaatcgtttattattcacgctgattgtcccttcatccggtctttgcgtcacgggaatcctctttgtcacattattcgccttaatcgtaatataagaactacgaggttggttatccacgtaagtatccacattagccgtgatctcgacaccgttattagctattttcctcacggaagtaatccaccctcccggcgattgtacagagaaatccgaggcattcgtattcacgtaaagcgtatccttatgtgacaatcccacggaagctttgtccgtgtaaagctgagtttgggataagtcggcattcaattcaacatcctcccatcccaaaacatcagccgtcacatccaactttccaccaactagaagacgtacaagcagtataccgtttacacgaggaacccgcgggataaccacatccgttttttgaaaacggcttccaccctcacaagccaaatcaacacttaccttcatgtggctctccgtcgtatctttcggattagcagtcaaataatcgttccctttatgagccggaatgacaaaatacaacgtgtcactacgttgatgacccggtaatgaaacactatctttaacacggaaagtcccggtcattggcgtgttactcaccctaggactctttgccgtcgggaacaatcctccctcccaattcaaggtagtcggaacatctttcagttcaaaattatgagtcccgttcacatccaaccctcccgcatcagcgataaccacctttaccaaagccacgtttcgtgacaatatagtagttcctgtaaccgaattatcttgtccgccaataacctgttgcccatcaatattggccgtgcgtaattccggcatagaaggtaatgttcctccagatagctgggtttcccacatcttcaaatccttgcgggcagcactgcgaacaggttgtatcaacccaccactaaaatctgtattggcagtcacaagagctatattccacatcccggcagcgacagtcatcgaaagtcgatccgggccgtaagttacctcctgaaccttatggttgaactttccagcatcacttccctgtccatcaaaaagatagactaacgtgttaccgacgatatccccacccgctctcgtcatgttgaacgtcaatagaggatccccgctcgcttgcccggacagggaatccctgtcgtccgagcaagctagtaggagaatagtcaataaccccgctaacaatatgtttatatattttcctgccataattctcttttttcattcactacctccccaaagggagtagaatttgtttatttacggatcgtaaactcggccgtagcttctgcatcagaaacactgatcggttgcgcacccgtgggttgagttacagacttgattttcaacttcacttgtttttccgctgcatccgtactatatagcaccacaccatacacgttcgcagaactatgatttccgtcaccactgatgcggagatcatgcatattcgtaaacacaaagtctttaccttctttagctgaagcatcaggaaccgtcacgcaattcacgataacatcacttccggtggcattcgtcagcaaagccccgtcagaagctcgcaccaaagacaccgtgaagaatcccgatacaacattgttattcaatctgtgatcgccaagggaagcaatcattaaacgtgccggttgatcgacaaccaccccgctacaactcaacaactctccttcaaaagccacattcgaaccactcaggcaatgtactttattaaagtttatcacgactgtcttgggcaattcataacgagtatcctccagcgttttcaccaagaaggatgacttctgcgagccattggcaaacatcactcttggagttaatcccatatcaaaatcaagcgcatctgcagttccttccccgtaaataccatccacgatgatattggctcccgtcgaatttgtcaaaggagttccatccggtttaaacaatccaagctcgtataaaatatcttttgttccctcttctccctgttccgtgcgtactagcttcacaacagcctgttgatcctcgatcaccgctttacccacgggtttcaccaagtaactttgctgtgcatccgaaagtacaagttcaaactctttcattccctcgatcagattattcgctttcacggacacctctatatcttgttttaccagataacggtcggccgttccccgtgacggggtaaacgaaagctttcctttcaccggtgtaaaattattcgcaatattagccgttttctcttgggtagcatatcccacacttaccggaattggcgcaccttctttcgtcgtggcatatccggtcagagttatggtaaaaatagccgtggcaattccattcaccggtttcgtgatcttcacgtccgaaacataaagaccatgtcccagtttcacgagacgacctcccattcccaagaaaagtaactccccggatgaagaggtatatgcctgacgataagctgtcggtttattatccgtcacgtaacggtcaaactccttttcacccgtggacgaaaacatacaaacccgtccttcagaagaagataacaataaaatttccccgctattggtcactttcattttatcaaaattaccatctagtgaacgctcgaactccacttttccggtcggatgaatacgtataaacgtgcctctacgtccgctcatgtcataagtcgtcaccacggattcccctgttgccgggttcatcccgattcctcgcacatttcccttggacgtacctgaatacaaggctgttccatcattacgcaacaaagcgtaatatccttgacttccgctacctccaaccagaatgttaccattacgggctacttgaagatgatccagcatagcggccccttggttggcgggaatcatattctttgcgaacacgatgtccccctccgggcgaatcttgtaaataatccccccatctgtcggtgaattaccaatcacaagcaccgaaccgtcattaatattggcattcaacccagtcacaacaaactgttttgccggaatcgtcgtcatgtaataaggtttacccttatcatccagacgaaccacgagagcttgctctttatcctttccggctgagaatgccgcacaaatatattcaatcgaattccccatcaccgcaaactggtcacaataaccacctccggcatttttatactggtaaaccacactaccagtcggatccagtttcaacaggattccctggcgaccgtccgcacccttcggttccgaaccggacaccacgaacgccccgctccgcagcaacatacctttcaagaaattacttccttgatctccggcataaatatcggaaacgatacgtccgcctcgattaatcaccacgatacgtccacataaagtaattttatcctttttaccttttacattcggtacactggactgtccaaccaccaaaacccggctgttatccaactccacaatctcgttcacggcagtaaagcctgtcaatggaagcgaaaaaatgactccaccttcccgttctacccatgtcaggttatacttttgaccttctttacctactaaagcaacctcatcgccgggcaacggacaaaccagttgaatctgattcttatcaccatacaccttatcaaacaccaccggcatatactgagccttcacctgtaaacaagtgacaacgctcagcaggaacaatatccacactctatgaattcttgtcttcttcatattatcgtttactttttaattctacctcttatgatatatctcaacacgtcttgcccgacgattcacctgtatccaatcaatatttccctccgattgatttcccatttcttcttttatctcttcgggagaaagcttcaccttaccgtgagcttttatattgaaatctatattgacaccgtgatcccgcaaaaattcggcaaccctcttcgccctccttgcagacaaaacatggttgtaattgtcactacccatttcgtccgcaaaaccgtcaaacctcaattctgaaaaataataagtacccatttcattaataaaccgctttaggcattaaatggattctttggtcaattcatccgaatcgaaattaaagtaaagagtcattagtaaaccttccggtgcatattgttttagtgaaatagtttctttggtaaccgattccgtggccccgttcagtaataaagccccgcctagaatcgcactttcttcgctcatcccaaaatgaggatcaccctgttgagtccccaaatcttcctcggtttgcaaataataaatgtcatcccgggactccatttcccggtccgagacaaaataagcggttcgcaaatccagcggacacataaaatagtcgttgaaaaccgaattcaccggataaggaaaatgacgcacactgcccgggactactccttcgtgatcatagtcggcattgaacaagtcatatcccccgaaacccggtaacccgttagaggaaaaaataaggcgtccttcgtaaagtacggggaaaatctcattcccttccgtattgacatccgcacccaaattcattggggttccccactcctgtgtctcttcatcccaatgaacgacgtacaagtcaaacccgccaaatcctcccggcatatcagaagtgaacaacaacgatttcccgtcattaaacaagtaaggatgagcgtacgaattttccgggtcttgcgggaaaaccgggatgtaccttccaaaacgtttactctggctcttgatcacggaataatacaatttagtacggaaaggacgatgttttttgtccaccatctccaccgatacattctttttatcgtactcgatcaccgtggtcaccatcacctgcatatctggagaaaacgttaccggtccattctgcaaatccaccggaatcttccggaagtaatcggaatatcgcggtgatttctgcgacatcaccttttccccgacctccttcaactcgtaatagtgagtacgatggaaaaataactttccgggatcgttaaacttactataactaatggcatagaaaggttgttccccgtaattcccgatccagaactcggcattcggcgtgttcaaagacagtcgtttggccgtgaaaccggggaattcctgcacggaatggcgcatggcaagtgcctccagtgtattctggtaacgctggtacctgctatactgatctttataggcattgttcaggcaaattgcctcggctttccgtacctgaccttgaaaacgcaatgcatcaatgtaatcacacacgtcatccacgaggaacaaattccgttccagctccatcgccttctcgtaatgtccgatagcccaactataatcccgtaccatgaaatacaagcgcgcaatcttcaagtgaagagcggcttgattttgcacattctcttcttttttaagagccgtttcatactgcgccatcgctttattaaacttctgccttacaaaattacggtcagcccgtctttccacccgtcccagcttacgttcctgcgccttcacaggaatcgctccatccatcaggaaaaaaaacacggcaaccgacaagagaatttgtatcttcttttttctcattttcagcaacattttatctgtaacactagcggaatatattgtatgtaagactcacgccgaacttcgtcggaccaatccattgtttggtcttcttgagttccaacgggaaattcacgtattctcctcctagtttatatttatcatactggaaatgagcatatccaacaccgatattcatatccagcgccagacgggagttaaaagcatatttgtacccgaaagtaatacctcccgataccccccatcctttccggcgataactccggagcggatcattgtgtttcaacaacccgatattaaaagtgccatacatggcataaggaccgatataaaatccatcccatgaatcattcgtgtaaaaattttgcgggttccaatagtatcgtaattccgcagatcccatcaacactctaaaaacttcttcattcttcttaaacatatacggtaaccacgccccctcggcattcaccgtgagctgtcgcgttaacgtgtactcaaaaccgatattaggtgaaccggtcaaccataaaggtacatttaccttaacactttgcgcccgtaccccgccaaataaacaaagtaaaacggaaacaagtaaaatatatcgtacaactggtttcatattatt

SEQ ID NO: 10785 - DNA, 2503 bp, Unknown
  gut microbiota DNA sequence
tcgaaactttgatcaccacgtaagaatcgatttcaataatgattcgtcggccatgcaatagcctgagtggcaacccggtcagtttatctttcacttccaccggtaaatgattgacggcaacaccgtcactatccaggaatgtataattcagtctcataaattcgccttctacagacggtaaataacgatgatccacctctagataatcagctgttatctgtgccggtaactctccgaaatgaaacatatgatcatcccgagtctgtcggccagcgatagtatcatacttcaaatactgtacggtggacaccccttctgccaacaattgcacgttttctatacgagacacgtcgcctggaaaatttttaaaacgcacggttacccgtcccgtataatgttccaattctaccgtgtcggtacgtaaaactcccggatgatcgatcacaggcacaaacttctggaataacacgtccgaaggatgcacgtaatgattctccccggaactgctattattcaacataaaagcagaggtttccagttgttgctcatctgcgaatgaaagactatctgtattcgtataacaatagaccttatattcaccagggggtaatctgaaactaaacaaccctgctctcatacggggatctttccacggggcagcctcgtaacgcgctcccaccaacactccagtctcgtcataaaccagtacacgacagtcactaaccttattatccaccacttcgggtacgtaaacctggtaattggtttcatctttaaaataatcataagtacatgacgcgagcaggagttggataatcacacccgtaaatactatgagaagtctgttctttcccatatttaatatttttgttgattttacacttatttcagattccccgggagcaggggatcccgctcccaggcaaatcatcttgagtgtataaaaaggaattcttttacagtgtaagtgctgattctacgatattactactccaagcttccggtgcagcaacatcaatcgtcaaaccaccctcatctctaggtttggtcggtacttccgtagtacccccggaacgtaaagtcaaattcacttcacgaatcgtattcggcgtaaagttctgcttgatcaaaccagaccagtaaacaggaccctcggtaagcatttcatctccgcttgccaaaatatgaccagccttaccacgtccggaaacaacgataaagtattggcgatctactgatgcttctgccgttgacgcaccattaatagtacgtcctccattattcggccacacgataacatctctccacatcgtgaaattaccacccaaaacaaccttcggatcatatccggaagtcggattagacgtgttgaaaacagttccgtcttttattgtcaatatattggcatcaatagacgttgcactcacccctcccgcagttgtagccccaactttcatgttttcaggcaaacggtaaatcatgatagaagcatccttcgtgaaatcaaccgtgttctcattatccgtctcgctatcttttacattcaaacgaacacgcatcatcgcaacttcacgtttcagagcaatagccggcacgggagtagtaacaccagcagttacatcaatacttgttgcagcccccataaaaatttccgacggctcagtataagcagtattaccggcagtagtcagtttagctgaacaaaatgtcgggaaagcactcgctttatgttcgactaataaattcggaattgttttctgacgtacattccacatcgtccattcagttggagttgtacctccatctatataagtggtaactgcatcggaagaacttttcacgttggcaacagcaactaacgtgtaaccggtacctaccggtacgtccacgtacgtgaaagtggtcaacgcacttgacggattcacgatggttgaataaaccacctgaccggacgcattatacaataagaattgtaattgcttgacatttgcccatgaagtttccggaattgctgtagattgtggagcccttccttccataccggttttgtcaaaagtaacttgaaacgttaaaccggccttttccggatccggataatccgaaccaccactctttgaacaagcacacacaactaccattgcaagcaatgaccataataaactaaatctttttttcataacccattctttaaaattacctaacatttgaaatctgacagaatgtcatcaaaaatttttactacacactatttaaatttaccgttactttgtaggtaacggtaaaacataaaatttcaaataaaaaggggtctttcggcgggttattatttatataatgaatttttgtagtccggggaaggcgatctaaactccgcccatcttttagaaaatcgaggtgggtaatagtttttttgtctccaaaaaaactactactcaaaaaaaattgaattattttatcatctattgaaaaataatcgtcgcattatttgaaataataaaaatat

SEQ ID NO: 10786 - DNA, 14124 bp, Unknown
  gut microbiota DNA sequence
tacttgtaaaaaatgagaatagatatggctatttcagattacatggaagatttgatttatcgagtgctggcaggcgaggtggacgaggtagaacggaaggagttcgagacgtggttacgggaaaatgatgaacaccgtgtcttttttgaaaaaatagaacgggcttggtacacggggaaatatgcggcccgatggaaaaacgtggagatgagtgccgcatggaaggccgtggaacacgggcgggaacagagacaaaggcgtcgattcagacggatcgggttgggagtggcagcgagcgtggcggtgttggtcggaataacatggattgtgggacagagagaagaaggatcccttgtttcggttgtggctcaatcttcggtggtaaaaccgggtgaggcgaaagctcgcttggtgttatcatcagggtttgaggttgagttgggatgtgtaaatggagatacaattaatgaaaaggggggcccgattctgaacgggaaagagtatattgattatagtaaacaggaaaacaccttgcagggagatgtcgtgtataacgagttgattgttccgccgggaggagagtaccaactagtgctggctgatcgtacggtagtttatatgaattccgaatctcgattgaagtacccggtgatgtttggcgggaaaaatcgcatggtggaattggaaggagaggcctattttgaagtttccaaggatgaagatcatccttttattgtgcgtacggaacgtttggatgtgacggtgttaggtacaggatttaacgtgatggcctataagcaggatccccggacagaggttaccttggtaaagggaaaggtggatgtaagaagaggggaaattaacgagatattgacacctagccgacaatttgtgatgaacaacgagaatcaagagtatgaggtgaagactgtaaatgtggctacttacgtggactggaaggacggggtactcaattttgacggaatgccgttggaagagttgggagataaactgggacgttggtatgaagtgaagtttttcttcacgaaagagagcttgaaacggttgaagttttcgggtgcttttaagaaatataacgagattggttacatactttctttaatcgaggcaacgaccaatgttacttttaaaatcaataaagatgtgattgttgttaatgaaaaatagagaataggattacttctggggaataaaaataccggaaagtgttaggaccacgatccggtaatcactcccgaagaagtatttaagtatcacttaatttacaaatgtatgaaaaaaagtaatgtcttgtggcttgttttgtcaaaaaataagcagcaacaattatcaaaaattatgaaattgacttggattctttgcgtctgtttcgtatgttctctgtctgcaaacgtgatgtcgcagcagagggtgaacatgaatcttgggaaaacgtcaattaaaacggtttttgaggaaattcgacggcaaacgggaaagatcattatctataatgatgatcgtttaggcttggaacgggtggtgaaggccgattttaaagaggcagatgtacgggccgtgctagataaggtgttggccggtagcgggatgacctatcgtttcgtggatgattatatcgttattgttcccgaggtgaaggcaatgcgggatagtacggtgaaacaatttcagataaagggaaaggtgacagataaaaagggagaggtgattcctggggtaacggtacgtctggatagcacaagtttaggtgccgcaacggacgtgaacggggagttctcgctgacgttatctatggacaagggaacacttgttttttcctttattgggatgaaaacgcagaaggtgaagtacacgggccaaaaatatcttaacgtggtgatggaggaagatgctttggaagtggaagaggttgttgtcaatggttatttttccaagagtaaggaaagtttcacgggtaacgtggtttccgtgaacaaggaggagttggccaaggtgtcgtctagtaatctgattagtgctttacaggtgtttgatccttctttccggttgcgcgagaatgttgacatgggatcgaatccgaatagtttacctgattttcgtattcgtggtaattctggttttggagtggaaggcgtgtctgaggccacgtttaggaatgacccgaatttacccacttttattttggatggttatgaggtcgatgtagaaaaaatctttgacttgaatattgaccggatcgagaacgtgacgattttaaaggatgcttcggctacggctatttacggttcccgggcggcgaatggggtcgtggtggtaacgacgaaagctccggaagaaggaaagttgagagtgtcttataatatgaatatggcgatcaatgctccggatttgtctgattataatttgatgaatgccagggaaaaattgcaggcagagttggatgccgggttgtatgattcggatgatctttattcccagcagttgctacggatggattatgcagagcgtttggaacgagtgaagaaaggggtaaacacgtattggttgtctcaacctttgcatgttgcagtcggacataaacattccttgtatgtagaggggggggaccagagcgtgcgttacggaattgatgtgaattaccaggctaatccgggagtgatgaaaaaatcttcgagagatcggttcgggatcggttttctgctttcttataatttgaataataagttgttgtttagaaataagttgagcgtggataaggtgaaagcgaaagagtcaccgtatggttctttcaaggattatgccaaggcgaacccgtatgatcagatttatgatgaggatggaaatttgattaaatcataccaaccgcacgtgagtacgagtaaccgtttcttgaatccattgtacgaatcaacattgaatcataaagataacacaacgtacacggagtggacggataattttgattttgactggtttatcagcgagcatttcagattgaaagccagagtgtcgtattcggagcgtacggacaagcaagaaaaatttacagatccggaatcagcgatttacaatgaatcagattatcaagacggagaaggaattttgaagaggggggaggcatatagtttccaagagaagagttctaacttggatatgaacatggtgttcagttataaccagcagttgggtagtcattttttgaatgccgtgttgggaggtaatgttattgagactcggtttgaaaacgaatcatatagcgtgataggtttcccgtcgggcagtatggattacatctcttttggtaaagagtttaaagatttaaccccggaaggaagtgagggattatcccgtttggttggtttgtttgtaaacttgaattatacttggaataatatttatttgctggatttatctggccgtttggatggatcgtcaaaattcggttccaagaagagatatgccccgttctggtcggcaggtattggttggaacgtgcataatgaaaaattctttgaagggttgaagggagtaatcaatcatttgaaactttctgcgaatgtgggggctaccggtaaagcttctttcgaagcatacgaggctcaggatgtgtacgagtattacaagggacaatggtatgccggaggtttgggggtgatcatgaataacatgggaaatacaaacctgcaatgggaaaagacacatacgtttgacgggaattttgaaatccagtttttaaatggattggtcagtgctaatataaactactacgtgaagacaacgaaagatttgcttgcggatattactttaccgccttcttcaggttttgaaagttacagggataatctgggagagctggaaaataaaggatatgaaatttcgttgagaggtttcttggtgcgggataaggatttagtcgtgaatgttttcggatcgatcgcacataataagaacgtgattaaaaagatttccaattcattggaaacgtacaacaagaaagtggatgatgagcaggataattatgaaccgggatggggagaagcgatggagacagccaaacctcaggtgcaatttaaagagggacagtcaaccacggcgatttatgcggtaaagtctcacggaataaacccgatgaacgggaaagaggtgtttgaggatttgaaaggtaacctgacttacgagtggagtgcagccaacaagatcgtgtgcggggatacggaacccaaggtttcgggtgcttttggtgccaatgcggactggaaagggtttaatattaatgttagtttcttgtatcaatgtggaggacaagtgtataaccagacgctcgtagaccgggtggaggatgcaaatttgagttggaacgtggatcgccgggtgttgaaaggcaggtggaaagaaccgggtgatcacactttctttaaagatattaagaatcgggatcggacggaggtttcttctcgttttgttcaggatgagaacgtgttacaatttaaatcattatcattttcttattctttcccaacagaattgattcaaagatggagcttggaacgattgaagttgacgttccaaatggaggatattttcagaatatctaacgtgaaacgggaacgaggtctggattacccgtttgccagaatttttaacgtgggattacaggttcaattttaatcctgtagaaatgtaaaataatggatgatatgaaaaagagaatattgattatttttacgttattcgtgtttgctttgacgaacagcagttgtgatagttggctggatgtgaccccgcaagcacaagtgaatgcagagaaattgttttctaaacccaaagggttcgagaatgccttgtatggtatatatacctcgatgacggatgcatcttcgtatggaacgcacatgacgttcgggttgatggatgtgttggcccagtattatgatgtttatcaggacaagtatcactttctttacgaggcatcccggtataattacaaaaattcgaattctcaagatgtgattaagaatttgtggttaaagaattacaatagtattgcgaattgtaatgttttattggattacttgagtgagaagtccccctcgttttttgaaggtgaagagtataagtttttggttgcggaaacgaaagcattaagggcttacttacatttcgacttgttgagagcatttgccccgtcatggaaggagaattcagaggctttgtgtttgccttatgccgataacttcacggaccgggtgcatggtcaaaaaaagacgagcgagatagttcgattgattttgacagatcttgatagtgcccggacgatgttaagtacggttgatccggcccgggaagagggttttaaggatatgtataaccattatgtgacagaaatcgggaacgattttacaacagcccgggcgtatcgtatgaactattgggcaattactgggttgatggctcgtgtgtatcattacatgggggatgaaagggcttacacgtatgcccaagaagttatccaggccgggaaagatgggttcttcccttttaccgaggaaagtgcagtgagtgctcctttgaagagtcgggatgtcgtcatgcaaaacgagattctgtttgcattgaattatgccggtattcatgatttgtggtactcttatgacgcctctcaagataattactacacgataaatgatgttacttccatttatccttcttctgatgattttcggaaggaatatttggtaattacgaatagtaatgggtatgatatatcggttaaatatgcggatgtagattctgaaaatggcgggaaagttccgatgatccgtttgtctgaaatgtatctgattgcggcggaaagcggttttaatgcccataaagatgttgccatcggtttgcttgaagaactgcgtaaaaacaggggtatagccgaggaaatttcaacaacgattacttacgataatttcgtgaaggagttgacgagagaggctcgtcgggaatttataggggaaggtcagttgttttactggtataaacgtttgggcttaccggttgatcaagggagtaccacgataacgcttgaaccgtctcaattctgtttgccgttgccagctacggaagtagagttcggcgggcgtaaggaagattatttaaataattaagtagtagattaatatttgactatgaaaatattatatgtaattatcatgatgttgtttcttggaatggtgtcatgttcggaagataacctgaaagggtattccagtagtaactgtatacaatttgataagttgtcaaaagatagtaccgttttctcgtttgcttatgatgagacgctggaatcgggaacggtggctttgaaattagtgatgatttcgcctctggtagatcgtgaccggaagtataacgtgaagtttttgcaggatgaaagttctgcccaagccggggtggattttgaaatgccagcagaagaacaggtgattgcagcaaatgattcggttgcttatctgaatgttattgtaaagagaaataaagcacttaaagggagtgcgatagccgttttcgaagtgcaggtatcagatgattttatgccgggaattgaggcaaatcggaaagggcggatttttatcacgaatcaattaactcgtccggggtggtggaatgactggcacgaggcgaacgggttgggtacttattctgacttgaaataccaaacttttattcgggaaatcggggtgacggatatgacgttagaggcagacgggggagagatgaattactcgacgatgcgggcttacgtgctgcaattcaaatattggttgcaggaccatccgattgaagatgaggatggtagtttgatgaaagtggcaatgagaggttaatatttaaagatgaagttatgaagagattatttatatatatcgtcacggtaatggcgttgttcattgccggatgttatgaagataaaggaaattatgactatgataccgtgccgcaggtttctgtgagcggtattgagaaaagttatgatttttacgtgggttcacaggaaacgattaccccgacggtgacctggacaaatggtaagccggataaagtttcttatgcttggagaataaacaataaggtggtttgcgaagaagaaagtctgaattttgttgtgggagaccttcccgtgaaagctggattatatgccgagtttacgattacgaatgaggatttaggggtagagtatatcaaccgttttaacgtatcggtttattccacgtattattccggatggatgctcttggcggataaaggtaacgtttccgagttgtcctatgttcgggatgatgggggactttatgcggatatttataaaagcgtgaacgggacggatttggccgggggggcttgtgccttgatggaacattggttgccgacgtcagaagagatcggacagattttcgtggcttgtcaggatggaccagaatattctgtggaattggatggaaacacgtttagtaaaatggtagctacgaaggatgagttcgtgggggatgcacccaaggatttcaagcctatgagaatgaattgcgtgacgaattacgattatcttatcagtaatggtaagttgtatgtacgtaatattcaagcatcatatgatgctctttatcaggatggtctgtttccaaatttcccttatccaggtgattatgaattaataaatctgggaattcggggaaacttgctttttagtaatgatattatctgttttgataagaaaacttcaagttatatgttggtgcgaaccggagaaatgaaacgattggattacacgaatgattcggaaaaggcatttatcccttacgatatggggaaaacggtactggatggaggaccaatctcgacggcaaccccgacggatgaattcctgacagttctgaaatcgaatttggaaaacaaggcatacgtgcagaaattccgattctccggatggggtgcgaagacgtatcggtcgatctcggaggtggagtttcctgatccttcaatcatcaatgagaatacgaaattcgctgtttgccagaatcgtccttacgtgtatatagcatcaggtaacgtgctgtatgtttataatcacaaggataatacggtaaagccattacgttcagattttggacggacgattcgggatattgctgtttgtcccacgaattatgaacgtttgggtattgctttggagaatacggatgacacgtcgaagagtgactttatggtactggatgtttcggtcgttggggatggaaaaactctggaaggaatggaatttatcggaaagttcggtcgtgtggtggatttaatttataagataggtaatcagtgggatacttattaataaatcagtattctcccgcttagcgggagaatactttaatgtataggtgatgaaagtatgtaaaaatgtatggctattggttagcttgctatgcctgttttgtgcatgtaaagaacgggaacatgatcgtttcacgatttccggggtgatggagggattgcctagaggtgtcgtgaagttgtacacgaatccgccgggaaatgttttactggatagttgcgaggtgaaagatgggaagtattttttggaagggaagatcacggagcctcaagtcggtttgttattttttgacatggaaccgcaatatcagcgattgggagcctcaatggtggcaatatttatagaaccggaggatatgaaggtgtatagcgaattgaatgacgtgaaaaaaacgttgaagtttacttctgccccaattaatgaagatattcaaaagtataatgtttatttgaagtctttaccagagaaacaaatggttgcagagcttaatggcaaaatccagatggcttttgccgaggctaggatggaagaagtgcgggagatgagtcgaaagcgagattcgttgcaaatggtgattattgaccggttgtttgcttttgagccgggagtttctaaaagtcaggcagcagcttatttggtggctcaattgtccgcatctttggatgttgtgcaaagagggaagatagtggaaaagtttgatccgagttttactgattcttattatctgaacggaatgcaggaaagcgtggagcgggaaacggctttacagccgggaaaagccttcccagattttcaggtgtttgataaagatggtaggaagtacaccttggctgatttccggggaaaatatttatttgttgaatttagtgcatcttggtgtggctggtgtaaaaaagagattccttttattcgtaaagcatatcacgctttaaaagataaaaatgttgcttttgtaacgatgatgatggatgatcggaaagaggcttggttacatgagatcaaggagtataatatcgagtggtattgtttgtctgatctgaagggaatgaaaaacagtcctttgactaaggcatacaatttaggggggattccggattctttcgtggtcgacccggaagggaggatcgtgtgtcgggacttgagggggaatgaagtattggagacattatctacattgtgtaattaatggaataaggtatgtataagatattaatcggtttgtttttatctgtattgtgcttgcaggcaaaatgtcaaatgcaatttgatgagggaagtttctcggaggttctggcaaaagcaaaacaggaaaaaaggatggtgtttatggattgctacacgagttggtgcggtccttgtaaaatgatggtacaggatgtttttagccaggaagacgtgggacaatttatgaatacacgttttgtgaatgttaaattggatatggaaaaaggagaggggcgggaattggctaagaagtatcaagtgaaggtttacccaacttttttgatcttgaatgaagatggagaggtgattcataaaatggtgggaggaatgaaagcagaggaatttttacaaaatgtgcaaaatggcataggggaacattctttgtattcttatgagaagagatatgccgacggggagcgtgatccgcaattcgtgtatagttatatagagactttggctagggcttttatgaaagaacgaatggaagaggtgttgcacgaatattggggaacattgacggatcaagagaagagttgtaaagaaaattggatgctcgtgaaacgatttgtgaagaatccggcgttaccggagtacaagtatcttttggagcataagaaggattttgatgcggcggttagtaaagatagcgtggatcgtaaaatatatgatgatttgttcccgttgattgtgaatgattgtaacgaaattatttttcatgataaagtaaatgcagctcaacttttagaaacttatgaggtatgtgttactcgatcgggaattgccggacaggattatctgttggatatagtggagtttaccaaagtctttttgtccggtgatttgaagaaggcattgaaaatgtatgataagaagttttcccgtttagatagtgatgctcgttttgatgtaactttacagttgaatggaatgttgattcgtaagggagatgcaaaaatgtgtaagcgaggattggaattgatcgagaaaacgatgaaagattgtggatggtcggtggatgatcctttgtttgcagccgtggtttccggattgaaagataaatttaaagatgataaagatgaatagattattgattttgttgataggatgtttgtgctgtttttcgtgtgtatccaaaacagatggttttaaggtaaaaatgcatttggaaaatgcttcagagtgtgagatcttcgtgagtgaaagggtcccgaatcctactcagtggtatatagataccttgaagttgaaggatggccaagtggtttatacgggtaaggtggattaccctcgtttggtttctttcattgttaaaaaaggagaagatgatttcgtggggtcttttagtatatttttggataatagtgaagttgaggttcgaggggattttaataatttgaaaaatttagcgattagtgggagtaaaacacatgatgaatttgttgccatagaaaagaatggacagaaatttatgaaagagtatggcagaatcggttacgaccggagtaaggcgtttaaagataaccgggctttatatgattctttagcagaaccttacaagcaggcttatgataaggtggtggattatattttgaatcttccggggtatgctcatagtgaggtggctccttattttgtttccgaatacattcatgctgataatcttcccttgatggaaaaagcgttgaatgcttttgatgtttctctagccgagaatgcatatatcgctaattgccgggtaagattggagaaggaaaaacgggtgcaaccgggagttatggcatatgattttgcgttggaggatttggaggggaatgtgtataaattatctgattacaggggaaaatacgtgttgctggagtttagtgcatcgtggtgcggatggtgtaaattggagatacctttccttgaaacagtttataagaatacgcaaggtaagaattttgtcatgttcacgattaatttggatgacgagcgaggaaaatgggaggaagatgttaaacatgataatttaccgtggaaggttatttctgatttgaaggcatttgagagtcccgtggcgaagaattataacgtgagtggtattccgatgatttatctgatcgatccggagggaaaaataaaggagaagggattacgtcgggaagagatgattgaatatataaatactttatttgagtaatttaataacaggggaaaacggaattcgaaagttttcccctgtgttattttaaggagcaagaggttgtgtggttgtttgcgagattgtgtggggctttattatgattcgattgttgggtatttgaatatttcggaggaatagttatttttgtggcactatgagtgctattattcagtccaataaagattttgaagtgttctttcgagaaaattttccacccgtgtatgctttcatgaaacgttacacgggggatgatgaactagcggcagatttagcacaagagacttttatccgggtttatgaacggcgggatgagattgtttctgttgattacgggagagcttttttgtacacgatagctcgccacttgtattggaatcattgtaagcatcagcgggcgaaggaaaattatttcacgcaattagatgagaataacgtggatgattatgattttttgcaggaggttacccgacaagaaaccatgcggatattatatactgctattgatcggttgccaccacagactcgtaaagtgattcttttaaatctggaagggaaaactaatccggaagttgcagaagaattaggtatctccgtgaacacggtgaagtgtttgaaaaagtctgcttatgatacattaagaggattattatcaaagaattatcttgtaattttgctattcctattagggaagtaaatgttaaatcttttcttttttgcattttttttcttgtttgacctacccacttttcatttgaagtaatctctatgataaaataacaaatgtgaaggtatggatttactaaaaaaacgtttggatattgctaggcttgttgccgaagagttgaccggaacgattgatgaaaaaaatcggatcgtgttatctcgttggttggatgaggacgagcgacaccggaaggaatatacgaatattctagaatcgttaaagactgggaacgaggtttggaaggatcaagagcgggggaggcagttaatggaatcccgatggggaacagtgaaatctcatacggttcggaagactgaccggtggattacgtggagtaagtatgtggcggttattgtgttattcgtgagcattgggatttcttggcttgtaaatgaagaaaagcaggaggtggagaatggtactgttgcccaaattgaacatggtagcatgaaagcgcagcttgtacttgctaatgggaaaaaggtggatttgaggccagaaataagcttacaattagaagaggaggggggaacccgaattttgacatcagataatagggtaaagtattcggggaaggattctttagccggacaatcgacagaagtaaagtataatacgttgatcgtgccgcgaggaggtgaattttcgttggaattggcagatggaactcgggtgtggttgaatgcggagtcgaggttgcgttatccggtggctttcacgggtaaggagagaaaagttgagatggagggagaggtttattttgaagtggcaaagaataaggaaaaaccttttattgtaaccgtgaatggggttgatattcgggttttgggaacaagttttaatgtttcggcttatcaagaagatgtggtgaccacgttggtcgaaggaaaggtgcagttgaaaaaaggtaatgaacaggttattttatcgcctaaccagcaagcaatatggtctgatgacgagtttagggtgaaacaggtagatgcccgtaattttgtattgtggaaagagggagttttttattttgaagatgttgatttggagacaattctggatgatatggcccgctggtataacgtgaatgttttttatatgaacccagcgttgaaagagatgaaattctctgtcgagattagacgttatggggatataaacgagatcctgagaagaatagaacaaactaaacgtgtaaaatttgaaataaaagatagaactataaacgtgtatgaataaaaaaagacagacagcacccccatgctatctgtccgaatacattcaatatttaattcaatgtaaaactcaagaacaaagttatgaaaaaaaaatgtaactctggtggtcttatgaaaataaggctgcgaaaaacattgttggttatgaaatttttgtgcttttttttcttgttgtctgtttcggtatcggcagcaagttattcacagaatgcaaggtttactctggcattggaaaatgtcgcattgacggatgttttttcaaccatccggaaaagtagtgagttcacgtttatctataatatggatgacgtgaggaatatccgggtaaaatcaataaacgtacatgaggctactatccaagagattctgg

SEQ ID NO: 10787 - DNA, 7332 bp, Unknown
  gut microbiota DNA sequence
gacctgcatgagtgtaaacccctgcatcggtttctcgggcgatacttgatcccacgacattacagattccgataaccgtggccccgtgtgctttggcatacttgatggctgctagcgtgtcggccgtttcaccactctgtgaaatggcgataacgatgtcgttggcgtccacgatcgggttacggtatcggaattccgacgcgtattccacttctaccgggatccgggtgaattcttcaaagatgtattcgcctaccgttccggcgtgccatgacgtaccgcaaccgataatgataatgcgatgggcgttgaccattttcgggataatctcagagataccccccagatagatctccgatgcctcggcattcacgcgtccgcggatcgtgtcgtatattgaatttacctgttcaaaaatctctttcaacatgaaatgcgggaaaccgcctttctcgattttctcgatgtcgatgtccacttgttgaatacttaatgaaacaggggtgtttttgatcgttttcaagatcatttcgtccctcttcaagatggcaacatcgtcatcgtttaagtagatcacgtttttcgtgtattccacgatgggtgttgcatccgaggccacgaaatattcactttggcccacgccgatcacgagcgggctaccttttcttgccaccacgagctggtccggttcattcttgcataaaacaaccagtccatatgccccgataaccttggtcaaagcgagacgcacggcattctctgcgttgacttggcctttcgtgtaaatgtactcgatcaggtttgccagtacttccgtgtcagtttcactttggaatgaatagcctctggcctgtaatttttcctttaataaagcgtgattttcgataatcccgttgtggacgatggagaaaagaccgttcatagaagtatgggggtgagcgttcgcatcatttggttccccgtgggtagcccagcgagtatgtcccataccgatcgttgcgctggtgtcttccagttccatgtgatgttccaggtcttgcacccttcccttgcacttgtaaacttggatgttattattatggatcaacgcgattccggcagagtcatatccccggtattccaggcgtttcagaccgttaattaagatcggacaggcttctttgggcccgatgtatcctacaataccacacataaatgttatgttttaatgatttatattaatgaaaacaagcggcataacaaccattgccgcttgtttatattttgttattcaataatcttgtcgaaaaagtcggaataagcctcgatgtaactttgttcgcccgggtattccaaggtaggtttcttcagatcggtggcaaaggtacggagttcatcgtccacgtctttgtggttaaaaatgattccgtcagcgtattggaatgccaatttattaatattcgtgtatgtcgggtcttttaaaagtgccacgtctttccgggcaaccccttccgtgatcgctttttccccgaatttttcatctagtttcccctcgaatttgtcgttataagtagagaatactactttcgttttggagaaaacagggtcatcatgatattcttttttcaggtaaagaggaaccagtgcggtgaaccatccttggcaatagatcaagtcaggagcccatcttagtttgcgcacggtttcgaatactccccgggcgaaaaaaatagatctttcgtcgttgtccgggaaaaagtttccttcctcgtcggagatcgtgtgcttacgttgaaaataatcctcgttgtcgatgaaataaacctgcatccgtgcagcttggatcgaggcgaccttgatgattagcggatgatccgtgtcgttgatgatcaggttcattccagaaaggcgaattacctcgtgaagttgatttcgtctttcattgatgcagccgtaacggggcatgaatgttctaatctctttacctttgtcttgtatcccttgaggtagatatcttccaatatttgccatttctgattccggcagataaggaactatctcttgagaaatgaataaaactctttttttagccataactactacttttcccaaaaaccatacaaagataggcattttggttcagatttcaaaactactttggaataaacctctctcgaaataaaccacttgaatcttaaaaacgatgcggagtataggatttttgactgaaaattttgcttttatgatagatttatataacattgcgaaactctttttaggctgtaaattaggggaagactgtactatggcgtggcataataaacagggcaaatacggggaagaaaaggtgaaccggtatcttttggatatggggtacacggttctggagcgaaactggcgggtgggacaccgggaactggatttcgtgtgtcttgacggggaggtgctggtcgtggtggaggtgaaaacccgggcagatgacgatgtgtcacttttggatttactggattacagaaaaaagaggaatttacaagctgcgggggctgcttatctaacgaaaaagaacatccaccgggaaatacgattcgatttggttgtggtcaccggggccgaaatgcatttggaatatataaaagaagtcattgatttgttttaaagaaccgggtggcttttgtcgtgtgtgtggtgtggtaggaatatgaaaagccacccggcataagaaaagtgtcaatagggatacttgtgtattatcaaaaattgtgctagaaattcggatttccggaaaaaatatcaaattttctttcggatggatgattttgtgtgaaatttactatctttgaaaaataaaacataaaagaaaaaaggatatggcaacagtaaaagcaaaatatttaggagatttgcgtttggagtgtacgcatttgcagagtggcacgaagattatcacggatgcgccgacagataataacgggaaaggtgaggctttctctccgaccgacttgtgttccacgtcattggccgcttgtgccatgacaattatgggaatctatgctaaaaataacggtatcgatttgacgggagccgagatcgagattaccaaaaagatggcggcagaacctcgtcgtattgccgagattgacgtgatctttaatatgccggctaacgggtattccgagaaggagaaaaaaattctcgaacgtgtggcacatacttgccccgtgcatttgagtttacatccggatgtgaaacaaaatttcgtgtttaattggcagtaatggtaaccggggctaccggtttgttgggtagccacttgctgtgtcatttggcacgatgcggtgagacgattatcgcattaaaaagatataagagccacgttgaagagacgatggctctcttttcgtgttattttgattcaccgggagatgctatatcccgggtgacttgggtggttggagatgtgctggatggggaatctgtggccccgtttgtggaaaaagtggataccgtttatcattgtgcggccatggtttctttcaatggcagtgatcggaatactttgctggaaacgaatatcaaggggacggagaatatttgtaagatttgtttggaacgtggtgtacgcctatgtttcgtgagttcgattgctgctttgggagacgctcccaatgagagtgtcgtgattgacgagaatacaccggagatttcgggatcggtccactcactttattccggtagtaagggggagtctgagaaaattgtctgggagtatgtccgccaaggattggatgttgtgatcgtgaacccggctattattttgggggcgggattacggggacgaagtagtgtcaagttgtttgaacaggcgagtaaggggatgcctttctacacggaaggcgtgaatggatacgtggatgtgcgggatgtctgcgagttgatgattcgtttagcaaaagatcgtgccgttcggggagagcgtttcgtgttatgcggggggaattattcctatcgggagttgtttaccgtgatagcccgtgtcgtggggaaacgtccgccttgtatccggatgaccccgtggatgacgggtttggcttggcgtttactggctttcgtgactttgttcacgggaaagaaaccggctttcacgaaggaaacagctcgttcgtctcaacataaatcccgttattccagcgcaaaggtgttgtctctttttcccgattttcattttcacacgcttgaagagacggcccgttttttcaaagatttgtaattgtgggtcacttggggagagcctggggggagcgaatgggaaattgcctgaaggtcgggatattcataaagtcgtggttcttttgattatccgtttaacactctatattcttcgtaaagacgtacaaaagtaatcgtaatagtcttctctctcccatcttgcgcccttttatcgccctttcatcgcccattgtcaatagagcaacaagagggtatgaacttctcttaaagggttacaacagattattactatttctttccaattactctgtggttggaatgtaatatcaatggataatttattaaattcgcgttcgattataatttagatatatatatgagcgacaattccctattagagaaattagagacattttatattcgtttccgtgagatcgggcagttgataaccgacccggaggtgatacaggacatgaatcgtttcgtgaagttgaataaagagtatcgtgatctggaacagatcgtggaggcgggagacgagttgaaacgtgcggtgagttcttacgatgaggcacaggaaatattgaacacggagactgataaggagctgaaagagatggctgagatggagatcgaggagctggatgccaagattcccgaattggagtcgaaggtgaagatgttgttggtgcctgccgatccggaggattcaaagaatgtgattcttgaaattcgtgccggaaccgggggggacgaggctagtcttttcgcgggggatttgttccgtatgtatacgaaattctgcgagtccaaacgttggaagatagaaataaccaattatagtgaaggaacttccgggggatacaaggaaatcgtggcgaacatcacgggagatggtgtctacgggattatgaaatacgagtcgggagtacaccgcgtacagcgtgttccggcgacagagacccaaggacgggttcatacctccgcggccacggtagccgtgctgccggaggcggaagaggtggatgtagtgttgaatccggcagatattcggaaagatacttattgttcttccggtcccgggggacaatccgtgaacacgacgtattccgctatccgtttgacgcatattcccacgggtatcgtggtgacttgtcaggacgagaagtcgcagttgaagaatttggcgaaggcaatgaccgagttgcgttctcgtatttatgcgatcgagcatcaaaaatatttagacgagatcgctacaaaacggaaaacgatggtttcaacgggtgaccgttctgccaagattcgtacttacaattatccgcaaggacgtgtgacagatcatcgtatcaatctgacgctttataacttggctgccgttatggatggcgagttgggcgagattatcgagaaattgcagatcgaggagaacacggagaaattgaaggaaagcggattttaaagataaaagttaaaaactaaaagataaaagttagaaggtatgacttataacgagttatttgaacaggtaaaaaagaaaaagtccttcctttgcgtgggcttggattcagatataaagaaattacctcaacacctgatgggtgccgaggatcccgtgtacgagtttaataaggctatcgtggatgcaacggcagatgtggcgatcgcttataagcccaatattgcgttttacgagagtaatggggttgccgggtggatcacgttggagaaaacggtgaaatacatcaaatcaaaatatcccgagatcttcttgattgccgatgctaaacgcggggacatcgggaatacgtccgagatgtatgcccgtgcattcttggagacgatggagtttgattctatcacggtggctccttacatgggagaggattccgtgaccccgtttctgaaatacgaggggaaatgggtgatcttgttggcattgacctctaataaaggtgcttttgattttcaattcttcgaggaaaatggcgtgaaactgtatgaacgggttttgcgtaaatctcaggagtgggggaatgatcaaaatatgatgtacgttgtgggtgccacgaaagcggaaatgttgagcggtatccgtgaaatcgttccgaatcacttcttgctggttccgggagtgggagcgcaaggtggtagtttggaagaggtggctaaatacggaatgaactctcattgcgggttgatcgtgaactcttctcgcgggattatctttgcggataagaccgagaattttgccgtgagggcgagagaagaagccgtgaagttgcaacaacaaatggcagaattgcttgttgctaaaggagtgatttaagagaaagagacggaactatatttaggaaggtgtgttgcttggcgacacacctttttcattatagatgtaatagctgtgttaacagatagtccgaatacaagaaagtattggagtgtattaaaaactcgtctcaaaagggaagtgagttgactacaatttgtagtcagctgaaatcactctcgtccgatggtaaatattgtaaaacggatgtcgctcgtttttcccacggacgagatcatcgtggacgatcaggggtatgtttttttagtatgttgataacaaattctgcacgttcttccggggttcctttaggtacgattataggggtgtaacctagctgttggtaggtggcgaacatgatatcgtaggtctcgatggcttcttggtaggattgcctacgttcggaatcggttttgtagatttcggaccaaggaggaaggatgaatacctgcgtattgtagcgaaaggcttgaacagtatgtcggagttcaggtaatataggctggtgggtaaggtgggcataagcgagggtgtcggggatgccccggtcgaagaaaagaacagattcctgtttttggtgctgttcgaaggattccacggagcgggaaagcatgaggtgggtgtaagcgggaatatttgcccaagggagagcatctccgttttgggagacttgttcccgaataatcttcctggctacttcgggaacatacgggaaaccttgtttggccaacacttccagtaaggtcgttttgccaacaccggggcctccggtgatgataaagaaattaggtttatat

SEQ ID NO: 10788 - DNA, 9335 bp, Unknown
  gut microbiota DNA sequence
tttgatacattgttagggtgtttgttaaaatttttgtttaatccgagtcaaccattttcaggaaagtacacaggttgtaatagtgaattgtggcattaaattgagaggacaacggtttatagtccttcattctatgcttgtatgttgcgaaattttattgccttgtaagttgctatttttcaggaatagtaaagtcggttgggacattctttagcacgaattgggcggttgtccggctgcgttgctcgactaacgaggggatgtctccaatgatttcccggatgatttcctcgttgtaatggcggatcgtgatgagtttcacgtcttggttgtagcgtacctcgaattcttcccgaagttgatccagaaattcgttgaacacggcgctgttgcaatccacgcagaaagagaaactgatggcggagttttgcatcaggttcagttttaatttatattgggccagtacggcgaatatgtggcttaatttttcttctgcgataaaagagaagtctcgaggggtaagggtcaacaagcattgattttctttgttgatgtagattggcggtaactttaggtgttcgtcaatttcttgtatcacggttccttcggattccggatgcaggaatgatctcacgtagagggggatctgtttattctggattggttttatggttttcgggtgaatgacttttgccccgaaatgggatagctctatggcctctttataggacatcctgctgatcacttgtgctttttcatattctttcgggtcggcattcatcactcccggtacgtctttccaaatagtcacgtcttcggcatttagcaagttcgctaaaagagctgccgtgtaatccgacccttcccgtcctaaggtagtcgtttggttggtgcgggttccggcgataaagccttgggtgacgaatacggacgatgtgttgaagtcgaatgcatctttacaaagttgttcggaaagttccagatcaatgttcgcgttgcgataattttgatcggttttgaggaatttccggatgtcaatgaattgattttcgattcctttcattttcaagtagtcggagatgatggttgtggaaatcagttctccgaagcaaatgatgcgatcgtattcgtagtcatagcatagtgatgattcgcttgccaatatgttttccaagcttgtaaataattcttccaggtgcttgtggatcgtgtcattcaaggggaacagggtatttacaatatccagatgaaagttttttagttctttcatgatggcggtcgctttcgggtcttgatggaaataagcgttgcatagtgtttccagtaagtttgtcgtttttcccatggcagaaacgaccacgataagttgtccatgttgttgatgaacaattgaagagaggtttttaacccctgccgcatctttcacggatgctcctccgaacttaaaaactttcatttaggtaccgattaaaagtaacacgaaacaaaagtaaattttaaattgtaaaatgcaaaactgagatgttgaagacgtgttttttggggggagtattgtaatatacaagtgtgcgaaaaaaagtggtattaatctattctgataatatttgaaattaattttgttgtaagaattgctatttagcattatttttatatttttgtgggatattctgattttggtgattggcgaataagattattaaccataaatatatgtaattatgaaaaaggtctggttgcgtggtgtcgcatgtctatgtgtacttttaagttgtacccgggttgaatcggatgaggcgggagaacgggaaatttgttttagggggaatgtacttgagttacaacaagttaatttgttcgggtcaagagcgggattgggtagtggggataaagtacagttgtatatcgtggagcaagatgaagagggattaaaattgcctgcaagtgaggatttttaccagatgagtagtgatacggatgggaatgtaaattttgaagacggggaaaagcatgtgtacccgaataacccgataaatatatatggtttttgttgtaagggaatggaaggaaatcccgtggatctttcgaatgtccctgtgagggtggagggagaacagaagtcggaggatgctttattgaggtctgatttcttatacgtgaaatcggaagggcgtcatcgggcaactgacgacgcaatttcgttggattttagtcatcagtttgtaaagcttcaatttcattttagaacggataccccggagacagttgatttggggcagataacggctcttgaggttttaaatgttgttcgggagggaaattttgacgtgaccacgggtgagttgacgttgggagatgctgttgatgatatacgggcgcaaccggcaaatgaatcgatggtgattgttttgcctcagaaggtgaaaggtggggatgttttgtttcgtttcgttcaaagtggaaaagaaagatcatattcggttccggcagcggggatgtcattggaaaaagggaaattatataaatgtgatattttgataaatcaatatccgggggcaggcgataaagatgtggtgattagtacccgggttgaggattgggacgagtcggaaccgccaatttatattgcgtttgaagacgggcagaatgtggtggcaacgttaacgggtgtttcgaatggggtggtcgtgaatcgggcggatttgtatttgtcttctgaaaataaagtccatgaaaagttgaatattcccgtgatagataataaaatggagtttatgtttccgagggaaaaggagggaggaacattgcagttgaataaggctcatttttacacggaggcgggagatgagtttgattattattttaaggataaggagttgttgggggataatttggacgagttgtttttggtggcgccaaaggtcggggatatttggggagatggggtgatctttgcagtaggcgaggtgacggggtatgatgaaaatacatcttcttttgtaactgatgtaaaaggagtaaatgcctatcggggacggatggtgtcaaataaggcgttggggaaattggcttggtgtaaaagtggtgccaaaggagaaaaggtatcggtgggagcgaatgatgaaaataatggtaaaacaaatatggttgcattgggaaatttcattaaaataaatagtgatgaattggagaattacccggcatttatggcttgtgctgatctggggaaaggatggtatttcccggcatataacgagataaggtgtattgtggctaataaagatatgttgaatgtcaaaattgaaaaacaattaggagatccaatatctcttgttgagttgtatgggagttctacagagaagggaggggagcctacgcactatattggtcctgataaaatagggaaaacggtatatccatatactaagatgagttcagcaaaagtccgtgccgttcgtgcctattaatgaaacttctcgtggtgaatcaacgtaatcttttaagatgaacttgcgatatgactgatacgtcatgatgttgaggggaaacgcattgtctttgtgataaggagtgcatggtggggagaagataaatgtttcgtcatcgtttgcgatcctcttcattaatttcggctatacgcatggggatttgaaaggaagaaacggaataaaacccgcaaaccttttaaattaaagattataactttatatttgcaaaaaaattaaaacacataaccatgataatgcataaagttacaactttaaatcaatttattattgaacggcaagccgagattcccggggctaccggagaattttcacgacttttgcaccatataggtattgctgccaaaaaagttcaccgggaggttaataaggctggtttggtagatatacttggaaaggttggttctatcaacgtgcaaggagaggaccaacagaagttggatgtctatgccgacaaaacttttatggatgagttgagggcgagtggcgagtgttgtggggtggctaccgaagaaaatcaggatattgtggttttcgaggagggattgagcaaggatggaaagtatatcatttgtatggatccgttggatggatcgtcaaatattgatgtgaatgtttccgtgggtacgattttctctatttataaacgtatttctcctatcggggagccgctcgtgatggacgatttcttccagcccggaacggagcaggtggctgccggttatgtgatttacggatcatcgaccatgttagtgtatacttccggtaacggggtgaatggtttcacgctggatacttctatcggggagttctgtttgtctcacccgaacatgcagacaccagaaagtggaaagatatattccattaacgagggtaattacgtgaatttccctgtgggtgtgaaaaaatttatcaagtattgccaagaaaaagatgaggcaacgaagcgtccatacacgtcccgttatatcgggtctttggtggctgatttccatcggaatatgttgaaaggtggggtgttcctttacccgcaaacaagttctcacccgactggaaaattgagactattgtacgagtgtaatccgatggcatttattgccgaacaatccggcgggttggccacggatggggagcgacgaatcatggagataaagccggaagcactccatcagcgggtgccgttatacacgggatcgaggaatatggtacagaaggtacaggagtttctgacattcttcaataatatatagaaataaagaacttcaaatggatgattgtaacagcgatcatccatttgaaattaaagaggaagttaaaaataaatcgaaaatatatgatagcaaaacaattaattgagccaaagagcattgtggtcgtgggtggttccgatgacattcacaaacccggaggtactgtgttacggaatttgcaggatgggaattttaaaggttcactttacgtggtgaacccgaagatggatgaagtgcaaggaattaaagcgtatcgtgacgtgaaggatcttccggaggtggattgtgctattttagcgattgccgctaaattttgcccgtcaaccgtggaggtgcttgctaaacagaagaacacgaaagcatttattattctctctgccggattccatgaagagaacgaggagggggctaagctggagcgtcagatcgtggagacgattaattcggtaggagggtcattgatcggaccgaactgtattggtgttttgacaaaccattacagtggggtgttcacgagcccgattccggaattgaacccacaaggggtggatttgatttccggttctggtgcaacggcattgtttatcatggactccggaatgcaaaaagggatcaagttcaatagcatgtattccgtgggtaattccgctcaattaggcgtggaggagattttggaatacatggacgagtcgtttgatccgaagacgagttcgcgagtgaaattattatacgtggagagtatcgagaagccggagaagttgttgaaacacgcatcttctttgattcgcaagggatgccggatcgctgctgttaagtcaggaggttctgcagccggaagtcgtgcggcatcttctcacacgggagctttagctagttcggatgttgccgtggaagctttattccgtaaggctgggattgtgcgttgtaacggacgtgacgagttgatgactgttgccgggatcttcatgcacccggaaatgaaaggtcgtaatatggctgtcgtgactcatgccggtggacctgctgttatgttgacggacgctctttctaatggaggaatggatgttccgcatattgaaggagagaaagcacaagagttgttggggaaattgtttgccgggtcatccgtgggtaacccgatcgactttttggcaacaggtacggctgaacaattaggatatatcctggatgcttgtgatcgggattttgataatattgacgggatggcggttattttcggtagtcccggtttgttccccgtgttcgacgtgtacaatgttcttgacgagaagatgaaaaccagcaaaaaaccgattttcccgattttcccttcttccaagattgtgaaggacgaaattgcggaattcgtgtctaaaggtcgtgtttatttcccggacgaggtgttgtttggaaatgccttgtgtaagatatacaagactcctgccccgcagccggaacattttgaaatgccggatatggatgtgaagaaaattcgagaggtggtggataatgcacaaaacggttatttgtctccggatgagattcatgccttgttggatgctgccggggttgcgagagctaaagagggagtatctgataacgaggaggagattgttaagatggcaaaagagattgggttcccgctggtaatgaaagttgtcgggccgatccacaagtcggatgtcggtggagttgtgttgaacgtgagcgacgaggagacggttcggcgtgagttcaatcggatgatgcagatcaaggatacgtacgcgatcatgttggctcaacagttgagcggaacgcaagtgtttatcggagctaaacgggatgataagttcggtcacatggtactttgcgggttgggaggtatctttatcgaggtattgaaagacgtgaaggccgggttggccccgatgtctaaagatgaggctcacggaatgattaaagagttgaaatcttacaagattatacagggtgttcgcggacaagaacccgtgaacgaggataaatttgccgaggccgtgatgagaatatctgctttggtgaaagttgccccggaaattttcgagatggacttgaacccgttattaggaaataaagataacgtggtggctgtagatgctcgtatccgtattgaaaaatagggatttctcatgaaatcttggaaaaattataaccagaaagagagaagaatgatcattataataggagtattgctattggcgatactcctaagttttggtcgtataagcagtagttggaaaaaagggtttgattttttctattcctctcccaaagaggaagtgaatgaagacgcccagttgaaccaaggcttaggtgagaacgtggatgcgtcaagcgagagtgttgaaaaataatgtttaagactccccggaatggcgtggttttccggaggataggtaaagtatgtgtgatgaaaaaaagtgattttatagttatcgggtgtgtaatcgtatgcctgttgcctttcttcgtgtctgattccgtgtattctttttataaaacatttaatgccgagcatggtatgattatgagctttttgaagtttgcgatcttatcgacattgggagaatgtatcgggttgaggataagtgcgggggtgtataaccggaaaggttttgggatctggcctcgcgctatcgtgtggggatttctggggatggggatcagtatggccatgacgattttctcaagtggggttccggtttttttgaagacgatggggatggaaaatgccattaccgtgatgggggagagtttgtcgtgggataaagtgttcgtggctttttgtatatctgtggcgcagaacacgatttttgctcccgtttttatgacattgcataagattacggatacacatatattgactcacggcggaacgttagccggtttttttaccccgatacagatgggggagattatggccaatttgaattggcgggtgcaatggaatttcgttttcaagaaaacaattccttttttttggttcccggctcacacgattacgttcttgttgccgggtgatatgcgggttttatttgcagccttgctaggggttgtcctgggagttttgttggctattgccacgcataaaaaataggcgtctataacttttcgtctttcttaccgtatagtttatagttgataataaggtttaatcactataaactatatttttatggataagaataagattgaacaagagaaatcggggacaatgcaagagggcgtgaaaaatgatactactttacgtttaactgccgacttggaagggaactatttactggatgagcggactagcgagatgaagtggttggggattttttattctcccgcaggaggaagtgttcaccgggttgccaagatgctgaagaagaagatcggggcggataaggtggatatgttttgcgtgaatgatattcaggttggcaagttgttagattataaaaatctgatactggtatgctcttctttgggacgtagtacatgggaaagggagcagagggatcgttgggccaagttcttcccgagtatgcgtaaaatttctttgaaagatcggtttgtggctcttgtcggtttgggggatcacgtgacctacccgaagaatttcgtggatggaatggggtacatggcggagttagtaacagaacttggcggaacacttgtggggaaaacttcgacggatgggtatgtgtacgaggattccactgccgtgattgatgacttgtttgtggggttacctttggatgaggattttgaaccggaaaagacggatacccgaataagtaaatggttggatatggtgttgccggagtttgagaggatttaattgtcagtggcgagctacaagtcgtggtgatgtttgaatcattagcagtatcggaatttgataaataagggtgtggtaagttacatccttattttattttaaggcataggcaggaatttgttgaaaaaaagagttacttttgaggcaagcggtttcatggtttattggtctttaccgtgtaatcgtgcttatgtagaacgcaaaatgtaataaacatgatgagaagtattgtatgcatactactcttcttgatggggagtagtgtatttgcacaaaaggcaaattttgaggcttgtgtcaagttttccgagaggaatctttctgattatgtccacagtttatcggtttatccctcgtggatcggaaattctgattttttctggtattattacacgacgggtgacgggacggtgtattatttggtagatgctaagaaggggaaaaagcaagaattattttcaacggaacgacttgctgcaagattagcggaattgacaggtaaaactgaagatgtccgaaattttaaattgggagggttccgtttcgaggaggataatccttatcgattgatgttttccaagtacgggaaagattttgaatacgatgtgaaacgtgatgtcttgaaagaatattcacgggaaagaaaagagaatcgctttagtcgggttccttattggcagcgttggtccccagatagtaattatatggtgtatgcttacaagcataacgtgtata

SEQ ID NO: 10789 - DNA, 9237 bp, Unknown
  gut microbiota DNA sequence
atgaaaacatatatactgtacatcattaccaccctgttaattgttaatattgggctattcatgataaatatatataagaataaacaaatatcacaaaataacctgtatgactatttttactctatttctagaaaaaaatcagaactagtaacttcatgtgaattacaagcaatcaatcctttcttttatatcggtaaggatacaattaaaaatattaatattaaagacgttatcaaagaaaaaattttatgcttttacttttcatcgcatacatgcccaccatgcctcgataatattcgagatttgattgaaaaaatttttccaaactacaaagaacgaaatgacataatctttatttccaacgacatggaattcagactccttgaaaatttctacgagaaaccaatattttggaataaaaataaaaaattgggccccgcttttgaaaaaagtgaaactcccacattttttatactagataaagatttacaggccaaatgtgtgtttattgcagacaaaatgactcccgaatatatcgaagactatcttcaaatcataaagcaacgctttttagataagaaatagaaactgcctttaaaaattctcataattttatcatatttccattcttattttcagaaagttttccgcaactttaaaaaataataaaggatcgaaaatgtttgttatatgtattatagatttatactaccactgaccctcctcctgttggcatgcaacgggaaagagaaacaggaaaaggaaaacgaggatgagcaatatgccaaaatcgaacagcaggacgagaagacaatcgtgaaagtgcaggtggcccaggaagatcggtttaacttggaattggtgagtaacggaaaagcagaggccaaccggaaagcggttcttaatttcgaggtggctgatgtcgtgagaaaagtgaacgtgaaaaacggggaccgggtgagaaaaggagatattatcgcggaagtggacgatgaaaaagcacggcaaacactggaagatgcccggttagcattaaaaaaatccattcttgatttaagactggccgttataaacgaaggatttaaaatactggacgatacgaccaaattaaccccgcaacgcaaagaagccatgtacctgcaatgcggctacacatctagcctcaaagcattcgaaaaagcagaaaaagagtacacccttattaaaaccaaagctccttttgacgggatcatcgccgacttggaggcaaagccctataatcaaacctccgtctataaatctttatgcacacttattgacgattcaaaaatggaagtcgtgtttaacgtactggaaactgaaatcgggaacctccatccgggaatggaagtcgagatcaccccttacgccaaccatgaaaacacgctgaccggaaagatcacggaagtaaatccccgtatcgacgagaacggcatggtgaaagtgaaggctgtcacagataacgacaagcgactactggttgacggaatgaacgtgagcatattgatcaaacgacagatcgatcataagattatcatcccaaaaacagccgttctcccccgacaaggaaaaaaagttgtatttatctatcaaaaaggaaaagccatgtggcgatatgtcaccacaggatacgagaatagcacggaagtcagcatagaagaaggtatctctcccggcgacacggtgatttacgacaataacctcgggctgtcacacatgaacacggtagtaattgaaaattgaaaatagagaatttaaaatcataaatcatcaaatctaaaattaatatgcgtttatcagctttttcgattaacacgatatttgttgtcatgatgattctgggaatcagcttgattcctaggttgtcattacaattggaaccgtcgtcaaggtcgaacaagttgaacatctcgttttcgtggaccaatgcaaacccggaactgttggaaacagaagtcaccacgaaactggaaggagctttcgctcgaatacgaggattaaacgagatacattccaccacaggaaacggctacggagccattgaattgacgattgacccgaaagaaaatatagatgccgtgaaattgtacctgtcctcgattatccgttcggttgctccgggtttaccggaaggagtccgcatttcaggcgtcagtggcggggaaatacatgacggacgggtacaagaaacagaacgccacttattgatgacatacgtgttaacgggcccgggaaactcgaaagaagtgggaaacttcgcggaagaccggatcgtcccggttatatccaccatgcccggagtcgaaagcatgaacgttaccggaatcgtcccgtttgaatggatcatgcaatacgatcgggaattatttgccgatatcggtctttcggcaaacgatatttccaatgccatttcggaatactacttccggaaagacggtggaaagattctcacggaaacggtccccgagaaaaaatattcgtacctcgtgtttaaaggcaattccgatgatgacaaaacaaacatcatgaacctgcctatcaaggtcattaacggtaaaatcatatatctacacaatatcgtcgccctcgattaccaagaaagtgatcccggatcatattaccggattaacgggctgaatcggataaatctaaatgtatatgcagcgaagaacgcgaacatgatcgaacttgccggacgggtcaaaacagagatggcacaactgacggaaagttttcctgaaaattactcggtcaagctaattcgggacaacagcacggaaatcaaggacgagttatcacaaatccttaaccggacaggggtgaccatcctaatcctactccttttcgtatacctcgtgagccgggatttccgttaccttggcattatcaccacctgcttgcttgccaatttgtcgatcgccctcgtgttctactattttttcaaaatagaacttcacctttacacgctggcaggaatcaccgtgtcattcggtatcatcattgacagcgtgatcgtgatgaccgatcattaccgccattttcacaaccggaaagcctttctagccgtactggccgccacactaacaacggtgggggcattaacggtaattttcaacatggataacaacatcatgaagaacatgtgggacttctcggcggtaatcatcataaatctaggcgtgtctcttgccgtggctctttttttcgttccggcacttatggaaaaaattccgctaaaaccacaaaatagtaaacgcaagctacaccgccaaaaacgaattatccggttcaacagaagatacttacattttgcccgtttcacaaggaagtatcgaaaaatcgtcatcatagtcacgattctcggtttcggacttcccgtgttcctgctcccgtcgagcgtggatcgggacaaatggtacagctcggcttacaacaccgttttcggtagtgaaacttacctcaccatcaagccatatatcgacaaaaccttgggaggatcgctccgtttgttcatggaaggaggcggtgatacatggttacaaagccgaaaaaccacggaaagccagaaaacacgattaaccttgaccatgagtatgccacatggagccacgatcaaacaaatgaacgaagcctttgagaaattggagaactttctctccggatttgaaacgattgccacgtttacctctgatgtttcctccgcaaatcgaggtgaaatggtgatcatgttcaaggaagaacacgagaaagacggctccccggaacaagtaaaaaacgagctgatacgctttgccaacacgatcggaaacggtgactcggaagtgaacggcgtgggacgaggtttctcgaaccggacaagtgatgaattccgaagtgaaagcatcaaagtaatcggctacaattaccgtaaggtcttacaatacgccaatatattgaagcaacgtctggaaaagaatatccgggtcaaaaaactgcatattggtagcgatcgctccccgaaaaccaaagcattcgccgtggaggtcgacaaagaaaaactggctcgtaataactcgaatatcaacaacctgctgggcaatttacattcgttgacctattccgggacctcttccacccgagcatacataaatgatgaatataccacgattgatatccgaccggagaaaaaagtggaggccagcgtgtgggacgtgagaaatcgtcccttgcggggagacaaatcagtgtttcgcctagaagacgtgggagacatcacggaagaaaagaatttcgaaaatatcacgaaaagaaatcaagaatatgaagtcgaagtacaatacgattttatcggggcctatcgcctatcggagaaagtaaaagaacgggagatgaaagccataaaccagatgatgcccgtgggctttcgggtgaaagaaggcaacgactggaaaaactactggcagagagagatcgggggaattgatgcccgtatcctttatatattactggtcatcgggatcatctattttatttgtgctatcctgttggaatccttacgtcaggccgctatcgtgatctgtatcacccccatctcgttcatcggttgttttctaggaggctatttcttcggggtagggtttgacgaaggttgcttggcagcctttatcctgttaagcgggctatcggtaaacgccgtactttacatcctaaacgattacaacatcaaggtccgggaaggtgctccccggggaatacgaacttatataaaagcctataatgccaagattatccccattttcctgacgatagcctctaccctgctgggatttatccccttcctaatcggagacatcaaccccttctggaaaagcctggccatcggaaccatgagtggattaaccttctctcttccggttttaattatctatttaccgatgacattctcaaataaagatacgacctcccctaacccctccttacacaggagaggaaacagacgaaaggaagctcaacaatattccaatgtagctaatcctccccctgtgtaagggggagttagagggggtagccgaatatttaaaatttaaaatctaaaatcaatccatggtaaagtttttattacaacgcccggtagccgtcatcatgagtacgatagcctttatcgtactaggaatcgtggcctctttccgattacccgtgtcgctcatgccggaaatcgatattccggagattaccgtacattatacctgggataacgcttcgattaacgaggtggaaaacacactcacctccgggctgcggggacagttgcaacagataccgaaactgacggaaatacaatcggaatcgaaggaagggagcggcttgatcacgatgaaattcgagtacgggacctctctggattacgcctttatcgaagtgaaccagaaagtggatgcctgcgtgaatagtttccccaaagaggttcaacgcccgacaatcatcaaggcctccacttccgacctgcctgtattttacattaatatcaacctgaaagaatatgattcggaagagaaattcttggaattttgtgaatttaccgatgccgtactgaaaaaaagactggaacagttgccggatgttgccatggtagacatcagcggaatgtactctcccgaactctatattttcccggacgaagccaagctgagaagcctgaagatcacacaggatcagctaaaatcagctatcgacaacaataaccaggtttcaggaagccttgccgtgaaagacgggtattaccaatacagtatcagttttgcttcccagatcacctctccggaagaactggaaaatgtttacctgaatatcaacggcagacttctgcaaatcaaggatatcgcccgctctggtatccgtccgagagagaaaagaggcatattctttaacggagccaagcaatccctctgcttggccgtgatcaaacaatccaatgcccggatgtcggaaatgaaagagaaggtcacgggactacttgaccaatttcgggaagaatacccggacgtggagttttccgtctcccgggatcaggcacaattactgaattactcgattgacaatctcgtacagagtctctggcaaggaatattactggcaatcgtggccatgctgttttttctgcaagatgcccgatcacctgtaattatcgccatcagtattcccgtttcggtcataatttgcatgttgtttttccagctgatcggaatctcgatcaacacgatttcactatcgggattaatactcggagtcgggatgatggtggataattccatcataaccattgacaacatcaaccagcaccggatgagaggaaaatccttgttccaagcctgcctggacgggacaaacgaaatcatcactcccctcctttcttcggtactgaccacctgcgctatatttgtcccgttaattttcatgagcggtatcgcgggagccttgttttacgatcaggcgatggccgtggcaatcggattgttcgtttcactggccgtttcgatcacgatcgtcccggtcgtattccacttgttattcatacatgccaaggaaggaaaagcaacccgttttatccgacaaatcagtttcaagcatcttgaaaattattacacgaatatatttcatttcatctttcatcacaggttaattgccatgagcggttgttttacgattcttgtattggggttcgtattggcattgcaattacgtttggaacgaatgccgacaatagacaccaacgaaatgatcctacgggtagattggaactccagtatccacatagatgaaaacgaacaccgggtaaaagatattatcgaacgatttagcaataaatgcgaagaaatcagttgccacacgggagaaaagatgttttttttgaaccgggaaaagaatcagaacatcaacgaggcggaattttatatacgtaccctccatgccgaagaactgaaacaagttatctcctccatccgggaatacgtcaaagcggattacccgggtgcaaaggtcgatatcactaaagtggacaacttgttcgaacaactgttcaaagacaacgacgtcccactagtcgtgtaccttagcggagaatcccgccggggaggtccggaactggatagcgtgaacacgttcatcgaatatcttgattcgatcatgccaaccttacaactggacaaaccttcaacgtccgaacgcatcgtggttgaaatactaccggacaggctggccctctacaaagtcaatcaaggtgccttgattaacgtgctggaaaagaatatcagtaaaatgaatatcgggaaactaaacacgggtagccgatatgttccgatcgttatcacgggagaagaaaaaacgatactagacatcattcgttcctctttcgtgagcaatagcgatcaactggatattcctgtctccgccctaactcgaatggaaagaaaactggattacaagagtatcatcggacgtaaagaaggggttgttgtcccgctaaacatctaccacatcgatgattccacggagcaaatcatacagaccataaaaaaagaagccggtaaccggaatttaaacaccacgtttgacggacagtatttttccggtcaggaaaccctttgggaaatggtcgtcgtggtaatcgtggctattctcatgctatattttatccttgccgcacaatttgaatcgttgaccctaccgataatccttctcgttgaaattccgctagacgtggctttcacgctacttatcctgtggttgtccgggatttcccttaacttgatgtccatgatcgggatcgtggtaatgagcggtatcgtgatcaacgattcgatcttaaagatcgacacgatcatacgcctacagcgatcaggtcttgccctggaagaagcgattcacgaaggtggtgtacggcgattgaaacccattctaatgaccagtctaaccactattttcgccctcgtacccatgttgtggggaaatgacatcggaacacaactacaacgccccatgtccatcacgctgatcgccggaatgactgttggaacctttgtcagtttattcatcattcccttgttttattactatttagaacgtatttttatctcaagaaaaaaatgaaaaaagtaattaaatccatattccaatacgtgggagccatactgttagccatcgtgattgccgccctgttacgcttttttatcgtggacttttacagcatcccttccgattcgatgtaccccaccatcgaaccaggcgattttatcgtggtgaacaaaatgtacatgggagcccgcttttacaaaaacttcgactttctggacggcgcacacccggaaactgtgcggacaccgggattttcttccctaaaacgtaatgacgtgattgttttcaactttcctacgcatacaaacggtcgttgggacatggatttagggacattttatgtgaaacgatgtatcgcccttccgggagacacgctatcgatcatcaagggaatcaatcacgtcaacggcaaaacgggattcggaaacgtggaagaacagcaacgcctacatcattatcacggggagtacgccccgggtatttacaacgctttccctttcgattactggcaccgttggaacatccaagactttggtcccctataccttcccgcagcgggaaccactatcctactcgacacactaaatttctcgctttatcgtcacctgatcgcttacgaaacccaagctccagtacactcgcaacaacgccaactctacatccgagactccttgatccgggaatacacgttccaaaaaaactggtacttcgtggccggagatcaagtcttcaactccagagattctcgctatatcggtcctattcccgaagactttatcgtgggtaaagcttcgttcatcctcacgtcaaaagacccacacacgaaaaaatacgtgtggcagagatttttcaaaaagataaaataagggatccgcataacacggacccccacgcccccacgatcactctttgtttacttcacgacaaaagtgtaaatgtcttttatgacacggctatacccctcgtttgtaactctaatcgaaaccacatacttaccagctggagctttatgttctaaaggataataaaaacttccgtttcctataatcctcaattcctgtttaaatatcatagcatctccgccttctgtcgcagttacttcttcgatag

SEQ ID NO: 10790 - DNA, 26536 bp, Unknown
  gut microbiota DNA sequence
cgtttatccttccaaggggagactctagacatgattatgaagacattatcacgatggtataacgtggaggtcgtgtttgaagatagtactttgaaagcgttagagttttctggaaacctagatagatttacagatatacaagaatttctttctctttttgaacttggtgtaaatgtgaaatttgaggtaaagaaccgaacggtatatatacggaaaggaaattaataaaagaaaagagggtatagcaagctaccaactatttataccctctcgtttacatattattcatttaatacaaataaaatgtttgacaaatttatgaagaaaaaacgattggatgattatacatcatccctttgttggagaaaaaaatttttagttatgcgtttggtttattttctgatggttggattcattgttttggtgccaacttcagtgagcgcacaggacaaaatgatttctttggaaatacgttcagaaacgttaagtagcgtgttgatgaagattaaggatcagagtggggtaaatatcctttataatgaaaatgtgttgagagatgttccttgtaaggatatgaagttggaaaaagttacggtcgaggaggctttgaatagaatcttcgagggtacacgttttggttatgaggtgagtcggggtgtaatcgtgatcagggaacgtcaagctaaggaaatcatacagaaatccgtaaaggtgtccggacaggtttccgatgaaaaaggagagcacctaccgggagtgacggtgttgataaaaggaacatccattggtgccgcgacagatgttgacgggaaatttaccttttcaatcccggcagggaaacatgtattacagttttcaatggttggaatggaatctaaagaaattgttattgatagtaacaaggagattcctgaaattgttgtggtgttgaagccggcaaaaaatgagttggaagatgttgtcgtgacgggtatttttaaaaaaagcaaggaatcttataccggagccgtaactaccatcactgaaaaagagttgaaaacattcggtaataaaaacctattgacaactatcggtaacattgacccttcttttaatatcttaagcaacaatgaaatgggatccaatccgaatcatctgccagacatccaaattcgtggaacagccagcctgcccaatttggaggagttgcaagacaatagcaaaaccagtatcaatcttccactcatcgtgttggatggttttgaaatcactttggaacggatgatggacttggacgccaatgaagttgccagtatcacgttattgaaagacggtacctccactgccatttacggatctcgaggagctaatggagttgtagttatcaccaccaaagagcctgaaatggggaaattggcattgacttataatggaagtgtcaacatcgaagtccccgatttgacagaataccgcttgttgaatgccaaagataagttgaaattggaacaactttcgggatattatgaaagttattctccttctagagattatttgttaaaaaccaaatatgcatccatcttggccgatgtggaaaggggagtgaacacctactggctatcaaaaccattaagaacgggcgtggggcaccgccataacctccgtttggaaggtggagacaaaagtttccgctactcagcttccattcaatataataacgtggctggagttatgaaagattctgatcgtaacaattttaacgcgggaatcactttgacctatcaccacgaaaaattaatcttccagaacgcgttgaccatcggttttactaaatctaacgattctccttacggttcattttccgattacacccaattaaatccttactggaaaccgtatgatgacaatggaaaaatcgtcaaattgttcgataatgacaccgactattggggaggattgagtcgtttacccagaaatcctctatataacgctactttacatttgttaaaacaacagcaatataccaacattaccaacaatttctccatcgaatggagaccatttgaaggatttattgctcgtggaagagccggcatttccacccaaagttcagaatcggatgattttaaaccagcacaacatactgattttgaagcagaacaatataaaaccgatagcgggatttttagaaaaggacgctacaattacggctccagtaaaaattacgattacgattttgccttgactttgaattactccaaaatatttgccaacaaacacctgctctatgccggtttgaatgttgatctgacccagaaaaaatatagaaactacaacttcgtggtagaaggatttgtggaagaaacattggatttcctctccactgctttacaatacgaggagaatggcaaaccaacaggttctgaaaacatcactcgacggatgggtgttgttggaaacttgaactactctttcgatgaccgttattatgtagattttgcttacagaacagatggttcttctcaattcgggaaagacaaaaaatttgcaccattctactctgccggtatcggttggaacatccataacgaaaaattcatgaaatcggttgattttatcgatcgcctaaaattaagagcttcttacgggcagaccggttctcaaaatttcagtgcctaccaagccatctccacctactcctactatttaaacgaccgctactatcaatggatgggtgcttatcaaaaagcgttggacaatcctaatttggaatggcaaaaaactgacaaatacaatttaggaatcgaaatcaatacattcaataactgtttgaatttcatcgcggatttttatttggaaaaaacatctaatttgctttcttctttggagttaccgttatctaacggatttacctcttacgtggaaaatatcggtaaggtgaaaaatcgcggatttgaattaaaagccaccggatttttgattcgggacaccgaaagaagattaatctggactttgaccggttcgttggtacacaataaagacgagatcgttaaactatcagatgctcttaaatcggaatactctaaacgattgctggaaggcggaaccctaccgaataaagtgcttcgagaaggagaatcccaaaatagcatttatgcggttcgctccatgggtatagatcccagcaccggacgcgaaatgttcttaaaacaaaatggagaggtatcgtacacttgggatgcaaacgatcgggtatattgtggagttagcgaaccgaaataccggggcaatttcagtaccatgttccgttggcgtgacctttccctcaatctatcgtttgcctatcgtttgggagggcaattgtataactccactttagcttccaaagtagaaaatgcagacaaacgatacaatgtagacgaacgggtatttactgaccgttggcaaaaaccgggagacgagaccctgtttaaaggattgaataacgaatccagtacctatgcaaccactcgttttgtacaggatgaacgcactttaattggtcaaaacctgtacgtcagctacgagtttttgaataatccctggttacagaagcatttaggtatacagaccttgactataagcggggacttgagcgatctgttctattggtcgaccatcaaacaggaaagaggattgtcttatccattttctcgccgtttctccttttcattatccatgcgattctaaatttgatactatgaaacagataaattacatactcatactgttgctgctgtgttgtatcactgcttgtaacgactggctggaggttgctccacaagctgaaaaagaagagtccgaaatgtttgaaaaagaagcaggattccggaatgttttgattggcgcgtacatccgcatgaagtcgaataacctgtatggagaagatttgacttacggaagtatagaaatgttagcacaacattggactaatactgacgatttaggtaaatatttaaaagcttataattacgaacagggtgatgtggaaactaaaatcaatagtttttatggaaatctgtacaaagtaattgcagatgttaatggactgttaaacaacatcgatgcacggaaagaggtgttcgagggcaataactacgagattatcaaaggagaggccttggctatccgggctttttgccacttcgatgtattgcgcctattcggtcccgtaccgactaatttgtccgaaggaaccattcttccttacgtcactacagtttctatcgtccccaatcacctggtctcctataacgattttactaccaagctattggctgatttgaatgaagccgaaagatgtttggaagcgaatgacccgattcttacagcttctatcaaagagttaagtacattggaagtggctcaagacgataatttcttgtgcgaccgtcaaatgcgtatgaattattatgctgtttgtgccttaaaagctcgcgtgcagttgtggttgggaaacaaaagcgaagcgttgaaatatgcccaaaaagtaattgatgccaaagatcccaacggcaacgcggtgttccgtttaggtaccaccacggattgtgccaatggagacttgatcttctcttctgaacacattttcaatttgaacgtgtacaatctgagcgattctaaaatcagtgctgctaatacattctacaccaacagcacgacattaaagtatttctgggcttcaggaactacagacatccgtcgtggaaaaatgtggaaagaggtatatgacgattattggtggacctattactactatataaccaaatatactcaagctaccaatatgccggttttggccaaaaactctattcctttattccgcttggccgaaatgtatctgattgcgatggaatgtggatctatccaaaatgcaaacgacttatataaagaagtgtgtattgctcgcgatattactccggtaacttttggcagcacggaagaattattagaaacgttgattttagaatacaatcgggaattttacggcgaaggacaagctttctatgcttacaaacgtttgggtagaagtaaaattttcggaacttctaccgtcggatctgcattaatttacgtgttgcctttaccgaaagcagaaagtctttacatccaataaattgaatatcacatgaaaaaaataacctatttatttatactgtttttgggcatcgcgtttacaggatgtcaggaagaaaaaggattcctgtttcaagatgtcacacgtatcagtttcagcccgaaagaagcgggaaattatgaaatgacctactctttcatttggggaactcaaaatcgagacaccgtttatttgcctgtttctatttccggaagagtggctgaccacgatcgtcagattgaagtcgtgcaaattccgggatatgatgttacctacaatcatgatgaccaaggccatttgaccgattctatcgttacggaatggagtaattctgccgttgccggaaaacattatattgcctttgaggatgcagaagcaaaagcattattaaaaatcaaagcaggagagattaccgggtatgttcctgtcatagttctccgtgataactctttgaaaacagaaaaagttcgtcttcgtatacaattggtggtttccaacgatttagaattgggacaagctaaaaatttaattatgttgttaaatatttcagaccaattggaacaacctgttaattggactcgatatagctccgtgcagagctatttgggtgcctacagcaaaccgaaacacgaactgatgatcgaggtattgcatgataaagtggacgaaaattggttggatcaaatggtcaacgatcgaccgaatctgattttctggagagggaaattccaagaagcgttgaatgccttcaataatgacccggcaaatatcgccagtggaaaagctcctttgcgagaaaatccgaacgatagcaatagtgcagaggttactttcccaagtaacgtttaaccagatgattaattttaattgacatattatgagaatattacatgttatatttaccttgtgtatagcctgtttagaaatcgcctgctatgaagacaaaggcaattacgactatacagacaaattggaaatcactgtttcgggaatacaagaagcctacaaccgaatagttggcgataccatttcactaaaaccccaaattacaccggccaatcgggaatacgactgtttttggggtattatcgcgttcaacagtgggtctaacaacgtggacactatctcttttgaacaggacttggattacaagatcagtttaagaaccgggagttataatttgcttttctgtgcgaaggacaaagcaacaggtatttacgcttacgagagatacaacctgaccgtgggaacagaaaccacagacgcttggtgggtcctaaaagaaaatagcaatggcaccgatttggatttgatcactcctaccaagaccatgcccaattttatctccagcatcaatggtaaacagatggccggggccccggtatctttagctttcactctttattatagcgaattcgattcaacaacgaacgctaacgtaaaggttagttctgtctttgtcgctagcgaacaggacatcgtggctttagactattatagtggaaaattaatcagagattatgacaacttcttctatgaattccctcaaaatcggaaagtaacccacttgttcaatggtcccagtgatattcatgctgtggttgataatcacctctacaccatcccggcgataaaaaatagcgccccttacacccaattttcaatcaaagtggacggtaattatcagttgtcttctcaataccatgctgtcggggcaaaactaccgctgttgtatgatgaaatctcttcctctttttgtagtgtatcacgcggtacttctcttctaatgtacacggacaactccggcatttcacccaacaatatgggtatggaattgatttttatgggtagcagatcccccagcatatatgctcaaggagatgtggcgtatgctatcatgaaaaatggaaacaaacattacttgatgaacattgatggtactctcatcaatcaagtaaacagcaatcccatcaaagaaatggtagagatgccttccgatttaggtgtattgaatgcagattttagaacagtcaatgaaaacaacgatatcatttattataccaaaggtaatgaggtatttgcttgtaaactagatgcttgggaggagattcctcagaatttaggcattggcagtggagaaactatcacctatatggagtatgttaagtttgctccttatggcagtgagccggattggttcgattatgttgtcattgctacccaccaaaacggagaatacaaactctacctgcatccgatacaagccggaaatattcagccggcagagaaagtatacaccggagaaggcaaggtaaaaaaagcattatttatcaaattgatacaattttcttggggaacgggagtttacgattctattgcttcttaaaatgaatgacatactcaagtaaaatatttcgtaaatttagattttgtggaggcatgtttcctttacaacaacattttaaatatgatcatgaaacaactcataacttgtttacttgcttgtatggggctatttgcctgtacagctccttccgtgaccatcgaggggaaaaatgagatcaatcgtcaggaagagttccacctatactgttctcaagcgggtagttttattcctattgcttctgccccaatcgattcaaatggctgcttccatttgagtgttccattacctcaagaaggtttctatttattaggaacagaacggggcgttatgcatccgctctatctgaaaggaaacgaaactattcgtctccgctttcaaacgaagggaatggtattagaaggagaacagacgccagaaaatcaagtattgtctcaatgggaacaggctgcaactttagtgcgcgaacatgcttttctatatgaacgtttcggaggtgggtatagcacagatccggcaacttttacacgggaattggaagacctgcttcgagttcgccaacaactcaaaccggagaaggctaccgacaatgccacttttaactctttgttaaaagctaaaatggaggctgatgttgatttctatgctcttgcttacctacaacgaaatgccggaaatttttccgatacggtaagattatccaattattatcaagaaatgcaaccggaaaatacattgcaacaaactgcattgttacaacttccttacgctggagagatgttacgaacatacgtatggcacaaatacggtgatcctgtcgaattgcgagaagcattcaaatacaaatctacctgtttgagtgattttaaatttcaacaacattatttgtataatgaaatcacccgttttcggtattatgaacaataccaacaactgatagatagcgtggggaagacatttttcggaaaatcctatcaaaacggattagaattaatagaaaaacagttggcttggtcaaaaccgggcattcccgctgttgatttcaaaggaatgcaaccggatagtagttcattggccctttctgaactactcggaaaagtcatcgtcgtagatgtttgggccacctggtgctccccctgtcgaaggatgatgccctatttcaaacagttggaaaaggagttggaaggcgaagaggtagaatttcttagtgtttgtatcggaacctccatcgaatgggacagctggaaagagattattgctaccgaagaactcgccggtcacttgatctttattaacagctggaccaaaggttttgccaaagagtatcgaatcgttggagttcctcggtttctaattttcgaccgcaaaggttacattgtttctgtcaatgcacctgcacccaacaaattggctctcaaagaactgattttaaaaacgttgaagaaataatgtgcaggatgggagagtctctttcaggctctccctttttttgaaccttgtttacttgatgtgatatattgatttatagtgaattataatcaaagcgtgcgatccaaagccgtataaacattaatttgcctggtaattcatcccgtgcgtgtgctgaacagtatcgtggatcgtctcgacgtcagtcaggtgctcgccagttataaaggaggtggtaacagctgttttcatcctcgcatgatgttaaaagtattgctttatgcttatctgaacaatatttactcttcgcgtaaaatcgagcgtcagcttcaggaacacattcattacatgtggttatcgggcggggcacgtccggacttccgtacgatcaattattttcgtggcaaacgcttaaaggattcttttgacgctatttttacgcgggtagtggaactccttcattcggagggttttgtctccctggaagttcaatacatcgatggcacgaaaatcgagtcggttgccaataaatacacctttgtgtggcgtgggagtatagaaacgtatgatacccgtttgagggaaaagacccgccgtatcctctccgaagcagaagaggttcttgaaatggagagccatgaaacacgaccggacgaagaactttccgtggaagagttccaggcccggacatcccgtataaaggaaaagatgaatagtacggatgttccgaagaaaataaagaaggcagtagaaaagacagcaaaggaatacatcccgaaaatgcttgaatatgagcgtgctcttgatattatggggaaacgcaactcctattcgaaaactgatgaagatgccacgttcatgcgcatgaaggaggacgccatgaaaaacggccagttaaagcccggttacaatatacagatagccacggaaaaccagttcattaccaattatgccgtttatcaccgacccaccgatacgctcacgcttatccctttcctggagagttttgaaaaacgttacggcagacaaagcagagtggtggttgccgactcgggttacggaagtgagcagaactatgaatacctgtttggtcctaacctcatcccttacgtaaagtacaatatgttccatcaggagcagaaacgtaagtacaagaaaaatgccttcctcgtgcagaatctgttctataacccgaaaggaaattactacgtctgtccaatgggccagtatctgtttttcatccgggaagaaaaacggaaatccgatgcaggatatatctcacaggtcagtatatacagggctgcaaaatgtctgggatgtcccgttcgggggctttgtaacaaagctatggggaacagacagatagaagtgaatcacacgctcaaccggtacaaagaaaaaatcagatatatgctcaacagcgaagaagggatatttcacaggaagaaaagacccgttgaacctgaagcagtatttgcagatattaaagaagcaggtaagttcagacggttcagattaagagggattaacggagtcggtatagagttcggattaaaagctattgcacataatatcaaaaagattgcggcgtgccggggtaaatatggctttgggtgggataatttacagaaagtaattagtaattacgccaaaaatccgtttttaaagcatgaaggatcattgagagttgcataaggaagcaaatcggaaaaagatcatttgggaaaagaaaaaaaagaggactgctaacggtttattgttagacagtcccttcacgatacccaatggatgggtatcagctaattgtcagtgtgtagagtttgtaatcattttaggtagttgttccgtcagttcgttcatggaactgcctgaaaagacgattcgtccttcgctatcgatgataaagaaggctggaattccaatgagattatattgttctgtgaatgttttagtctgttcgggtaggctacggaattgtgcccatggcagtttttcttctttcagggctttttgccagtcggcctcttgttgatcgagggatatgctgatgaagcgaattgaatccccgtgagttttgtatatttcgcgtaggaatattatgctcactcggcaggggatacaccacgatgcccaaaaatcgatcagcgtgtacccttctctgttcaactgggcgatcagtgatacactttctcctttgtcattgaccacttcagcctcttgtagcggggagccttggactagtcgggaggcatcacggagataactgcggaaatctttcagtgcggcacaggtatcttggcaggaagcaaagagttgttccagttcgtcaagataagtttgatcgtaggtgaatgcgggtttcttcaatgtcccggcaatgtagagattggtagccagattgtcattgttacggataaatgcccggcttgttttgtctagttccgcattcatggcttccaatcgactgttatagtccgggatttgatttgcctgcttgcggagttcctgtatgccgtaacgcaacggaagggtttgttgttggtagcggtagtacgcatcttgcgtggtggaaccttccacccgatagttcttttcttttcggatgtcgtaaagtccgtacgcttgtggcagactgtcgatatgtggtgtggtaaaggtaagtttgccgttttcgacaaaaaaatcaagctcgtaagaacgtgcgttgtttaggctaagtttgcatagggtgggagcatccagttgcccgcgcaactcaaacttcccgtcaatgacgtaagcgctagctaaatctttgtcccagcgggtgactgttcgtagggtaactttcgtgctgtccatgactccggggactgtaccccgcaggataaaatgatcggtaggctgctgcgtacaagcagcagcgccgaacagtaataaaaaacagagctttttcattattctattattttttcttgtctaattttcgatatatcttatttccctaaacattcttccacggcaacccgtaatgcgttagcatcgttaccgctaaaaacgattttgccatcaggggcaatgagcatcaagcgtggaatgccactgatgttgtaggcacgctgagctgcggtaacttggtcgcgattgcctgtccataattgggtccaaggcatggcttcctctttcattgccgtttcccagtctgttttcttttggtcgaacgatatgctgatcacggatagtcgatcttggggatagcgtttataaatttgtttcacgtcggggatggcccagcggcagggaccgcaccacgaagcccagaagtctaccagcgtgtagtggtcgggaagtatatactgtgatagtttcacggttttgcctgtcgggtcggttagttctatatccttgtatgatgctcccttgtacaatgtctttgctatttcagccatttttaagacacggggacgacgcacggtatcctcgatttgttcggcaatgcgcgtcagttcctttatttcttcggcagtgcgaatgaaagtggtgttcaacaagccttctgcgatgaaaagcgataccggagattgtggatgctggcggataaattccattttagcagcatcgatagctgcttccgttgtcagtttcttgggatatagttcgtcaaatcggttgttgtattcctctgtcgtgtattggtcgttttgcatattcagcatggctaaagcattatttacctccgaggccgtcaacagcaaaggcgttaaggtatcgcgatactcataaaactctcgctgtaacggaccgccttccacccgggctttcggtatggcggtttccgatatgagaggatgtacaaattgtagactgtctaaatgggctgcgttcactgtcagttcggagttatcgagaaacatataaatattaaccattttgctcatgtcggatgaagaggtgttagagctgattatcaaattacagtactgcggtgaagctgttacgccgtgtagttcaaatttgccgtcttgaatcgtatccatggccaatatcgctccaccttccatactgcgaagagaaaccatcattccatcctgtagtccgggaaaactgccccgtatcacgaatccttcggggcgggaagtgcaggcactgcataatagcaatgtcgcgataaaaaagaaaattttattcataaagattatttgtaagtttattatttttttgcatctcggcaacaacgtacacgcatcaatctagacagagtaaccgatcctcggtagacagtcgtgtaatgggcacatattttgcggaaccagacggtagtggtctgtaaaccgttgttctctactgccgaagccgaccaaaaatacccgtattcaccgacaaagcataagaaaggggattgtccccaagactctgcatcagctacttcgcctcctaattgaaatgccatgcccgttccttccgctccttggcggagaagggtggcttcttggtctcctcgccaaccttccgaatcggcttctccggcagacattcccaatgctatttccagatttttccagtcctcgtcggtgggcaaacgccaaccttcgggacaaagcgtgcgagcttcttcccaggtatagaagttcccatattccttgtagtctgccgcgaaatcgatatcgaggagatgagagcgaaccttaaccgcatagttagccccgaatagatcgtacgtgcattcgtaataaggtgcctccggataatatttaaggttggaagtcatccattccagatcgccgattcgtacccatccgtaggtatttccgtcacgttcgtccgtgtattcacccgtggcggcgggattgatattcggcaacttgtcatcatcactgcatgagctgaatatcgcccaacaacatgcaaatatagctattatatactttttcataatcaattaaatttaattccggttgcttcgagtaacggtttgatgatgtcatatttctgtctggtatatccattgatgtcattctccccgtatttttcaaagaattcctcttccgtcattgacaggcaggctttgatataagccacggcatcttctttcggggaggaaaaattattttcataaggatcttccaaaaatcccaactccaacgggttcaagatattcgtgggatcccaccagtatgacttgggagtggaatagttattgtagttaatcgagaaaaactgtcctgcttttccatctgtatacttattgcccgcggttcccccgaaagaggcaaaaattatttcacagcaaatgtcctgcgcataagctttacgctcttcttgagtcaatccccacagtctgctgacatttagtgctagacagcgtaaattgttgtaggttaacggggaaccgacataatcataactgacgtccatggtatttcgttgatattcatcaataccgttagccactaacagggagtaaggcatcacgtttttaatatacggtagcaaatcattctgcaggaatgcagtaacttgacgtttttgttccaacgtttgcagatagtcaaacttaaagcgaaagttacttgtacttgttagctggtattccagtcctaaaagttctgtttcataataaggctttccgttctcatccgttcccttgtattcgtgtcggagcgtatcgttgaagaggagatgacatccggtggtattgtaaaaattctccttgagtttcgtttcctcgtccgtggcaccgggtgaagtggcaaaagaattggtcacatcaagtggctccaactcatcttcttgctgacaagcacacaaacaacctgtcaaagcaatcataaaaattaatatttctgatttcatatttctttcgtttatatatctgttaattaccgacaggtatcgatttccctttgcgaaccgggcgttggtttgtttgtagtgtattctgaaaatccaaaacttctttggggagcgtcagcgtgtaggctgcgtcgttttcctccaaaacatattccacgatttcggttggggttgagatgacaggatagaaacctgatttcacgtatttgatataacgatgtgtaatctttttagagtacgggaatttgtcacacactgtataacgacgcaaatcaaaccaacgatgaccttcaaagcatagttcgcactgacgttcgcggcggatgaggtccactaattcttttccgctttcagtcacgtcatggctttcttttaggcgatgatcccgtagcgttttgatcattgtgcgggctgttgtctcgtctcccgaataagctgccgcttccgctgcatttaagtatgcctccgctgtccggaacataaaatggtcggaagattccttataaccgtattcccagccctttacctttgagagtacccatgcatccgtgtagacataattcgtcgatatacctcctatggattctttcatgatataatattgtgtgcgccaatcattatcgccttcgataaaagccgagagtaaatctttggaaacgacgtaagccggatacttattctcttcttctctagaacaatacatgcaaccggccaatggatatcctcccatggagaaaatggtttcgggcgacgctttggttaatacttccgtatccggggtatgtgaattcaggttcaataatccgtcacgcttatccaataccaagtttgcatattctaaggctttcttccaattttgcatgtaaagatataccctgctttttaataaataaacggtaataatatccgcccggtaaggatagtttttcacttcgttatcttttagatgagtttcggcttcatccaaatcgttaagaacctgggtatatacttcctctaccgtgttgacggtataatccttgtcctccacgtactctgttaatttgatcggtatggccggagtatttagcgttttggtacaatacggttgtccgtataaattacccaaggtgaaataataaagagctcgcaggaaatgagtttctcccttgatacgttttttttgtagttcttccacttgattattcacggacaggtcattgacggaagccagtaccatgttgcaaatattgatacaggaatacgcctgcttccagtctctgctttccgaagtacgcgaattaccctcgtatggtagaccgacgctttgttgccacgtgtaccaaccgaacatctggggttgtattccggcaagatcgcctatattgcttcgttcattaaaagccaattcgtctgccatgtgatgggttgcttgaaagaaagcattcacgggtgatactccgtaagtattattttcgaatctgcctgatggcaaatagccttttcccaatagtacttcatccagatcggaaaaagtttccactttagcgaggtcctgcgagtattcttccaaaaaacgggaacatccgcagaataaacttgccacgcaacatagaacaagtatttttttcatgtaatcgatgttttagaatgaaacagttaatcctaaagtatatgtaggccgatcgctcaactggatgctggcgaaacctccttgggtcggggtttgtcccttcagttctttagccgaaatcgtgaacaggttcgtggctgaaaatgatacatccaaccgtgacaaccgcaattttttcagcatcgtttcagtgaattgataggttaggcccaaattggagcatttcaaataattgccgctcacgacacggtggtcgccgtaatcatacatttcccacacggaagtagccaaaggctgaatatcctgatatttatcgctccaatgtctttcatacagagaataattatcatctccttttcctataatagccggaatgttcgtgtggcgctcatctcccggtttgcgccagcgatttaagaagaacttgctgacgttattttcgggtcggatgttctgggcatccatcaccgcatcgctagctgcgttgtaaatagcaaacaggcgaattttgttaccgaggctgtatgcgaagtttccgttcagccggatatttttccaacgtaacgtggtatttaagttacccgatatggttggttcacgtcgtccggagggagtcaggacacgagtatatgtgtcgtatttattcaaaccgcgtaatatttcgggattgtctgcataatcgtcgaacatcggtccgccattcacaggactcagcccgatgaatttgtaggaataaaaagtgccgatcggtttgcctttcacgagagccgaaccgttgaggaagtttgaaagttcatactgatcgacatctactttactcttcattttattgaacgttttggaaatagacgtcgatacggaccagaaccaatcttgagattggtacggcatgaacgtcagagaaacattatacccgtgattatcaatatcaccttgatttacttggtaaatatcattgggaaccccgttcatcatcgcgatggatttatccataaaagcatcctccgtgtgtttccaccaatactcggcttctatcatcacttttctctgaaacagtccaagttccatgcctaaattgtaagaagtggtggtttcccatttcaagttcgggttgggatagcgtgaaacggaagccacgttctctccgaaatgagaatttagcggttctttggaaataatcattaccggactttgatcactgagcatgtttccttggtaaccaaacgatgctttcagacggagaaagtccaaccactttgtctctttcaagccgggtaactccgaaatgttccagttggcagaagccgaccagataggcaacagtttgtcgttactttggtctccgaatgcgttggagccatccacgcgagcattggtattcacggtaaaatagttgtagtaactataagatatggaagcatagcttgatatggtattacttttaccatcagtcattcgagcgggattttgtagcacccactgggcataatcgggaaatttctcatgatcaatgtcattcacaaaactcatgccccggtctttgtaataaccacgttcggtgcgtgaataacctcggttgcgggtagaactcatttcaaaaccgatggaaccgttaatgttatgctgatctgatttgccgaaagagtagttcccgtccaactgtaaacggacggtataagagtgattgtccgattgattgtgtgaaagttctcctccatagggcaagaggcttgttcccccggtataggtaggattacctagataatccggttccccttcggttctgggtgctggcaatacaccatattctgtgcctcgtaattttgcggcatagttggtttgctctccccaccagctctcctgaatcgtattcgatgtctggtaggatgcaataacattcgctttcagccaatttatcagactgaattgtaagtttgctgtaacagataacgcagaaccacgctggttgtaggaactgttttccaattcattgagaatattgtatcgataatattccggactcatggttccccattttcttttctgaaaataaaaatattccccattctcgtcatatgcgggtaacgcccgagttgttttataggcataatccatcggagataattcctgttgataatactgacgggtagagacattcccgttcacgttcaacgaagcgttgaaccaggaagtgaggttcgtgttcattttcatcgtggctgtgtagcgttcgttgttactgtcccaaaccacgtcattatcacgagtgtagccgatcgaggcataataagttgcttcagacgaacctccggaaatactgatcgtgtgagaatgtgatacagagtttttagttaataaatcgaaccaatccgtgttgataacactgagacgttccacttctttctcgaattgttcatcggttagttcgtgattatataattgattcaatagcccctcgtaacctaccatgtttatgtcatccggaaatggatagtgttgtgcgaccaattctcgagagaattgcatacgttccctggaattcatcacgttaatggcccggtcgttataagaagggcgttgacgaaaggtggtcgttaaattgtaattaacaatggggcgtccgatgcgtccttttttggtggttaccacgataaccccgttggcggcacgagtaccgtaaagagcggttgcggcggcatctttcagcacgtcaatacgctcgatgtcttgcgggttgattccggcaatggcgttaccgatacgattaatgtaatcaggatcattcaagtctgatgccggtacatcaacgggatcctgcatcacgataccatccagtacccacaacggttcgcggttaccaatcaacgtggaagtaccgcgaatacgtaacttaggtaccacgccaacttctccggagttgctcatgaaaattaaatcgggaatttgcccctgtaacatctggtcgatggaagaaactcccggaatattcaaatcctccattttcacggaagttacggaactggtggatttccggcggtccactgtttgatagccggtgatcaccacctcatccatttgggtggcttcttcttccatcgtaatatgtaattcgggttctcctttccaaactacttcctgcgttttcattcccacgaaagaaaataccagtgttgtttcccggaaagacggtagaaccagtttgaaccgaccgtctttatcggatgtcactcccgtggttgtcccttttattataatggtcactcccggcaatggcgatttatctttatctcggataattccttgaacgacagctttattattttcttgaggtttgatgattaccgtttgttcattgaatacaaaatcgagtttcgaatccttgaatactcgtttaagtaaaacctccactttttcgttttttgcttgaacgttgagtttcccgatatgttcgaaattccggtgattatagacgaaaaacaaatctgtctgttgctgtatagcctgaaaaagttccatcaccgtacactctttcaaatctaatgtaacgtgctgttgttgggctgaggtatgtgccgatacacttaaaccgcccaaagtcagaaagattactactactaatttcatcatttttccaatttcctgtggccagattgttcctggccatcggatggttcgattttttttcatacttttggaatgttgattaatactataaatacttgacaaaatgttattttaaggttttgatcattccgggagaaaattgccgtttttcttccggattttatttcaatacccgacgataattttattttgtaccctcttaaaatgtacgtatgaggtttgctctattttttggagaatggacataactgattctccccgtggtaaatatccactgaatttttcctgttttactttctggttttggtattccacctgcagatcataccataatgacaactcctgcataatttcctctatagttgcttcttcaaagcagaatcgtccatgacgccatgcgatatatttttggatatttacttgttctacggtggtttgtccggaaaatacatctgtcgaagccatttctcccggagttaaaatatatggaaggccttctttgaacgttacttggactttcccttctaccaaggttgtacgcacatgagttggaatccgggtattgacgttaaattctgtccccaacaccgtgacggtcaattcaccggtacgtacgataaacggtttccttgtattgtggcttacttcgaaataggcttcaccatgtatttccacttcgcgtacatttttttcgaagtttgtcggataactcaagcgtgtatccgaattcaaccatattcgggtaccgtcactcaataccaaacgatactccgcaccttttggtacttctattttgttatatccggattgctcgctttgtggttcctcgggggctttctcgtaaataagggtgccttggtctttaataattttggcaccgtcgaccttcaagacatccgatgttgcttcagatgacaagtttaggacttctccggaggctgttgttaaacgtacggtaccccggtttggttcttgtgcgaaagtttctacggtgttatgcgttttgttttccatgttaaaccaccagtatccacctcctaaaaacagaaatagaacggcagcagccactgtcagttttagaaatatacgcttcttttcctggcgtttacgtgtagttagtttttcttggaatgcttggcgccagcgatcgaagtccgcggcgttgttatccatgtcgccggaatatttgattttatcatatagcactcgatgctttggagtcgcctctaaccactcgtcgaagcattttttttcttgaggtgttagtttcttatttaaacttttttcaataatccaccaatctatcatagtgtataaattatatcattatatacgagtaacacggtaactaatgaatggttacaaaaaaaagattttttttttgtaattccggtggaattgaaaatttgtggtaaggctattgctttgaattattcccgatttaatggtgaaggttctgctagagagaggatggggaaaatgaacatcaatattcctataatgtgttcattgttattggctaatgcttcttttattttctgtatggctctgtgaatttggacttttgcgacattttcactgataccaagacgtttggctatttcagaatattttagattataataaaaacgaagttcgcagatgtttcggtatttttccggtaattcggtaataattttctttatatttttgatcaactcttcatcgtctagccattccaatgtttccgcttgctcgacggcttgcaagtaaagaatcttatgacgatcttccaccccctgatcccgtagataattcaggcaactattgcgcacagttacgcaaagatatgcgccgatattcacagcagactcaagttgagaaatattttcatacagtttgattaaggcattttggacgatatctttggcaacctctccatcaaatacaaaactccgggcaaatctatgcagcttggcaaaataatgatcgtacaattccatgtaagcacgattttctttttgctgtaaacgatgtataaaattttctgccatttgttgagtgcatattttcatttgcaaatatataatcaaaatggagcaaaaacaattttagtgatgactagtccaaataatctgtaacgcttatttaggactagtcaggaatctgcaacaggtagacatcggttttttgggaaaaagtttaccctaaacagaataaacccatggaagtaaatctaaagaaaaacaggcgtgatttaaccgtaaaataatggagaagctactctttattcgttgctcattcagagcttagccggggcttattctatccgggctgcatgagccacgagtaagctctgaatcagtttcgaaaaagaggtatcttctctcttcattctcggtaggattaccattacttcttttattttaacgcacacatggggagccggacaatgatttgaaacactatcagaaagagtctcccatcttaaatagttttttagcctcgttacttctcgccactatacagccgtcgttgttacttaacacgatagttggtttaccaatcagcgagggatcaaaactcttttgcatgaaacgtaaaagttattgcagtcgacaagtgctatcataatatcattcttttcttttttatgtttgacgattaggattttgataagtactgtgatggatgaaatttgtcgtaatttgaaaattattatatctttgtagtagagaataaaaaggtatgctcatattcgtgagatgcgagttgatagaaaacagattactaactattaacttggggtgcgatgaaaaatgtattttatttagcaaggcttgggaatcaacttctgaaagttgttcggtttaatttctcatggaaaaatctacggctgattttattttgtctctgatacgtgactgacaggcaaatgtttaaatactttgccttgaatcatggtacgattgtagttaatattcagtgaattagcttttgtggttatactgaaaaaatgtttaatcgttatcaagtataatcaatctactttaattactaatagcagtatttatgaaaaaaatcatcatgttattgtcattactttcgtgttcaatatatgaagactttgcccagaataaagtttcagatttttacgaaagaacctatcccccgatcttggaaagttgtacagcttctcctgtaatggcccgtctgttttcatacgatgaattctcgtttcggcattcaacaggtcaagttgatattcaaattcccattcatgaattgacaatgaattatttatcgataccaatagggatatcttataattcttctgggatcagaatccaagataatcccggaattatcggttatggttggtcgttgaattgcgggtttaagatctctcgctctatcaggggaaaggatgatttagaatatcccgtgattcaagataaagtgatagatttttgtaattccacggctcttgacggggactacatcaggcagcttactagaatagcccctgaagactcgtataatgccccgaatgcctgggaggataataaaatggacgggcaatacgatatcttcaatatagaactacctaatctaagtgtttcatttatcctagagtataataatggcatttactcggcacgtccgataaacccaaccccgttgtctataaaattgttgaccaggcaaaaagaggagacgaggaagattgacgcaactaagacattaacaagacgatacacggttttgtatggaattgaagtgactgatgataacggaatttgttacaagtttggtgaaacagaacaacgggatagtcgggatcagaacaagtataccgaatacaataaaccctcgactcgtgctggtttgctaaaaacggcctggatgttacgggaagtagttattggcacgaataatattgtaagattcagttataaagatgctgttgattatttcgattttcaaccaacaattattactactgtaatgcatcagaattttttgattcaagatccgaatgcgggctcgcaaaatgatttgtggattcttactggtaatcccaacgcggcaatccatgatgagaatcatattgaatataatatgaatttagcgtggattcgttacaagaataatggatatgaagatgtgcaaggcacgcttgaacccaattattttaaacttataaaaagtattagtaattcggggattgaaattgaattcaattatgatagtatacaaaagatcggtaatcccgaacttccaagtatctcttcctattatagacaaaccctttccagtttgaacgtgttttctaagattaacaacattaagaacggaaaaattaaagaagtcattttttataatcatgaaggatttttggatagtttgtctatctcgggaaatgggaaatacaagttctcgtatgatcgcagagataaaaatttctcgatagaccagtttcaaaaagcgattgattggtggggatattgtaacgggaaaaataacgtctcaagcctacctcgggatgctagcgggaacaatgagagtagaagagctcctgattccctgttcaccaaagtaagggctttggaaaggattgtttacccgactggcgggaacgtcaagataaattacgggacacatatttttcaagatggttcatatggaggagggctacgggttgaatccttggagacttttgatccctcttcaggcaagatgatcacgaaaaggttcaagtacgagaatccgaggtattccgggattccagtaggggtaacagagtgtagttctcgatatagaacacacttgtatgctggtaaagatataacgttagtgttttcggtagggaatggaccaagttaccatgcctttgcttatgaagttgatatagatgtatggtctactttcacgttcccggttgtttacactccttatacatcttttaatgcctggtacgagagagtcacggaagagaatgaggaaggcaaaattgaatacaagtttgaatatttaccaacagcattagatcccgaattcctagatggaacgattgattataccatgagtcatcgagaaccgtctttaacaagccggcgcattttcaaaaagaatgagaccggtgaatttgaattggttaggtcggtggtgaacacgtatacccgtgatttcgtatctttttacgaggtgaacgtggtaaattcatatcgagaaatgtctacttacgagggaataaacaggagaggctcgtacgaggatttatccgaattgaatttttcgttatacccttcacgtgttatgcgaactttggctatcggacaagtttctctcaagaaggtgcaagaaacatcgtattttcaaaatgatagtacctcgattatcacgaattatctttacgacagggagcgtccatataatttagtatttaaaactgtacttcctaaagatcgtgatcttatcactcaaaaatactattacaataacaaccagcttccagaaaacaagggtattaacgcatcagatcacgggctaggtaattgtacaacacataaaacgaccgtgatccagcaggagacacgtcggaataacaagcttgtcagtagtagtttgacttatttcaaaggtgttattaattctgccttgaaagtacctaaagaaaaatattacgctggaccggatggcgtgatggaaaagagagaagagtatcccaggtatgacgagtacgggaatcccgtggaaatcgttaaagataaacattcaaccatggtgaggctttggagttaccaggggatgtatcccgtggccgagataagaaacgcgacatatcaacaagtcgagaacgcgttgggaactctcgctgagacattaccgggaggatggttgtcggatcaggtttgggtaacgttgaatagtaatttaagatcctcggtatatcttaaaaacgcccttgttacaacatataaatacaaacctttagtcgggataattgaaatgatcgatccccggggaaaatccacgtattatgattatgacgtgcacggacgtctaaaagaaatctacataatagaaggtggcatcaaaaaattactccaggagaacgagtacaagtattataacgaaaaatgatgaattatgaacggaataagaataatattgattagtttgttgataacgttcttcttctttttggaagtacgtggtaatcaagctggttttccaacacgaggtgaacccgatgaaggaatgatactttgcgagaataataatttaaatgatgagacacccacgtatgattatcatttacaaaacgatgtcgtggttctggtgttcaaggcggtatggtgtgggcaatgtcgaatgttggaattgacgatattgaaagaattggaattgtattttcaagaagatcctgtaagttttatctatattgatattgattctttaccggaggttgccgaattttatgaagtaacaagtttgcctttcatggcattttacaagaacggggaattaaaggagagtaccg

SEQ ID NO: 10791 - DNA, 260 bp, Unknown
  gut microbiota DNA sequence
aaaagtgtgtaaattccaatttatttatttttgtaatagaacagtcaaaaataacttattatggaatttacacctgagcaaataacggaaataatctccgaaataacaaatggagaacaaggattccaaggtcttgtcaaacaaggtcttgaaagtttaatgcatagcgaacgtgcagttcataacgcggaacataacgacgttagcaacggttatcgtgatcgtcgagtgtgctatgaccgtaaagtgtttgagcttcg

SEQ ID NO: 10792 - DNA, 28923 bp, Unknown
  gut microbiota DNA sequence
ttatacatttttcatatcttaaaacatgaaaataagaattctcatatttctacaatttctttactttccccttttcgcacaagagggaaatatttatcaatatctcaaacaaaaatggtcgaaagaattttcctccgccaaagatattacaacaacctatcatgataatataaaacgaatggacaaaaaaaatatcccattagccattcaaaataattgtttcatgattctaaaaagtggagaatacatcacacaaaataaaggagaaaaagaagatataaaatctttacttcgccaaatacctaccattgagttaaacgatcctacagtagccgcattcctgcaacaaaactctcccggccaatggacagattattattatatgattcaagccttaaaaaaaggagaaactttcgatgccgcaagagacgggatttccatctccacacaattcttcgcaagacctctcaaccacaacgactataccaaattaaaagatattttttccagtaacaataaactactacatgatacttatctagaaaaaatgaaatttcttttccaaaccaatggatgcccggaagaaattgcagaattacgccctaccatagaatcacacgtagaagattctccattaaaacaagaaatattaaaactatacacacaatatgaacctttaagcaaaggtcaatcggcaccattatcttcaatgaaagatacaaatggaaaaaactattcattcgctgatttcagaggaaaggtgattatcgtggacgtttgggctacatggtgctgtagctgcatcgaaaaaatgcccaaattcatgcaattaaaagatgaattcaaacaatataaagatatcctatttctgaccatctctattgatcgaaaaagcgaccaagacaaatggttaaaagccatcaaagagaataacatgacaggaatgttgaatcttatttcggccccatcagcgaattctcattttgaaacagaataccaaataaatggagttcctcgttatttcattatagacaaagagggaaaaatcgtaacggtcttcgcccccggtcctggaaaagaaatgaaagcattaatccaaaatacattaaaacaataattatgaaacgcatctttttaattagtttattattttcccttgcaggttattgtctcgcccaagaaggaacaaattttgaagacttaacttttaaagaagccctcgccaaatcccaagcaacagggaaaaagctattcatcgattgctacacgaaaacctgcgggccatgcaagtacatggtaaaattcatcttcccgttaaaagaatgtggcgactattttaacagtaactacatctgtatcatgaaggatatggaagaaggtgacgggattgatattgcacaaaaatatgacatacgagtatacccgacttatctgatactcaatcatgacggaacagtatactgccgtctggatggaggagccgtatccagtcccaaagaagacttcgttcaaaaagttaaagatgccattgaattggcagaagccaataggaaatactccgcgggagcacgggatcgttcattcttaaaagaatacatcaaaatcttgcgtgttcacgacaaaaaacgcctgcaaaccgtcatgagtgaaactatgatccaactgggcgtggacaaactatgcgaaccggagaactggactttgatcaaaacagaaataaacaacgtggacacccccctgttccgatatcttgtcgaaaaccgggcaactttcagtaaacacctcggtcagcaagaggttgaagacaaaatcatatcggtttactcggaagaattccgtgtactcaaaatgatgggtatcgattttgacaaacgaatgacagacttgaaacaatttgaaaaagaccattacaaaggtgcccttccactgagatatcgcatgctcttctttcatatcattaacaagggacaaaaagaccgggtagacgaaatcctcaaagttctccaaaacatgaacaaagaactcccagacgaggccaaccgtatgtcagtcctacgtgaactcaccggtttcgaacgaatcgccaaccagcaacaaaaagaaaaagccagcacgtacttgcaagaaataagcaataaccttcaaccgaataacgcagcctacgtgcagagtctgataactcgtatcaagaaataattacacttgaagagatcatctgtctaacaacggatgatctcttcaaaagtaacttcccgaatctccggcaacccgtcgtattcactacaaacataacaggcataacccgcatctaccggacaagcattcacatgcaggggcaacccgtttatcccctcgtacagggaaacacgttctcccgtgaacgtcacgataaaactattcaacgggcgagtcagtcctgtacctatatatttcagaaaactctctttcaccgaccagtaattgaaaaataaccgatcttgttctgttccgctcaaggactttagcatccgtacctctcgctcatgaaaaaagcgtccggcaacctccatccgtgctttagcccgtttttcgatatcaatcccgacctcccgatccgacacggcgcaaaccacgtattctcctgaatgagagagattaaaaaacacattctcccgaccgacaatgaatggtttacctttttcaccccggagtatccggtaacttcctaacggcaatccccaatattcccgtaaagcaaaacttatcaatgtttcccccagcaaccggcgaagagccacctccttatttttatatcctaagacttcattataacattcaccggaaacaaaaccttgtaagtgaataaacaaattttctcgttccactttctccggtacccgtatatacaatacttcaatcataacacaaaggtaaaaaagttagagacaattaattttctttccaaaacaaataatccagaaaacctaataaacacgggcatcttaacgttattttaaaattacatggtaaaaattttaagaaaatattcacatttctcggcaaaaaacttgtttatatcatttttatcttctacttttgaaacatcaaattaacgtttaaataacatttaaagataaacgtcatggaagcaaagaaaacatcccgttccgatcttgagaacaagcggtttattttccgcgagatcggttttattgtagccttggctacggtgttttttgcctttgagacaaaatactaccaagaagaggccaaagagattacgtttcctgtcgagacgagtgacatagaggaagttcttcccgtttttgtaccacaaagagcttcccaaccacttcccaagatttctgtgaaacccttagatttcatcgagatcgtggaaaacgagatagatcttgaaaatgaaatggacgttgttgatgaaaacgaaaatacgaaaggctctttaacgggtaaagctaccgactggcaaaacgggtataacgatgagggtgatgattccggagagggagaccttccgtttatgatagttgaaaaaatgcctcgttttaacggagacttgaacaagtggcttagggaaaatttaagatacccggcaagatgtgcggaaataggcatcggaggaaaagtatttgttgaattcgtggtagagaaagacggtagcatcagttccatcaacgtggttcgctccgctgatccggatctgtcacaagaagccatccgcgtggttaaggccatgccgaaatggattccgggaatgcaacgggacaaagctgtaagagttcggtttaccatcccgattacattccagttaagataagaaaaacatacagtgatttacatacaatacgaacatcccgaaaaaggacaaccttagattggttgtccttttttacttttccctcccaagctatcatcagcatgaaatcaacatgatatgaacaacaacgcaaacttttaagaagattttaatgaagtttagcgatcattttaacattttcttcaaaaaaaaggggagaaatattgcggtttattatgaatttgactatttttacccacgcaaattgtgagaaaaacagaactataatattaaactaataacatggaagtaaaaaaatcacctaaagcagatcttgaagggaaaaagaccattttccttgagatcggttttgttatagctctagggattctactgagtgctttcaactggaagaccaacacgaaagtagaagaagggtttgttattacccaagaagagcaggttgaggaggaaatcattcctattactcaacaaatgatgaagccacccccaccacctcctccagccccgaaattgacggacttgatcgagatcgtggaagatgaattaagtattgacgaggaacttgaaatcgacgacgctgaagctgacgttgaaaacaagaataattataacttcgattacgacggagacagctggggagaagaagagagcgacggagaagctgatattttccaagtagtagaagatatgccgcagttccccggaggtagtgtacaaaaatggattgcgaagaacgtaaaatacccgatgatcgcacaagagaataacattcagggtaaagttttcgtacaattcgtgatcgaaaaagacggtagtgttagcgacgtgaaagttgccagatccgttgacccatctttggacaaggaggctatccgcgtggtaaaagccatgccgaaatggaaacctggaaaacagagaggtaaaccggttcgagtatcttacactgtacctatcaacttccagttacagtaaaaagacatgttaaattataacaaggggctgtcgatcatcgtcagccccttcttttcctatttatgagcgaatatttttacacgaaaaaagaagcagaaaaagccattcttgtaggtgtagcgctacaatcagaaaacatcagctacaacatgatgtgtgaatacttggacgaactcgcattcctagcagaaacggcaggagcggaaactgtgaaaatattcacgcaaaacttggataagccggtaacggctacctttgtcggcaaaggaaaattggaagaaatcaaaacatacgttgaagataacgatattaacttgattatttttgatgatgaactaagtccgacacaaatcagaaacctggaaagagaactaaaaggcagaaaagtacttgatcgtaccaacctcatcttggatattttcgccaaaagagcccgtacggcagaagcaaaagctcaagttgaactggcacaatatcagtacttacttcctcgtctaacgggtatgtggacccacttggaaagacaaaaaggaggtatcggacttcgcggtccgggtgaaagtgaaatcgagaccgacagacgtatcatccgggataaaatcacccgcctgaaagagcagttggccaagattgacaaacagatggtcacgcaacggaaaaaccgcgggaaactcgtgcgagtggccttagtgggctacacgaacgtgggtaaatccacgctcatgaatcttttgagtaaatcggaagtattcgccgagaacaagcttttcgcaactttggataccacggtacgcaagatagccataaagaacgtcccactactgctggcggacacggtcggttttatccgtaaacttccccaccacctggtagaatcattcaaatccacgctggacgaggtgagagaagctgatgttattttgcatgtagtcgacatctcccatccccaattcgaggatcaaatccgggtcgtgaacgaaacactgggagagttaatggataattccaaacccacgattaccgtattcaataaaatagacgccttcacgtacacgaaaaaggaggaagatgatctcactcccatcgagcggaaaaactatagcctagaggacttgaaacaaatgtggatgtccaaacaggaaggagaaaccgtgtacatctcggctaaatccaaagaaaatatcgaggaattgaaagaaaagatatacgggattgccaaagacattcactcggcacgtttcccgttcaacgatttcttataccaagatttcgaaatagacgaagagataaaataaggcaccaatcaaaacaaaaaaatagggaaatcagaccttttccctcttcaggagcgacattcgaatgtcgctcctttttatactgaaaatcaactatatatataattacacatctttcacctattttccgacaaaaccattcgtttattttgatttctggctaattttttgtatattagaggtatgagcttaaccatcataaataaacattatggaagtaaagaaatcatcaaaggcaaacctcgaaaacaaaaaaggaatcttcttcgagatcggactaatcgtagcattagcctgcatattccttgctttcgagtggaaagtcgacgtgaagatggaagaaggcttcatagtaataaacacggaagaacagttggacgaagaaatcatacccgttacacaacggatgcaacaagctcttccgccaccacctcccgcacctcggttaaccgacttgatacagatcgtagatgaagaaataaatctggatgacaacttggacatcatggacgtggaagccaatgttgccaatcacggagtttacgactttagcggtacgggtaacgggtacgaaggtgaatacgggtatggagatgaatattccggagaatctgaagtatttgcggtagttgaagagatgccgaaattcccgggaggcaatgtacaaaaatggatttccaagcacatcaaatatccgatgatcgcacaggaaaacaacatccaaggtaaagtttttgtacaatttgtcatcgagaaagacggtagcgtttcaaacgtaaaggttaccaggtccgtggacccttccctagacaaggaagccattcgtgtcattcaatccatgccgaaatggacccctgggaaacaaagacagaaaccggtgagagtatctttcactgttcctattaattttcaattacaataaatgaatagaggctgcattggatgcagcctctattcatttatcctataaactcgcttacttcaccgtaatcaagaaataattctttttcccgctttgcaaaaggataaacttaccgtcgatcaaatattcgggagtaactactaattcttgatcctgcactttctccttatttatactaatcgcatttcccttcaatgcacgccgagcctctccttttgaagacatcatggaagttttctctgccatcaagtccacaatatgaattccagcctctaaatcagttcgtgcaacgtcaaattgaggcaccccttcgaaaacagacaatagcgtatcttcatccaaacgtttcaacgcatcggatgttgcattaccgaaaagaatttgggaggcctccaaagctgaatcataggcatcttccccgtgaatcaaacaggtcacttcctttgccagtactttctgcaattttctcaaatgcggagcttcttgatgctctgcaatcaaggcatcaatctctgccggtggtaatatcgtgaaaatcttgatataccgggctgcatcctcgtccgtgctgttcagccagaattggtagaacttgtatggagaagtccgctgtgggtccaaccacacattacccgactctgttttcccgaatttcttaccgtcactcttggtcattaacggccaggtcaaaccataagcctccccaccatctttccggcgaatcaattctccacccgtggtgatatttccccattgatcggaaccacccatttgcaacaggcagttataattacgacgcaagtacaaaaaatcatacccttgcaccaattgataggtaaactccgtgaacgacatcccgtttgtcgaatcggcactcaatcgttttttcacggaatccttcgacatcatgtaattcaccgtgatatgttttcccacttcccgtataaaatcgagaaaagagaagtttttcatccagtcataattatttaccatgatcgccgcattcggctcgttcgaattgaaatcaataaacttggacaactgggctttaattcccgccatgtttttttgaatagtatcctcgtccaacaaattccgttctaaggatttaccgctgggatctccgatcatacccgttgctccaccaatcacgaaaatcggtttatgcccggccatttgtaaatgtttcatcatcataaccgacacgaggtgacctatatgtagcgaatctgccgtcgggtcaattccgacataagctgtcgtttgttcttttgccaattgttcttcggttcccggcatgatattatggatcatccctctccatcttagttcttcaacaaaattcatcgattcttaatttttaattcgcatttgcgagttataagttaataagttacgagttcttcaactcttatcttttcgtttttagcttttattttattacactttcgtaaacgccatttgcaaagttaacaaaaggtttgtacaacaagctatcacctttcgtttttgccgaaataaaatcataacgaacgtccagcgcattcacgatgaaaagcaccacgcataccacgatagtagctttcaacacgcccaacacgatcccgaataacttgttaaacagtcccaatgaaaccatatcaatcaacttggtcaacaattttccaagcagatgcatcacgataataaccagcaggaaagtcacggcgaaagcgatataataggcatacgactccggcaaagccacgaaatctttcaaaaagccctccacgttcacggcatatctcaacgagataaaaactcctaacaccaacgcaaacaacgttgacatttcaacaatcaaccccagactaaaccctttataagccccgtataccaacggtagcaatataatcacatcaatgtaattcaccgttaaattattaatcacttcattttagatttcaaagataaacaattgtccacgtttcatcacaaaatcgggataataatattgaaaaaatccacaactttctccctctcaactttcatcgatctttcacatatcatttcattttcagtatccacacttcaattttcaattatttatgccttaaactgacaaattcttactattttcgcacaatgtttatgccagaattaaaattgaaaatttatgtatagaacacatacttgtgggcagctaagaatggaaaacgtgaatgaaagcgtttgtcttagcggatgggtacaaaaagtacggaaacttggagccatgactttcgtggatctccgtgaccgttatgggattacccaattggttgtcgaggaatcggctcccgaagaaattaaagctaacgtggcaaagctcggacgtgaattcgtgatccaggtaaagggtacggtgatcgaaagagccagcaaaaacaataaaataccgacaggcgacatcgagattatagtgaatgaattgaatgttctgagcgaatcggaagtaccgcctttcacgatcgaggatcaaaccgacgggggggatgaaatccggatgaaataccgttacttggatttacgtcgttcctgtgttcgcaaaaatctggaattacgccaccgcatggcacaattgacccggaactatttgagtaacttgaactttatcgaggtagagaccccggtattaatcaagagtactcccgagggggcccgcgatttcgtggtaccttcccgtatgaaccaaggccaattctacgcccttccgcaaagcccgcaaactttcaagcaattgctgatggtttccggtttcgaccgctatttccagatcgtaaaatgtttccgggacgaagatttacgggctgaccgtcaacccgaattcacacagatcgactgcgaaatgtcatttgtggaacaagaagacgtgttggaagttttcgaaggcttgatcagtcacctgttcaaagaagttcgtggtgtggatattcccaaactggaaaaaatgacctggatggatgccatggagcaatacggatgtgataaaccggaccttcgtttcgggatgaagatcgtggatttaaccgctgttgccaaagggaaagattttgccgtgttcaacgatgcagaatatatcggggccatctgcgctcctaaatgtgccggatatacccgtaaacaactggacgagttgacagaattcgtgaaacgttcacagatcggggccaaaggattggtttacgtgaaatacaacgaggacggaacattcaaatcctctgttgataaattctacacggaaagcgacttgaaagtatgggcagaaacctgcaaagcagaaccgggagacctaattctgattctagtaggtccgaaattcaaaaccctcccccaattgtgcgagttacgtttagagatgggtaatcgtctgggattacgggataaggatgtcttcaaaccgttgtgggtagtagacttccctttgctggaatgggacgaggaaacccaacgtttctacgcgatgcaccacccgttcacttctcccaagccggaggatattccattaatggataccgacccgggtaaagtacgtgccaatgcttacgacatggtcattaacggcgtggaagtcggtggtggttctatccgtattcacgattcggcattgcaatccaaaatgttcgattgtctaggtttcacgcacgaggccgcacaggctcagttcggattccttatgggagcattcaaattcggggctcctcctcacggtggtatcgcgttcggtttcgaccggttagcctctatgttcgccgggttggattctatccgcgacgtgattgccttcccgaagaacaactccgggcgtgacgtgatgattgactccccttctgaaatctctccggagcaattcaaggaactgggcattcaattgaaaacaaattaatttacgatttatgaattacgatttacgattacaaaagcgttggcttgcggacgagaaatctaaaatcataaatctttaaatctaaaattaataaggtgttttttaaagacgtcataggacatgaagagataaagcaaagactgattacttccctacaaacgggaagaatcagtcatgcacaactcttttccggtgatacgggagcgggatcgctagccctggcgttagctttcacgcaataccttttctgcacaggtgacaaacatgaagacgcttgcggggtctgtccggagtgtaagaagatgcagaaactgatccacccagatttacattttgtctttcccgtagtaaaatctgccaaaataaaaacaccgatcagtgacgagtatatcaacgagtggcgcaatcttctactcaaaagtccatacatagacatggaagaatggctgggagccatgggggctgacgaaaatgcccaagccttgatatacacagaagaaagcgggaacatcctccgaaaactcaacctgaaatccttcgaatcggactacaaggtcatgatcatctggttacccgaaaagatgaaaacggaatgttccaacaaacttttaaagatattggaagaaccttatccaaacacgttattcctgctagtcaccgaacacgcagaggaaatcattaccacgattctctcgcggacccaacggatcaaggtatcccctctgacccaagaaaacatagcggaacaactggttcttcaaaaacacctagtccgggactcggccgatcaagtcgctcacgtggcatccggtagctggctgagagccctccgtatgctgaacgagaccgacgaatctgtttacaatcaagagaaattcgtgcagatgatgcgtctctgctgggaacggaaaatgctccccgttaacgaatttgtcaatgaacttgcttctctcggaagagaaaagcaaaaaagttttctgatgcattgcatccgtatgttacgggaaaactttgtcagaaactttggtattgaaaaaatagtatacatgactgaacgggagaaaactttctccacaagattctctccctacgttcatgaaggcaatattattcctcttttcgatgaatttgaacgcgcatatagcgacatcatccggaacgggaacgggaaaataattttcacggatctctgcatcaaagtaatgcaaaatatcagaccgtgaaaaacatgaagaactaaaagatataaactaaaaattgaacaattgaaatccgaaaataaatatcacatcattttcaattttcaattttcaattttcaattaatacaatatgagcgagataaacgaagaagaagtacagaacaactccgaaaacaaaaatataaagcaacaaccacaggttgtccccgtgattgaccaccgcctgctggcaggaaaactcactgtttataactggatgaaagataccccggaaggatgcactccttctgaaatcgtggaagttcggtttaaaaatacaaggaaaggtttttatttaaacaacagtaacctgaaactggatataggggacatcgtggccgtggaggcagctcttggacatgacatcgggatcgtatccctcacgggagaactcgtgcgggaacagatgagactgaaaaaagttgacttggaacgtaatcccttgaaaaagatataccgtaaggcaaaaccccacgacatcgagaaatggcaacaggccatcgccttggaacacgacacgatgatccgttcacgtgttatcgctgccgaacttggacttgacatgaagatcggggacgtggagtaccaaggggacaagacaaaagccattttctactacatagccaatgaccgcgtggatttccggaaactaatcaagattctggcagaaacattccacatccggatcgagatgaaacagatcggggcccgtcaagaagcgggacggatcgggggtatcgggtcgtgcggacgtaaattatgctgttccacgttcatcacgaactttatttccgtttccacttctgccgcccgttatcaggacatttccttgaacccgcaaaaactggcaggacaatgtggtaagctgaaatgttgtctgaattacgaggttgatgcttatattgacgagcaaaaagatttcccgtccaccaatatctggctgaacacgggcgaaggtatgctttatcaccaaaaaacagatattttcggtcgcaatatgtcctactctttcgacaaagaaggacgcggtacactgattaaattatccgttgcccgcgtgaaagagatcattgccatgaacaaacgaggacaaattccggcaaaagctgtcgataccgaaaaagaggaacaagtgaatatcggctacacggacggggtaggcgaagaaagtttgaatcgttttgacgagaaaaaacaaaatcaaggcaaacgaaatcactccagaaatcgtaataaccgaaaaagtaaccagaaagagaacaacaacacgaataacgagaacaaacccaaggaaaatccgggaaatagcacgggaaataaacctgaaaacagaaacgaaaacaggcaaggcaacagacccaaacaccgccccgaaaaccggaataataaccaacagggtaatcgttccaacgagaaaccggccaatcgcccggacggcccgaaagtgttgcgtaaacaagacaaaaacaataaaccggacaacaaggaaaataataaacctgctgaacaatgaacaattatagacccttcgccgggatcaccccggctgtaaagatcatcattattatcaacgtgcttgttttcctggccattaacatgattggccagcgggcgaacgttgatcttgtcaatatacttggaatgcacttgccgcaatcccagtatttccagatctaccagtatatcacgcacatgttcacgcaaaaagagcttactcaccttttctttaacatgtttgccgtgttcatgttcggccggatactggaatcggtatggggtaccaaacgttttattatttattattttgttaccggattaggcgctgccgcactccactcactggtaagcttgtacggtctgcacaatatgcaggaacaattctacgcattccaaagtactcccgatgcgggagtctttgcagaattcgtgcgctctcacgtaagtaatcctagattactttcggaactcatgcaatttgtcgatgcttggaatgccgcacctgccagtgctcagtttgccggacaggcagaatattacatgcaaggtataattcaagcctacgccaatgccccgacgatcggggcttctggggctgtcttcggtatattgttggcattcggaatgttattcccgaatacggagttatacttgatgttcattccgattcccatcaaagcgaagtatttcgtacttttgtacggtgccgctgaattgttcttcggtttacagaactcggtaggtgacaacgtggctcactttgcacacttgggtggtatgcttttcggtttcttcctgattctttactggcgaaaacacagcaaaaagttttactagaaaaagataggttatgtacaacagggcgtatggatcgaatttttcaggtggaatctggaatgggataaagaactccttcaaacaaggaacggcacttacccgcctgatctatatcaacattggcgttttcctcatcatcaagattctggaagtattcttcgtactggccggacaacggggatttgaacaactcctgttgccttacgtgggtgttcccgcactaccggaacgtctgctttacacgccgtggacgataattaccaatatgttcacccagttcgggtttctacacttgttgttcaatatgctctggctgtactggttcggttcgatctttcaaaacacgttctccagccagaaactcacgggagtgtatctccttgggggaattactggggctatcatttacatggcagcctacgccttgtttcccgctttcgagtttgaacgttaccagtcgtgggccatcggggcctcggcatccgtcatggccattgtgttcgccgtgtgtacttaccatccgaactacaagatatatgtgtttctgatcggtcctgtgaaacttattcatctggcgatcttcacggctgtcatagatcttctaagtatccccaacggtaatgcgggagggcatattgcccacctcgggggagccttgttcggttatcttttcaccttgtctttccgtcgcaatctcgatttgaccaaaggactttcatccttcttcaccaagttaggcaacagccgcccattccggaagaagaccatgagagtcaagtacaaaaagaaagtctcggacatgaatgacatggaatataacgagtacaaaaaacgaaaagacgaccgcatcaacagcatcttggacaaaatctccaaacatggttatgaaagcttgacaaaagaggaaaaggagatactgttcaaatcaaaaagtaattgaatatgggaaattataaatcatcattaaatttaaaattaattgggtcgattatttgacattatcatgagaattgtcacgatcatcaccatgatcggattatttgggagctataccgcaccctatattaaccctaacgtgttttatttttcatccctgctaggctacacctatcattatttattgattgtaaatattatcctgctgctttactggattgcacgctggaaaaagatagctattctatccatactgattatcgcagccgggtacccgttaattaccacttactatggattgaacccgcaaactgtacccgatgccccccacgacctttccatcatgacttacaatatccagatgctagggataggtgaaaaggatgcacctgcaaagatcgtggactatattaacaatagcggtaacgatattgtttgtatgcaggaatttcctcaacgggaagcctctttcaaaaaattccctgcctacccgtattatcaccgccatcgagatgttgcgttcatctcccgctatccgattgttaacaaaggcgtgattaatttcgacaagggacattcggccgcctgcgtttatggagacattaccatcggtaaagacacgatccgggtatactctatacatcttgaatcctaccggttaggcaaaaatgaacagcagatatacaaggaactcaccagtggcaacacgcaaaatgccacgcaaggcgtcaagactatatcttctcgtctggttaccgccaaccggaaccgggcaaaacaggcgcaaataataaaaaatcatatgcaacaatccccctacccggttatcatttgcggggatttcaacgataccccgatctccttcgcctaccacacgttgtccgaagggatgaaagattgtttcatcgaaaaaggacgtggcctcggaaacacgtatatcggggagttcccctcgttccgtattgaccacatcctgcacacaccaacactcggcaccgtatcttatacccgtgataccattaaatattccgatcattatccggtgcaaagtgatattcgattttagatttcaaatttcatataaattattcccaaccattttctattttcaaatatttatctatatttgcaaccacaaatggggaattagctcagttggctagagcgtttgaatggcattcaaaaggtcgtcggttcgattccgatattctccacgaataggaataaaatactggatgccagcatcttattcctattttatttctttctaaatttacatttttaagaatcaagcctacaacgtatcaattcctccttctcgaaaccaacttgggattatcttatatgtactttattctccgggctataaacaaacgctaccacgagcatcttttccaccgtgaaagaattaccataacataattaacgacgctttcccgaaaaaaagaataacggattaaactcgttgtcctttttttcgtaaattagccacaaataaaaaccggagtttatggaacaggagcgccaagaagagaaccagaaactgacaaaaaaaatcagcccgtataaaatcatataccccatcattatcgggttggccgtggtctcttacatgttatataaagaattcgatcccaaagcatttgacatgatcacctttacatggaataccgtattctggttattcgttgccgtcctgtgcatggccatccgggatttagggtatatcattcgaatcaaaatactatcgggggggaaactgacctggattcagtccatccgggtcatatttctctgggaattcacctcggccgtaactccctccgctatcgggggaaccagcctagcaatccttttcgtgcataaagaaggaatcggggtcgggaaaagttccgccatggtcatggcaacctcttttctcgatgaattgtatttcatcatcatgttcccactcatactactgtttgtcaaccaccaggctctatgggaaatgccggataccacgaaagccgtggccgacggtttgattctcgtggcagttattggatattgcgtgaaacttgcctacctgctcgtgttaagctacgggttattcatgaatccgcgagggttaaaatggttgatcatgaaattattcaaatggcgtattctccggaaatggcgtcatgatgccaatgaagcgggaaccgatattatccggaattcccatgaattaaaaagtatgccgttctccttctggctaaaaacattcggggccaccttcttctcgtggacagcccgttactgggtggtgaacgccattctcgtggctttttggttcggacgttatgattgggcgcaacattttcttatctttgcacgacaactcgtcatgtggatcatgatgctggtaagcccgacaccaggtggtagcggtttcgcggaattcgtattctccaagtatctcggggaatttcttccgagcgccggggttgccatagcgatggctattttatggagactcatcagctattacccttacctgtttatcggggcatttatcgtaccgaaatggattgcccgtagttttggcaagacatcgaagcaaacaaaaacgaacaattaaagatttaacgcgttaaggaatagaaatcatgggactatttaaacaacctgaatatcgccgtttcaacttgaagccccgctactgggatccggaagccgaggcccggaaagagcgggaaaaacgcatccgtgcggaattaggcctaccggaaaacggggatgaatacattcccgacgtcagaaccggattgcaaaaagaatatgccaaacgtaaaggagaacgtgccggattgcgtctcggttactcaacccgactttttatgattcttattatcatactgatcgggatcttttatctggcgacatacaagattgatcttatcatgaaattattctaaggatttcggtatggcagacgtgattcaattattacccgactcggtagcgaaccagattgcggcaggggaggtcgtacaacgtccggcatccgtggtgaaggaattgatggaaaatgccattgatgccggggcaacaaaagtacaggttatcttgaaaaatgcgggcaaaggattcatccaagtcattgacaacgggaaaggaatgtccccgagagactcccgcatggcttttgaacgtcatgccacgtccaaaatatccaacgcacaggatttgttcaatatccgtacgatgggattccgcggagaagcccttgcatcgattgcatccgtggcagaagtggaattacgcaccaaacgggaagaggacgaactggggacctacctcttcgtggccgattccgaattaaaaaaccaagagaatattaattgttcccggggaacaaatatgctggttaaaaacctgttctacacgattcccgcccggcggaaattcctgaaatcggacaccacggaactccgtaatattaccacggaattcttacgggtagccctcaccaccccaaacatcgcattcacgcttgtcaacaacggaaatgaaatatataacctgccggcatccggattacgtcagcgaatcgtaaacgctttcgggaaaacgattaataccaaattactccccgttaattgtgaaacgggtatcgtcaccatcaacggtttcgtgtgcatcccccagcatgcccggaaaacttacggggaacagtattttttcgtgaacaaccgattcatgaaacataactttttccacaaagcaatcatggaagcctatgccggactgattagcggggatatgattccctcgtatttcctgtacttcacggtggatccctctattattgatgtaaacatccacccgacaaaaacggaaatcaaatttcaggacgagagcgctatatttcaaatcatactggccagtgtaaaagaagcattaggaaaattcaacgtgaccccgacaatcgactttgacacggaagacaaggttgattttacggttcccgactcaccgattctcccgaaggttccaaaggtgagttataatccccattataacccgttcaactattccacctcgatctcgaaagaagattccgacttcgaacagccgagtggtaacagttcccgtcccaatttcgaacccagacacaaggaacaagttcccgctaactgggatgttctcttcgccggattggaagataaaacagaagaaatacaaacagaaatccccgaaatggcagaaaaacaagaagatcacgaaggaattatctctttcgtacaaatgaaaggcagatttattgtcacacccgtccattccggattgatgtttattgatcagaaacgagcacacgaacgagtgctatacgagcgttatctagagaccttgtctcaccaacaaatctgcggacaaaaaagtctgtttcccgaaacgctggaactttcggctgaagatttcctactcgtgaaagagattatggacgatcttgccatgctaggctttgaactcggggagttcggaaagaattgctatgccatctacgccaccccgtccgatctatccacttcccgcggaaaagaagtgcttatcagccttattgaacattacaagaacacggaaggttcaatccgggataaaatgagggaacgcatagccctctctctcgcgaaggcggcatcgctggattacaatgccccattggacaagcaggaaatgagcgacttgtttgacaatctgttcgcctgccgacatcccaattacacggctgacggcaaaacaatcatccatatccttaaaaacgaggatgtgacccaatggtttaaataaaaaactatttttctttcaggtaagcccgcaatgtcttagccgtttcgggatcagaaggtcgtaacatatccgagttgataatacgtccgtccggagcgatcaaaatgaaacggggaactccgcggatcatgtaaaaatccatgaaagaacgatcattccccatgtataattgcacctctcccttgggattctctcgcacccgcttttcccaaacagcccggtcactatcacaagaaacggccacgaacacaatattatcatcttcaaactctttttccagtttctcccaagccagattttcatagcgacaaggaacaccccaagtcgtccacacgttgatgaacaggtattttcctctaaaatcttccaattcgacagcttgcccggcaatatccgtaaacataaaatcaaaagcaggactaccgggaacaattttcgcacaacgatcataaacctcttgaaaccgcttccgcaataccggattcttcacgtagaagtcatacacccgcaatacatcatcaatatgcccgtcaattcccacaccaagcaagtaagcataggcataatgatcaatcagaaactccaccaatgtttcgttcgtcaagtgatgaatcacgtaatcaaactgcgccatcacttgcttgtaggcatccaactccttcatatggtaagtactgattaacgaaactaaagacgccatcccttcttgatattctttgagaactaataacttctcatcttccttgatcaattttttgatacaggaaagataagcggtatccggctgataatccatgttacccgtactccaagcatgatacaagggataattttccaatgctttataagtagaaaacttgatccgatttcgttccatttcagtaaaagcggtatcgaatcccatggtatccaagtaatgaaactgctcttgaatcaaatctttcaactgacctaaaaactccggaccatccaattcgtaatcgaaagacaaattcttcatgacctgactgttcaaataacgattcttgggagcgccgtctccttcaaaacgaatattccctttagcatgatccccgtaaatatatattcgtaatgtcattccgtcttcaataaacaaaggaagacgatcctttccatattttaacgttgcatatccatgttcgccctctgtcagcatcaatttggcatatcctgaatcatctacttgaatatcccattcttccccgttaacctccagctccggcagcatccccgaagacccgataagattaaattccacgactgttttccgggtattacaacaccacatcaataacatcaagatcaatactatgcctccaagttttcccatcatctaacgcataatgttataatttgctaaattaactataaattcttttaaatcgagtcaatatcaagattttaactttttattaacgtattacaccttgttatttaaatcaagtctaaatagctttacactcgcttaaaatgatcaaaaatatgaacaacatggataaaaaacaggccctgcattatcatgcgatgggacgtcccggaaagattgaagtcgttccgacaaaaccacatagtacacaatatgatctttcactggcctattctccgggggttgcagaaccttgtctggaaatccagaaaaatcaaattgatgcctataaatataccgccaagagcaatctggtagccgtgatttcaaacgggacagccgtactcgggctaggagatatcggagccttgtccggtaaacccgtcatggaaggaaaaggattattgtttaaaatattcgccgacatcgacgtgtttgatatcgagctcgacacgaaagacgtggataaattcatcgaaacggttaaaatgatctccccgactttcgggggaataaacctggaagacattaaagctcccgaatgtttcgaaatcgaacgacgactgaaaaaagaactggatattcccgtgatgcacgacgaccaacacgggacagccattatttcggccgccgggttattaaatgccctcgaactcaacgggaaaaaaattgataccattcgtgtcgtggtcaacggtgccggagccgcagccatttcctgcgcccgcctttataaagcattgggtgtgaagaaagagaacatgatcatgtgcgacagcaaaggagtcatctacacgggaagagccggactcaacgcggaaaaagaagaatttgccgtcgagacctctgcccgcacgctaaccgaagcactcgtcggtgcggatatgtttttaggcctttctgttgccgacatcttgaacgaagagatgattcaaagtatggccaaagacccgatcgtattcgccctcgccaacccgaatccggaaatcagctatgaaaaagcgatccacagccgaccggacatcatttttgccacgggacgctcggattacccaaaccaaatcaataacgtactcggtttcccgtatattttccggggagcattggatgtacaagcccggagtattaacgaggagatgaaacttgccgccacttacgcactggctgaattgacgaaagaacccgttcccgaaaacgtgaaaatggcatacaatgacccgtccatcgctttcggtcggaattacatcattcccaaacctttggacacccgtctgatcagtcgcatcgcccccgccgtggcaaaagccgctatcgaatcgggagttgcccgtacggaaatcgaggactgggatgcctatcgggatcaactggaaaaacgtatgggccaagacgaacgactcatgcgccgaatgacccgtaaagccaaaaccaatcccaaacggatagtgtttgcggaaggagccgacattaaaaccttgatggccgtacaggaaatcctttcggaaaagatcgctcatcccatactcatcggcaacaaaaccgaaatcgaaactcttcaaaaacaatataaattagagttacccgaactgaccatttttgacccgacaaaagagatcgacaaaatagatcaatacacccaagcttattacgaaaaaagacaaagaaaagggatcatcctagaacaagccaaagaattgatgaagaacccgaatttcatcggtttaatgatggttgaatcgggagaagcagatggtttcatctccggcattcactctaattatcacgatgtgctccgggcagccaaagacatcatcggtctaagagcctgttgcaaatatgccgtggggatgcacatcgtgaccaataaaaaaggtacttatttcctagccgacacgacggttaacagccacccgtcagccgacacgctggagtgcgtgaccgtcctcacctacgaggcagtaaaacaattcaacgtggaaccggttgtcgccctcacctcatactccaatttcggggaataccgcttaggtagcccagcacagatacaagaggctgttgacacgcttcatcgtaaatatcccgaaattctagtcgacggagagatgtccgcatccatcgcattcaacaccgaattgcgacaagcacgtttcccattctcccctctggcaaacaaagatgtgaatacaatcattttcccaaatctcagttccggaagtattgccttgggcatattgcaagaattaggaaacaacgaaatcatcggtcccgttctactcggtttaaacaaaccggtacacattttgcaaatgggatgcagcgtgagagatattgtttacatgaccaccttggccgtgactgacgcacagaaggaaatgccggtggatatgtgccgaatctgacgattttagatgttagatttacgatttatgattctagtttttgcaatcataaatcgtaaatctaaaattgtaaattattttaccggaatcttctctacccttctctggtgacgaccgccttcaaaatccgttgacaagaaaacatctaccacattttgagcctcttcgtaagcgatgaaacgagcaggtaatcccaccacgttcgcatcattatgctgacgggccaaagcggcaagttccatattccaacacaaagcacaacgaatgccctgatgcttgttggctgtcatagaaatcccgttaccgcttccgcaaatagcaattcctttttcatactcgcccgactcaacggctgctgccatcggatgagccgtatccggataatccatactctcggcagaataagcgccgaaatcctttacctcatgacctttttcccgaagatattttaccaaccgttccttatactcgtaaccggcatggtcacatgctatcgctattttcattttattcaaattagaattcttcaaacaattttgattatactttactatttacaaaggtaacacaattgtctattataagaataattccaacaaaaattatcccccaaaacacccacaaccatttcgtagacacaaccaaactcttagaggcaattaagcgatctatccgaagttctcgtttcataaaatgccgaatagtactgtatttcggatggattatatttcctacacgccaactgctttcccacaagacaaacacaagtagacaaaacaaagctaacatcgacaaccatccgaaaatttctttcatcgaaaccatcattgcctgctgttgcaccatcccataaagttgaggcaacgggacacacaccgctattggatttacttcatccaattccgcacctaacaacaaagcgttcctcttcatcacaacagctaatatccgccccaaaacagcatttccaatcacccctcccaacacggcactgacaaaagtatgcgtggtcaccgcatgaaaaaatatcctaaaagggacactgcccgatatggaagtcaaaaaacagatcgccacgataacataccccattccccggaaaaaaacaggcaaatacaaggcctccttcggtagatcataatccagataaaaataaaacacaagtaaataaacaataatacaggagaaagcaaaagtcaacattcgcctatacccccaccgacgcaaagcaaacatatagtaagtaaagatacttcctgcaacaattcccaacaacacgatccaattcatagataccacatgcaaagcatcaaaacccaaaatcctctccatataaatgtgttccaacacatgctgtggtgcccaaaaaaagtcaatcaagacatacaataaaaatgttaaccacacgggacgatatgtccatattgaaagatcaatatagggatgccgtatcactaaagcccgggcaatattgaacaataaagcggccaccgcgatcaaactccccattcggatatagggagaagcaaaccaatcataatgctccccgtaaacaccgacaaacgtcattgccaacacggaaatagcccacagtaccgcccccaaccaatcaattccatataacggcaaataaggcataaaccgtttgtcctgaaaagccaccagtacaaaaagaattaccgcaagtaatagtccgatcacgaaccaatacacatactcccagttaatccaagttgcaacatgcactgtcgtaagtcccgaaaattgaatacaggcatttaccattaaaaaaatatagcaaaaaaaaacagccatatcccgtttgggcgtcagccaaagctgtattgaagaattacactcgaaagttccccacatacgaaagaaacccgccacgaaacttgctaacaccaaaacgaccacattccccgtactcacacaaatcaagctgcatcccacacaaatcgtcgcacaaattaacaacgccacccgggaagtaaaacgaaatttcaaacggaacattatagcaaacgagagtgccatgctgactaacgaagcatatcccgccatcataatatcctccattttcaaagctaacgctccactcatctggctgactaccgctaaattcactcctccggaaaactgaaaaacgacagcaatacaaatcatgatccatggccgccatttctccggaatgaaatcacgcatggccccgatggaaaatctctcttgattatgcataaattaataacatatcgtacattcaacattcattccggctcgcagaagtcgaacagcctcaggatcattttcatcggagaactcgatcttcaccggaacacgttgttccactttcacaaaatttccggcagaattatcttgcggcagcaaagaaagcgaagcccccgttgcctgcgataccgaacaaaccttccccttaaaaataacattcggaacggcatccacttcaatttccaccgtacacccgggaatgatatgccgcaactgcgtctctttgtaatttgccacaatccatttatcctgctcatttattaaatgcaacaaagtctgcccggcttgcacgagttgcccctcttgaatattctttcttcccgtgattccgtcacaaggggcaacgattaccgtatacgaaagattaatccgggcaagagcaagagcagcctcggccaccttgattcccgcctccgtttgtcccaaacgttgagactgttccaacgtaaccaaagaagctgactttttttggcaagacaacaattcatacctggctttagctgccaagtaagtagtttccacacgatcatactgctggcgagtcacggctttctgtgcaaatagattccgataacgaagataatcccgttcggcattatccaacaatacctttgcctcttgaagacctgcaacagaaacagctacattattcctagtcgtgctcacccctgtcgtcatcacgtgtttacccgtaatggcattttgataatccgcttccgcctgtgccacccgaagtacaaattccgcatcttcaatcacggcaagcgtatcacctttacgtacctgctggtactcgtcgaaatataccttttttataaatccttgcacccggctattcacgggaacaatatgttgacggacttgagcattatccgtatactccaccttaccaaaatgaaaaaaatgagtacacacgccaataaaagtaatcaatacaacaataacaacaattgcgttagaaatcgcttttctcgtttttctattcatgacattatttttaaagggttcccgaaatataaagaagtttatagtaatgaaaaataatattgacgcatgcatttaccaattgttgctccgcggacaatttcgccacactcgcgtctaacatatcggcaattaacgccacgccatttttatatcgattatatacgacagcataattctgacgagcaagttccacgtttttcatttgcacgtgtaattgttcatgagcctccgcatatctaatataatcagcccgtacagctaaatcggtctgctcttttatatcctcatactgctgcatcgcccgtcgggtctccagtttactacgttttacggatttattcgatttatacaaggaagaaagattatacttcacacctactcccgcataccaataattaaagtttttatccatcgggggaacctctatcgtaatcggaccatcaaaatgattgttcgcgaaaaaagcaatctggggaagtaactccgattttgtcacttgttcctgctgccgattcatttccacgactaacgaggtctgtcgaagagataaagcataacgtaacgcttggtctctccaatgcgacattccctccaagggcatggaacgtgacacaagagatgtatcgggtcgcaaccgggtatcctcgggcaatcccaacatcgtcactaaattacggttaagaatcgccaccgcattaccaatccgggtttgctgaagttccaaatttgataattgaagctcgtaacgtgtaatatcgttttccaaagaaactccttcggtatatcgagcttttatatccgccagaatttgccgggtcaatacaatgttctgttcgtaaacacgagccaaatttttttgtttaaaaagatcaagataatagcccaccaacataaaacgtaacttatcacgttcgctttctaaagaaagagctgccattttttcctgcaatcgatttatctcaatccgactattcacgactccaccggcatagattatctgagaaacctctagagcaaaattgttcccgaaatgaggaatcggagcattcatagaattgctgaaatcacgatccaacaacaccccgtcacctaaaaaagaaagtgatatcgaggcatttatatccggcaaacgggaatttttagccatcttaacagattgtacggcttcctccatcatcgttacaaacggctgcaacgtctttgaattacggtcggcaagagaaaacatttcttcgacagtaatacccctttcccccgcattttgggcatacacacccctacagcataacgacacataaagtatcgttatgaacagaaataatttgttcatacgtattatttatgaattacaaaaaaatgataaaatagaagttaataggaactaaatacaacgattaggcactctccattcacctttccagcgttgaaagaaagttagtagacttaacacacacacgcatgagtgacaatatgtataccttttacgttgcattaaacgaaattcttacttttagcggggacaaaagtacaaaaaagaaaacaaagttgtaacccagacagagtctattaccacaaaaaaagcgtccccgacaataggaacgcttgatttttatcaca

SEQ ID NO: 10793 - DNA, 12701 bp, Unknown
  gut microbiota DNA sequence
gttggctcctcaggtaggacttgaacctacgacctacggattaacagtccgccgctctaaccaactgagctactaaggaattttctcaaaagcgatgcaaatataggggttttgttgaattccgcaaaataaaaaggaagaaaaaacgggttgattggcgaaaaaaaatgtggtaatagatgggcgttttgagaatcaaggaattgtatttagttaaaagggaaattgtgtattttgttttttgggagatgtaaaaagtgttgagttttttaagggaattatacgcgagtttacagtactcatgggcatacctgtaacaaactttcccttacaccggggaaggcctactccctgttaatcccttctctaccctttcctgcgggcaacaatgaaatacctacataacacgaacggagcatgtacacctgccagtattcatgttatgtacttgctatgtacatgctatgttcatgatatagggaaaggatagagcaaccgtaacccaaggccggactattgtcgaacaagaatgtaaggcgtttattttactttactgcaaattcgtatataaattcctaataaatagtgttagatcatgaataatttgtcggccgatcggttttaaaaacatcgataaatgctatatttacagcctctattttgtgtaaagtgtttaaattgtaaaagtgtttattatgttattacgcggatgtttagttattttattgataggcgtgcaattcgctttgggacagcaaaaaccaaatcccgattgggtgaatcagaagttttccatgtttattcattggggattatattctgagctgggaggggtctggaagggacagccggttcgtgccggatacagcgaacagatacaatcttttgccaaaattcccaaagtggagtacgaggccgtggcaaaagtattcgatccggagaaatggaatgctgattccgtggtggctttggcaaaggcggcagggatgaagtccatcgtgttcacgtcgaagcatcatgacgggttttgcatgtatcattccaaatatacgaaatataatgttgtggatgcaactcctttcaagcgggacgtgatgaaagagttatcggatgcttgccgacggcagggagtaaagtttgcggtttattattcattaattgattggaacttcccgggtaatggtattacgcctcataatgcagatgcgatttcaaaggagcatcatgcgtttagtatgcatcaggtagaagagatcatgacgaattacggtccgatttcagaaatttggtttgatatgggctctttgagcggacaacagagtaaagagttatatgatcttgtgaatcgtttacaaccgcagtgtatggtgagcgggcgtttgggaaatgaccggggagattttgccgtgatggcggataatgcttatccggattataagatcggtgtgccttggcagactccggcctcgttttttgatgagacgtggagttaccgttcttggcaggaacggggaagtttggataaaaagattgatgagaaattacgtagtttggtgaaggtggtaagtcgagggggtaactttttgctgaatattggtccaagaggggatggctctgtggtggagtttgagcgggatgccttgttagccatgggaaaatggatgaaacgttacggggaggcaatttataatacaacggctaatccttttgatcatgctgttgagtgggggaatattacctgtaaggggaataatctttatttgtttgttgagaaggttccgactaaccgggagattgttttgaacgggttgatcgggaaagcgaaaaaagcgagtttgttagctgacgagaaggttttgaacttgaaacaggatgggcagtccgtgtcggtaaatattcccggggatgtgaagccggaccggggcatgatcgtggtgaaactggagtttgccggaacatttcgggttgttcccgatcaggtgcttgaaacgggcgaattgtcggcagtaaatgctattcccgtgtatgcttattctagtatggattattattccagtttccggagtacggtcggttttagctggcatttcaagaaactcgggaagacaataaccccgacaattatttacacgacaggagatcagggaaaagaactccgtttggttgttgacgggaaagagcaggtgacgacgttgacgggcggggaggtgcaacagttgaacaatcatccggaaggaattacatggggtaaagtgtatatacacgagcctcaagcggatcgtttcaatggtaatattggggggataaaagaagagataaacgtgaatgcggaggggtggcgttcgtgggatgatttcagggcgggaaaagctttgaatgttccgatgcgggaaaaacagtcgatacacgtgttgcacaagtttacgagtgatcgggagcaggatgtgctggttgagctgggtgttgccgatggggtacaagtggccttaaatggagagaatgtattgttgcgcacgtatgtgggtgggataccccggaccaatgaggtgataaaactacatttgaaaaaaggagataaccagttggtagtgaaattacacaatcgttacgggacagaagtaacctatttgatgaatacaaacgtgaaacaagcgatgtatagacttcgattgaaaccgatgaagctctattccggggaaattcacgactgtaatcttgaaatggctcatcctgctaacaataacagtgatatggggctacgggatatacgagttgaactagaataataatataggatatgaaaaagagattgcgtaagaaattgcataaaggggagttccgggaactgggattttcttttgatgctaaatttaagacagatacggagatgcaagtggttgaagaatggttgcaggagttggcccatttgttgaatgaacattctttggagatggggggcggttggaattccaaggtatgtggtggatttatcacgcgtgaacgtggtagcgtgaccccggaagaacgggaaatcgtacgggagtggtttgatgaacatggacagaacctagaatccatctctgtcggtgaattgaaagatgcttggtacggatggtaaacgtggggtgtttatacttttccgttatgatgagaagactagaaaactaattatatgagaacaaaattttatttaccttttattgctttggcattgatggctacaagttgcaatagtaaaaaagaggcagaacagaaaggcgggattcgtcttgcaaacctggatcaaaccgctaatccgagagatgatttttatcagtacgcgtgtggaggttggatgaaagcgaacccgcttacggatgagtattccagattcggttcgtttgatcaactggctgaaaataatcgtacccagatcaagagtttgatcgaggagctggcgaaacaacaagctcaaccgggaagtgtcgcccagaaagtgggtgatttgtataatatagccatggatagcactaagttgaacgcggatggggtggccccgatcaagggatacttggatcagttggctgcgattgaggatcggggtgtgttatcgcagaaagttgccacgatgcatcgggatggtttcggaccattctttgggttatacgtgggagctgatgggatgaacagttccatgaatatagcacaattataccagggaggtttgagcttgggtgagcgtgagtattacctggataatgacgatcacacgaaggagattcgtgcgaaatttgaagagcatgtggctaaaatgttccagttggcaggatttactaccgatgaggcacaaaaggctgctgctaacgtgatgaaagtggagactcgtttggccgagaattccaagtcggccgtagaattacgtgacccgtatgccaactacaacaagatcactgttgctcaattaaagaaagaagtgccggaaattaactgggatgtttatttcacgacgatcgggttgaaggatttgcaagatgtgaacgtgggacagatgggcgagattaaaacggttgccgatttgttgaaaaaagaggatttgaacgtgttgaagtcatacttgcaatggaacgtgatcaatgcggcttcttcttatttgagtgatgctttcgtggctcagaattttgatttctatgggaagactctttccggtaggaaggaaatgcaaccgcgttggaaacgtgccgtgggtacggtgaatggtgtgttgggagaggccgtgggccaaatgtataccgagaaatattttccggctgcagctaaagaacgtatgacgaagttggtggctaacttgcagaaagctttgggtgaacgtattcaaggtttggaatggatgagtgaagagacaaaagtgaaagccttggagaaattagctgctttccacgtgaagatcggttatcctgataagtggagggactattctaatctggagattaaaaatgattcttattgggataatatcgtgcgttctaatcattttgattacgataagatgattgccaaggctggtaagccggtagataaggacgagtggttgatgacccctcagacggtaaatgcttattataacccgacgacgaatgaaatttgttttccggcggcgattcttcaatatccattctttgatatgaatgctgatgatgcttgtaattatggtgctattggcgtggttatcggtcacgaaatgactcacgggtttgatgatcaaggtcgtcaatatgataaggatggaaacttgaaggactggtggacatcggaagatgctaagaatttcaaggagcgagctcaagtgttagtggattactttaataagatagaggtattgcccggcttgatggctaacggagaattgaccttaggggagaatattgccgatcatggtggtttacaggttgcatatttggctttacaaaaggccatgaccgagaatccgcttgggaaagacgagaatggttttactccggagcaacgtttcttcctttcatacggaaacgtgtgggcaggtaatatccgtgacgagcaaatccgtttgcaaacaaaatccgatcctcactctttgggacggtggcgtgtgaatgcagcgcttcctcatattagcatgtggtacgatgcttttggagtgaaagagggcgatgctttatatttgccagttgaaaaaagagcttctatctggtaatagatgagtttttatgatatgattccccgggttggtcatgttgccgatccggggatgtttttataggggatctcgcctatattgtagtgcacttgcgccggagtctcgttagtaggttaacgataggttaacgaaaggtcaacgataggttaacggtgtggactatcaatttatgggcgatattttcttcatacatcatgtatatatacaggagacaccaaggagagtacggcgagattactaagcgtgtctaaagaaggaatgaatcggaagggggctaggaacaggattattgcttgcatggatttgtttttaaccaaaaaataatttatatttgcttgatactaaaattgaaagggttatggacattgttaagcgagatcagtttattgctctttggagaaaatattttaatgacgcggagcttcctgttgcattctattattcaaaggaaaataataacgccacgatcgtgaagaaggcgatggggcacacttgtatcatagcccagcttgggcgagttcgtaaaggtgaatcactttgtttcttaccggagtctgtggggtgtggcggaggaaagttttacctcggatttagtaaaaacatgagggagggcttcgagtattttctttctcacggggaaaatacacctcgctgcgagcgctataaacggacaccggaacaggtgaatgcttttttgaaaacagttcatgaacttccgagaaagggcgattgccttgtgttcaaacgttgggatcacttgtcggaacaggacgagccggaagccgtgttcttttttgccccggcggatgttatttcgggacttttcacgttagcgggttttgatagttcaaagcaggaggcagtgatctctcctttcggggcaggatgtacttctattatttactatccttaccgggaacaagtagaagggacgaaaagggcagtgcttgggatgttcgacccgtctgcaaggttatgtacgggcagtaatctattgtcttttgccgtgccgatctcgaaattcatggagatgattgaccagatggaggagagtttcctaatcacggatacgtggaagatgatgcaaaaacggatgtgatggacgtgaaacggggagtccggttatatgtctcgttctacgagatgtttgcagcttccgctcttgccgtgtcgcttgcctgtggattgattatgttcatatatcgaatgaagtctccggctgtggtggcggtgattgttgtggctaccttttggttcaaggtggccacgatggtatttatccggtttaccgcaaaacgaaaattgggacatttcttttattattacaagaacgtggggatgtcgagcagaaggctctggagcgtggccttggcgtttgacttcttgacgtacgtggggtgtatgttaatcgcttatcagttgtaatcatgcatacgcttgatgtaagtaatctttacttggaatacgggtttaatcgcgtgttgtgggatgcttgtctgcattgtgaaacgggagaggtggtcggtatcctcgggaggaatgggggaggaaagagttgtctgatgaaagtaatttacggggaattgaggttgaaggaccaatacgtggctattgacgggaaggccttgttgacaagagagaggaggccggaagatatgcgttatcttttgcaacagagttttgtgttaccgggattgtccgtgaaacaggtgtttgatgatttcggtgtagcgttcgagagtttcgtggaagatttccccgattttgcagagacggcccggaagcggatgaaagctttttccacgggagagcgaaggattattgaagtgtacgcggtgttagcctcggattcgaaattttgtttgttggatgagccattttcttttatgatgcccctacacgtgcagaagatgaaagaggtgatccaacgggagaagaaacggaaagggatcgtgatcaccgaccattattttgaggacgtgatagatattagtgatgagttatttattttgagaagtggtaaaatttggcgggtcaatggacgagaggatctcgaattgttaggatatataaggaatacaaatggagttcaagatagatgaacagacgttgaatgacttagagttattcaatcaagctttggatgggaaaagtattttctcttgtttcaataccgcttgctctgacgggggaaaggcttgtataagaaagatgttggagagtccgttgacagatgtcaataaaatccgggaacgggcagaggcgattcgctatctgggacagttgccttttttcttggatattcgccgggaagaattgagttttatagaggtttatttgcagcaggaggatgtgcctcaacgtagtatgtatcatttgacgagtcgggcggtgaaggggtggttgaagccggataatgattgttatttgcgtcaacgtgcggttccctatcttgggcggcttattcgtgagctgggaacttttatggacgagttgtctgtcgggaaagtgccggagatgataagggatatgcaacagagggtgaaagaaacgcttgctcgtgaagggatgcaatacctgatgagccagaagaaagattctttttggacacgggaaagtctggatctttatttccgggggagggaacttgatggggtccgtgttatattggatacactatatatgctggattctttacgctcgttggggactatggctaaagacgaggggcttacgttcccgattttcacgggaagcgagaggagggtgaggatagagggattgtatcacttgtttttggaaaatccggtgaagaatgacgtattatttgatgatcggcaacatctatgcttcctaacagggccaaatatggcggggaaatctacttgcatgaaggctttcggggtggcagtttatttggctcattgcggattacccgtgccggcagcccggatggaattgtccgtgtttaaaggattgtttaccacgattaacttgtcggataatttgtcgttagggtatagtcattattataatgaggtcgcccgggtaaaatatatcgtggaacaggtgcgggatttgcagaacgtggtggttgtttttgatgaactgttccggggaactaacgtgaaggatgcgtatgatgcgtcttgtgcggtgattggtggattggcccggttgaaatatggggtatttatgatttcaacacatattgtcgaggtggcggagtttttaaaaccgtttccttcggtatgtttccgtttctttgaaatagacatgacgacgggagagccccgctacacgtattgtttacgggaaggagtttccgacgaacggatcgggatgtatatattgaagaaagcgggggtggtggatctaattgaagcgttgtgagcaagtgaatacagaaaaaattcatgaattattctttacttgtttgttatcattagaattatttctatttttgcgtttgtaaaatgtttcttcggggcagggtgcaactccctaccggtggttatagtccgcgactccctttcgagggactgattcagtgaaattctgaaaccgacggttaaagtccggatgatagaggagatatttagttgtaattgatattatattagtacaatataaatttatgccccgaatgtgtatgcattcggggtatttttttaggaggttttgaacatggtgagacaggaagatattgaatacatgcgacgggcgatggagcttgccgaacgaggggtaggattcacgaatccgaacccgatggtgggagccgtgatcgtgaaggggggaaaggtgatcggggaaggatggcacgagagatgcggtgaatggcatgcggagaggaacgctttcaagaattgtaaggtttccgcggagggtgccacgatgtacgtgacgttggaaccttgttgtcattatggaaagacacccccttgtacggaggcaatcatcgaacatgggattgcccgtgtggtgatcgggatggaagatccgaacccgttggtggcagggaaaggtattgccttgttaagagaggctgggatagaggtggtttgcggggtcgaggaagaggctttgcgggaacagaatcgagtatttttgaaatatatatcgacaagattgccttgggtggcgctgaaagcggcgatgacgctggacgggaagattgcaactcgtacaggcgattccaaatggattacgggagcggaggcacgagcttacgtgcatgagttgagacatcgttttatggccatattagttggaatcggaacagccgtggcggatgatcccttgctgaattgccgaattgaggggcgtggtgttaggcagccgatacgagtggtagtagatagtaatgctcgcttgtccttggagagccagcttgtgcaaacggccgaagagtatcgcacgatcgtggcctatactcgttttgctccggaagagagagtaaaagccttgcgggaagcaggtgtggagatgttgctttgcgaggagaaggaaggacttgttgatgtcaggaatttattggaactattgggacagttcgggattgattctattttgttggaaggagggggaaatttgaattacacgtttttgtccgaagggcttgtggatgaattgtatgcttttgttgccccgaagatcgtgggcggtatgagtgccaagactccggtggaaggtacgggagtggagaaaatggctgatgccataaacctcgaattgaaaaacgtattgaatatcggtgatgatgttcttttaaaactaaaagttaaaaacgaataaggtagacggatttcgagattaaaagaggggatgttgggcgaggaaatctaaaatcataaattgtaaatttgaaattagcatgtttacaggtataatcgaagaaataggaaccatacggggaatcaagcggggaaaccggagtgtggtgttggaagtgcaggcgaagaaggtgctggaggatttgcacgtgggggatagtattgccacgaacggggtttgcctgacggtgatctcttttgctaacgggagtttctgtgccgatgtgatgccggagacgatgtcacgtagcaatttgggagaactgcacgttggggatagggtgaatttggagagagcattgacgttgaacgggcgcttggggggacatatcgtgtcgggtcatgttgacgggctggggaagattgtagggagagagagagacgaaaatgccatttggattacgatttcagccccggcagagctattgcgctatatcgtggataaaggttctatcacgattgacgggatcagcctaacggtcgtggccgtgacggatacgggttttacggtttccattatacctcacacgcaggatgagacgacgttagtgaagaaaaagataggtgatgtggtaaatttggaaaatgacgtgattgctaaatacgtggaaaaattaatgcgtccggcagccccggtagagccgaaaggtgggttgacattggattttttgctggcgaatggattttaggaagttaaaagataaaaactaaaagtttagggagacaaatttaagagtattaagatatggaagaatttaaatttagtacgattgaagaggctgttgcagatttgagagccggaaagatgattatcgccgtggatgacccggatcgggagaacgagggagatttgatttgtgcggccgagtttgccacgttggagaacgtgaactttatggcttcttatgctaaaggattgatttgtatgccgatgagcaaggccttgacaacgaagttggggttggaacagatggttgccacgaacacggataaccattgcacggcgttcacggtgtcaatcgatcacgtggacacgaccacgggaatttctgcgttggagcgttccgtgaccgcgatgaaggcggtagaagatgatgcgaaaccggaagatttccgtcgtccgggacatatgttcccgttggaggcaaagaaaggcggcgtgctggagcgtatgggacacacggaggccacggtggacttgatgcgaattgctgggttgaaagagtgtggcctatgttgcgagattatgcgggaggatggaacgatgatgcgtacaccggagttgaaggagtttgctaaagcgcatggaatgaaaatgatcacggtggctgatctgatcacctatcgtcggaaaacagaggttctgattgagcgggtaaccgaggctgatatgccaacaaaatacggggacttcaaagcctacgggtatgtgaacaagattaacggggaacatcatatcgctttagtgaaaggtgacgtgacagacggggaacctgtattgtgccgggtgcattcggagtgtttgacgggagacgtgttcggttctttgcgttgtgattgtggagaccagctggccgaggccatgcgtcggatcggagagagaggtcggggagtattgttgtatatgcgtcaagaaggtcggggtatcggtttgattaataagttgaaggcttatcacttgcaggatgaagggatggataccgtggaagcgaatattgctcttgggtttaaagctgacttgcgtgaatacggtaccggggcagagattttggcagatctgggtgtgaagaaaatgatcttgatgacgaataacccgttaaaaattaatggtttgaccggatacggtattgaaatcgtgggacgtgagccgattgaaatgacttgtaacgagaagaacgagttctatatgtacacgaagtacaagaagatgggacatatgattcacgtgcgtcaacgggaagagatagagaaattgaaagaaggattagaaaataaataaatatagagactatgaatttactggaagggaaattattagcagaaggtcagcgaattggtatcgttgcaggacgttttaatgagtttatcacgagtaaattgttaggtggagcgttagatgcttttaaacgtcatggtggtgatgaggcaaatattgatctagcttgggtgccgggtgcttttgaaattccgttagtggctaagaagatggccgagacgaaaaagtatgatgctgttgtttgcttgggtgccgtgattcgtggggcaacacctcatttcgatatggtggctaacgaggcaaccaaagggattgctaatgtcgggctgcaaacggggaccccgattattttcggtgttttgactaccgatacgattgaacaagctgttgaaagagccggaacaaaagctggaaacaagggtttcgaggcggtaactacggctatcgagatgataaatttgttgaagcagatttagtttgacgctatctgtaaaatggtgtaaagagggtgtgtcaaaagttattttatcctcaaaaaaactcctctgtcacttcgtgccacctcctctataaacagaggaggtggtggagactcttcccgaaaacagtgggtatttcaactctccctctgtttatagagtgagtatcccgaaggggg

SEQ ID NO: 10794 - DNA, 11158 bp, Unknown
  gut microbiota DNA sequence
ctcatatcctattcacatgatttgttctatttttccgattagctgcttagcggagagactcatttgttctacggccatccaggtcacgatgttttcccggttgacgagatagacacggggaatggtgctattggcaaaaagggaaaagactttttcgttcgggtcaagatagaacggcatggtaaagttttgttctttccagaaagcgttgacgacttcggttgtttccccgcgggagatggtgacgagtcggaaggtgggatggtctttcatttcattccatacgctgtcaatcttcgggagttcccgcttgcaatcgccacaggtggtaacgaagaaaactaatagggttgtgtttcccgataaatcgtcactatgaagttcttccccggtcgggcttttcacggtgaattccggtaatttgtcgttttcttcgatataatttatgacatcttctttttcgtctttaatacaagaaagaagaagtaatgtaaacgcgagtaacgtgacgaatattgttttcattttttacgaattcagtttcaattagaccgtgaaattagcgaataacatcgaattataaaaatattacgtattttttgccttgtgaagtaagtatatatacacaagtggggagcctagaaatcgcgtatgtttgtatgcagtaaaaaagaagaatagtatgaataagatattgcaagaagattttgacttggctccatgtatggttgccggatatgaaagttttatgaatggtttgttgaatatcgtgcattccgggccgatctgcgagagcgtgggtgaacagatcaagtcgtatgtgctggattttgttcaaaatcacccattggattcttttgatcgcttttcggatgagacctatatgcggaattatatcggccgggatacggaatccggctgggaggctatcgtgatgtcgtggaagaaaggaaaccgtacggccattcatgctcatcctcaatttgctggttacacgtttgccgatggggagttcttggttgaggtttttgaaccttttaaagaggggattcgtctggttcaagagatgacaattagcgatattcacgggttatatgctatcggtgaggctggtaaattcaacaatcatattcaccggattacctgtttaagcgatatggcccacagtttacacgtgtattcggatgatgcgttgaaaggggagaagctggacggacgaatagtgtattaattttacattttaaattttagattctggccgcacaaggccgatgctttttcatcctaaattctacattactttaaacttttctttattttcaattgtaaaatattatttttgtcggcgtgtgtgaatgttagtaataaattaatagtatgagtgtgacaacaaaaaagaaagaaaaagtaaagtttagtaaagcgttttgggttgccaacacggtagaattgttagagcgtgccgcttattatggggtgttcgtcgtgatcacgttatatttgagtaatgtcttgggattcacggatattcaggcggccacgattgcgggagttttttccgcttgtttgtatttattgccgacattttcgggtgcgcttgccgataagatcggttttcgtaagtcgatgttattggcgtttaccttgttgtcgttaggttatctgggattgggattattcccgaattttttggcctcgacgggattggttgagtatggttacgtgacgaagttcacgggattacaagaaagcggttatcgctacgggattatcccgatcatgatcctgattatcgtggggggatcgttcattaaaagcgtgatttccggtacggtggccaaagaaacggatgagaaaagtcgggcgagaggatttgctattttttacgggatggtaaatatcggagctttctccgggaaggttcttgtcaccccgttgcgtgatgccatggggcatgaggggatgatcgtgttgaattatttctctgcgggaatgacgttccttgcgttgattgcgatttatttgttttacaagagtgataaacacgccggggaaggaaagactttcgggcagatatggacggctttggtgaaagtgtgtactaacggacggttgattgttttaatcttgattattaccgggttctggatggtgcaacatcagttgtatgccacgatgccgaaatacgtgacccgtttggcgggagaggcaagtgccattggttggtatgctaacgtgaatcctttggtggttgtgttgaccgtgaatttggtgacttcgctgatgcgtaaaaagtcagctttgttctctatgacctgtggtatgtttattatgccgatctcggctttgtgtatggcctctgggaatatgttgggcggtggtgagattcttggattgcatccggtggccttcatgatgatcgtggggatcgtgttccagggattggcagaagtgtttatttctcctcgttttttggaatatttctctttacaagcaccaaagggagaagagggaatgtatttgggttttagtcatctacactcctttttgtcatccattttcgggttcgggttgtctggattcttattgagtaaatattgtccggctcgtgaattatttagtagcgaggccgattgggaggctgcctctgcaaatgcgcattacatctggtattactttgcggcaattgctttggtgtcagctgtggctctgattatttatggaaacgtagtacgccggttggatgcgaagaaggcggcagtaacacagtaatattcattttattaaatagtaaaatgccggtaggttttcctactggcgtttttaattttactttgaattcgcgataaattgaaggtgttgtatattgggaactcttaaaggttattgttaataatgagtgatgttcgagagagattgtattgtgtgtaaaaccgggacatggagtttatccggttgaaatgtttcctttgacgagggtacttggtcttgagttttgatataattatttattgctatcgttgttccgataaggaaaagaacgatagccaagattaatgctcttatcatggctttcaattttaggtgagtttaatcttacgggagatgtgatgataaggttacaatgcaggtctttggcggtgtttacttcatcagttctttgattttttgttttatctggaatgaaaagttatttacggtaacgaatggtcggttttcttcgtaagaattttcaaattctttgttagctttgtgggaatgatgaaagatatgaagacggttatagatttatttgaaagaagttgcgaaaagtttccggataatccttatttatgggaaaagaaaaacgggaaatttgcggctacatcatatatggaggtaaagcgagaagtattgaacttcgcgggagctttgtgccaattgggaatggatagggaagaccggattgcattgttaagcgaaggctgtaatgcttgggtgtactcggaattggggatgttatacgccggaggcgtgaatgtaccgctatccattaagttgacggataacgaaattgtttttcgggtggaacactctcaagctcgttttttgattgtgtccgcaaactttttgaatcgagttcggggaattgaggggcgaatcggaggggtggaaaagattatagtgatacattcagatataaatgaaggtaaatacgtatcctttgagttattacaacgagaaggggagatttggcggggagaacacaaggagttactgaatgaccggattcgtgccgtgacggaggatgatctggtaaatatttcttatacttcggggacgacggctgagcctaaaggaatcatgttgtcccaccggaattatgtgacgaacgtgttgcaatcagattccttgatacaaattccggcatattatcggatattattgtttttaccatgggatcatagttttgcccatacggtagggctttactcttttatgtataacggggcctcgctggtttctgtcgattacgggcggtcgggaatggagtatttgcgtaatatcccggagaatctgcaggaagtgaagcctcatatattattgagcgtacctgccttggcgaaaaattttcgaaagaatattgaggcggggatcaaagcgaaaggacgttttacggatagattttatcatctgggattgaagattgcttatacatataatggttttggggacgatcgaggacggggatggaaggtgttgctgaaaccttgggtgaagttatgggatgccctcttgttctcgaaacttcggaagcaggtatttggtggaaaccttcgtttttttgtgggaggtggagccttgctggatattgaattgcagcgttactacgcggctttgggaattccgatgtttcaagggtatgggttatcggaggcttctcccgtgatcagttcgaacacccccggacgttatcgtttcggttcttccgggatattggtaaaaccgattgatttgaaagtttgtgatgaggaaggacaggaattaccccaagggcaaaaaggggagttgtggataaaaggaggaaacgtgatggctggatactggagaaacgagaagagtacggccgagacgatcgtggacggctggctgcatactggcgatttggggtatctgcaccccgatggttggttgtacgtgctggggcgtttcaaatccttactgattgcgaatgacggggagaaatacagcccggaaggaatcgaggagaccattgccgaacagtcgaaatatatagattattgtatattatataataatcaatccccgtatacggccgggttgattgtcccgaataaaatggcgttacgggagtatatcgagaaacaggatgttgaatcggattctatggatgcctaccgggttatgttgaaaaagatccagagtgaactgatggcttaccgggttggcggaaaacacgctcatttatttccggaaaggtggctgcctgccgtcgtagccgtgttgccggaggcgctgaatgaacagaatggcatgataaattcgaccatgaaagtcgtaagagctaaagtttatgaccgatttaaagaagaaatcgattatctttacaccccggaaggaaaagaaattactaataagcgtaaccttcagaatttaaagcaattaatatcttgaattgaaaaatagaaagtggtgtcattttcaattttcaattttcaattttcaattattatgaagcgtcgatctacgaaacaagttaagattggagaaatatatattggatcagagtatccagtcttggtacaatctatgttaaataccgatacgatgaatacggaggcttgcgtggaacaagcgatacggattattgaggcgggaggtaagttggtgaggattacggctcccggggtgaaggaggctaggaatctggagaatattcacgcggagttacgtcgaagaggttacacgacaccgctttctgcggatattcactttaatccggaggcggcgatcgaggctgccaaacacgtggagaaagtgcgtatcaatccggggaatttcgtggataaacgggctacttttaagacgctgacttatacggatgaggaatatgccgcagagttagagcgtttgcgtgaaaagttctcggcatttttgaacgtgtgccgggaatacggcacggcggtgcggattggtacaaatcatggttccttgtctgatcgaatcatgagtcgttatggaaatacaccagcggggatggtggaggccaccatggaatacctgcgggtgtgccgggacgagaaatttgatgatgtggtgatttccttaaaatcgagcgattgccgggtgatggttgaggcggtacgtttgcttgtgaaggagatggagaaagaggggatggattacccgttgcatctgggagtgacggaagccggagaaggagaggacggaagaattcggtcagccgtgggtattggtactttattaaatgaaggattaggcgatacgatccgagtgtccttgacggaagaaccggaacaggagattcccgtggcgaatcttttaaatgagatctgttgtttacaggatttgaaaacggaaccgatgcatttggaagggcgttactctcatcctgtaattattgcggacatatctaaggtggaatgtcttgatgaggctgtgatggccggtctggattttcacgtggcgacagagaatgatcccgtgtatggtgatatgttgaaaggtgggatgcgggctccggagatgatctacacggaggctttgggaccggagttgacgaaattaccggattccgtgactgtggtcgttccttttgatagtctggatattgcccatgtgtataaccgtaaggcggtcgccttgattgatgctaaagatttcgttcggttatcgaaacccgtggagggggacagtattttcgtggaagtacgtgacggagaaatgataaataccgagcttgccggaaagttggaacgggagaaaaatgcgatcgtggtgttgaagccagaccatccctcctgtgccttgttccgtttgtacttgggagagctgaaacgtttagggataatgaaccgggtaattgtacgggccacgcttgacgagtcggattccaacaggttgagtttgtggatggctgctcatctgggggggatattccttgacagattggtttatggtttgtggttgtcatgtcccggtattccggatatgttctatggggtacatttgagtcaggatatattgcaatcggcaggagtgcgtcgttataaaacagagtttatcagttgtcccggatgtgggcgaacattatataatttgcaggagtccgtggcgaaagtaaagaaagcatttgctcatctaagtcgtttgaagattgccgtgatggggtgtgtcgtgaacgggcccggtgaaatgggggatgcggactacggttacgtgggtgccggaaatgggaaggtgaatctgttccgggggaaagagatggtgcgtgtggccgtgccggaggaggaagccattgaggcattgaaacaattaataaaagagaacggagattggaatgactgatacgagagatacgacacctttggttttaggtaccgagaagatcggaaaattattgatgcaatacgctatcccggcgattattgccatgacggcctcttcactttataatatggtggatagtatatttattggtcatggcgtgggaccattggcgattgcggggttggccattacatttccgtttatgaatctggcagcagctttcgggtcgttggtgggagtgggagcctcaacgttggttgctattaaattaggacagaaagacaaggagagtgctacccatgttttgggaaacgtagtgatgctgaacgggataatcgggttggtatttatgaccgtggcgttgctgtttcttgatccgatattactctttttcggggcaagtccggacacgttaccttatgcaagagagtatatgcaggtgattttggcggggaatctcgtcacgcatatttacatgggattgaacgaggtgttgagagcttcgggctatccgcagaaagcaatggctgccacgttgacggccgttatcgtgaactgcgggttggatgccttgtttatcatgggatttggttggggtatccggggggcggcattggcaaccattacggcacagattatcgctttgggatttgagttacaccacttttcccgtaaaaaaagttttttgcatttccagaaaggaatattcggactgaaacgtcaaatcgtggggggaatgctggcaatcgggttatctccgtttttgatgaatttgtgtgcctgttttgtggtgatcctgattaacaaaagcttgaaaacgtatggaggggatttggcaatcggggcgtacgggattgtgaaccggattgtatttttgtttatcatgatcgtgatgggttttaaccaaggaatgcaacccatagcggggtataacttcggggcccgactgttcgatcgtttgattcaggtattgaaatacaccgtcttttgcggggtggcggttacgacagtcggttttttggccggacagatctttccccgatcgttaatttgtcttttcacgtcggatgaaacattaactaatatagcggtggaaggtttgcgaatcgtgttgatctttttccccgttgtcggtttccagatggtgacatccagtttcttccaatctatcgggatggctaagaaggccatctttttgtcgttgacccggcagttgttgttcttgattccatcgttattggtgtttccttctatttggggaacggttggagtttggatgagtatgccggttgcagattgtatcgcaacgattgttgccgcttgtatgttgagatggcaactgaaacgtctgaaagcgtgaagaaatttatattatagcggttacaggtttgaaaaaaatcgatagctttgtaaaagaatagatttaaaagatcaaaatatggataataaatttgttattacaataggccgccaattcggaagttgtggcaaagagattgggcaggaattggcaaaacgtttcgggatcacgttctacgacaaggaattaatttctttggcttcgaaagaaagcggtttgtgccaggagtttttcgagaaagctgacgaaaagaattccggaaacttgttacaggcttttgccgccggatttaccttcgggcctttccagtacaatgattttctttctaacgataagctttttcaaatccagtcggatgtgattcgtaaggtggccggggaacattcctgcgtgatcgtgggacgttgtgccgattacatcttacgtgacaataagcgttgtatcaacgtgtttgttcatgcagatatggaaaagcgcgtgaagaccgtgatgaatcgtcagcatatatcggaacaggaagcccgtgagttgattcgtaagatggataaaacccgtccgaattattataatttttactcggacaaggagtggggcgtggcatcatcttaccatttgtctgttgattcgggtctattaggagtacacaaaacggtggatttcatccaaaagtttgtggaagaagcactaaaagactgaatgatctttgattaacgatttatgattggctatttttcaatcataaatcgttaatcaagaaatactttagcgtgttaggtcgaaaagttccggttcttttctatcatggaagttcttgaagagaaactctgaaaaaggagtgttgaaaactctggctccgttaggacattctttcacgcaagcgcaacatttaatacaaacttcgggatcgcttacgatctcttctttcaattcaatggtttcaacgggacaaatttcgatacaatattgacattgtgtacatagttcgtcaatggtgatcggggttgccggagttctaggtttattctctttatatgggaaatttcctttcacatctaaaaccggcaatttttttatgtcagtatattgatatagttgctttataatattcttcccgaattcggccgctatttgtatgtcggacacatcggggcgtccggctgccgtggggaattcctccgtgctatacgagtgttccccgataaaggctccaccggcaatagggacaaaacccagttgttttgcggtgttccgtaattcaagtaaggcgtcctcgtaatcccgatttccataaagaacaacaatgatagccggggtgttgtctccttttattttttgtagtctttccaatgccgtcggggctactcttcccgcataggttggcacaccaataattgcaagcgtgtctgatggcaatgttttttgatttgtggacggataagttaaatcaatctctttatttactataatattcattccttctgcaatcgtcgtaacgatttttgcagaggtatgagtcggtgaaaaatatacgggttgaatactttttatttgcataatgttctttgtttctagattattgttttcagcaaaggtaaggattatttagtatattcgttttctattactaattttcacatttcgcaagtggtttgtgaaaaatataatcatattctgcaaaaaaagtcatatttgcctcaccccttttatgtcgttttagtgctttaggggaaaggcactaacaattgaaattatcagtgtggttctggatgaaagtgttgccatgtggaaacaggctattgggcttgacgggatgatttggaccaacggttcagatcttaagggtatggaatccgagattgtgcacctcttctggtgcgggatctcccgacttatttcctgctggacgtcgagaatcgtatcgttgcccgtgatctcttgtttcccgattttcgtgctaaaatggcagagttgacgaagaagaaataaagtgcttttattttcaagtgcgtgcgaaagggggtgttgaaaatgttgactccctcttattttattctcgatcactccacgtgaatatccgtggagtacaggtagaaaagttggctgtgggcgttgtttcctcgacgcttgtttgccgttgggtaagggcgaggacatggggtgtacacttgttcttgtagttgcggagaggttgaagcgctgttgtcgtgttgtcgtggttcccggctttcctcacgcccgggggctaatcgatacttgccggttgtttttcccgttgtctgccggctcgatcccggtatcccggggcgtgttggccgttccccgggagggaaggtcgtgaaaaagttttctccataaccttttgccattcacggttttggtggttatcttgaaaaaaaagatgaaaaaaaacggtgaaaaaatttggaaaatggtgaatcattgctttatctttgcacccgctttcgagagagagggcgcgagggaaagaggttaaacgagggaccggaaaaaaagtttgaaaaaaaagcttgaaaagtttggagaatgaaaaacaagtcttacctttgcagccgctttcgagaggggagacgggagggaagatcgagagcgagagaaaacaagagataaagagttctttaagatattgagatgaacacaacgtagcgagcgtgaatcggaatcgacgcgagtcgagattcgatgaacacatgaccctgccagataaga

SEQ ID NO: 10795 - DNA, 9751 bp, Unknown
  gut microbiota DNA sequence
gaacagagaagttaagcccgtcagcgccgatggtactgccttcaggtgggagagtaggtcgatgccgaatttagagagaggggcgagtcaacgtgactcgccctttttattttctctcgtttttcaattgtacaggcagacctctaacctgccaacttgtaacctgtaacttgtcgcgggtaaaattttttcattacctttgtgtatatgaaaattcggacaaatataatatcgataggattaatcttattagctttattcattgctgctatttatttaataggggaaaagattagtgatgtgggaaacgatatgaataatgcgaatgcacgagaggcttgtcgataccgggcagaatcagttgcgtatgaatttaagaaaaccgaggaattacagcgattagcgagagagttttttgggaaaagtgaatcttaccgggagcaggatttattttcgcttttgaagacgatgcaacaattggacccgaaattaagtagaacttggtttttcaggggaactaatgattctctacggttattggaacggaatagttccgagttacgtaagatgaaactttccgggattgagttaaagtatatgtatacattattggattcacatacggattaccattttagtggtacgtaccacgagaatggaaggacttactggacgacaatcgaggctattgaaccggcagcgacccggcgtattctttttggatttgatatctcgttgacagacttacattcatattttgcagaggttacagggaaggtgtcaagttacgtgtttattgtaaatgaacgggggatattactttcgcatcctgatgaaaatttattggggacttcacctttccaaaaggaagagttggattctatcaaggaagtattaaaaagtcagagtgaattggaaattatggttcattctaatttcttgtcttcacaggtacttcgaatttactatcccctacttgtcgggagtgaaaagtgggtgattgctgttaacgtaccgcagtatggaaatcgggagatattggatgaatttcatcgttacacggcgatgattgccttgattacggtagttatattcgcaattttgttactttttgcccagcataaatggcgtagggaataccgtttgcgacgtagtttggaacaggagtctatggagctgcatttacagcagttgaaaaatcagattaaccctcactttttgtttaattccttgaattcattgagtgtgttaattggttcggattcgatgttggcgagggaatttgtgttgaagttatcgaaggtgtatcgctatttgctggagacaagaaacgaaagcttatccacggtgaaggaagagatcgagtttacccggcaatattattttttgcagaagattcgttttggggagcaattggatttgtctatagatgtgagaccggattgtttggaagcaaaggtgccttcgatcagtttacagatgttagtagagaacgctataaaacataaccaggtgactttacaaaatcccttgtgcattaaaatttatgatcgggatgaatgtttaatcgtggagaataattaccagccccgtgcagaatctagcgaagagtctatgggcgtgggtttcgaacgtattcaggccatttatgacttttattctggtgagaaatttgtatgtaattgtgaaaatggatgttacgtttgtcagctacctcttttgaaaaatcgtttataacaaaaaatcgatgattcactcctttttttcggggtttcactccccttttatttttattgattgaaatctgtcttatcattgtaaagaatcagttaaccagatagatttaatgaataaaagaagtatggtaagaacaaaaacattcattttaggtgcgataacccttgttgccctatcattattgtcagaaccgggatattctctggaaagacgaaagaaaaaacatgccaaggatacaacggaagtgtccaaaccggatacttacggggatttggtgaagaaagccagaattactgaaggtatggtaaagattttaacggttgggaatgattattattttgaggtggctgattctttgatgggacgtgatcttctaatcgttaataaagtatcgggagtaccttatgaattaaatgatgcgggcttgaatagaggaatggaatcgaatgacaagctcgtgcgtttctataaagataaatctatgaacaaggtgtgggtgacaacttacaatggaaaggtaagtgttcccgaggaagatgcgatcagtgaatctgtgaaggccaattatcgcgagtccgtgatcgagtatttcccgattgaggcttacgggaaggattctacgtccgtggttatcaaggtgaacaagatttttgacggaagcgagaaaagttttaatgatatatataatgaaattgctttaggcggttcggtaaagaaggacttgtcgaagatattgggcgtgaaggttttccccaagaatgtggtggtaaaggcgttgatgacgacgcaggtggttgatggcggcgtggcggtacctcttacggttgaaactacaacaaatttggtgttattacctaaggttcctatgaagccacgtttcgccgacccccgtgtaggtttttttgccacggagcatatttattttacagatgagcaacagcaagtggaaaaacgggaattcgttcatcgttggagattggaacccaaaccggaagatgtagagaaatataaaagaggagaggtcgtagagcctgtaaaaccgatcgtgttttatatagatccttctaccccgaaacagtggagagaagagattaaagcaggagtacgggattggcaggccgcatttgaggcggcaggttttaaaaatgcagttgttgcgaaggatgcaccggaaggggatgaagattttgacatagatgacattcgttattccgtcatcacctatgcagcatcccagcaggctaatgctatggggccgtccgtggttgatccccgttcaggagagattatcgaggctgacgtggtttggtggcataacgtgatgtcattattacatacttggatgcgagtgcaaacagcaccgatagatccgagagcccgtgcaaataaactgagcgatgagcatatggcaagcgctatccgctttgtttcttctcacgaggtagggcatactttcgggttgaaacataacatgggtgcttctcatgctttccccgtggattctttgagatccccgagctttactgcaaaaatgggtggaacggcaagttctatcatggattacgcacgttttaactacgtggctcaaccgggagacggggtacaggaaattactcctaaaatcgggacgtatgacaagtttgcgatcaactgggcttatcgttggttagacacggagacaccacaagaggagttgccgatattgaatgaatggattcaagagcatgaaggcgacccgatgtattggtatggcgaacaacaagacccgaaagatccgatcgatcctcgttctcaggatgaagaccttggagatgacatcgtgaaagccaatcgttacgggatcatgaatctgaaacggattgttccgaatattgtcgcatggacagaggaagatggagaatcttttgcggaggcaggaaaattattgatggcggtgattaaccaatggaagatgtatgccgggcatgttacggctaatgtgggaggtatttatatcaataacccggtgaagggaagtccggaagatcggtatatcccggtaccgaaagagattcaaaaagagagcgtgaagtacttgattgaagaggtatttatcgttccggaatggttattcggtgctgaggtatggaagaagagttacccgattcagatgggcgtggaatattctccttacacggttgcacgtgagttgcagtacgctacattctataatctattgaaggacgagcgtttgttgcgtatgtttgattctgaagcgactttaggccggacgaagagttacacgccggaagagatgtttgcggatattcataacgtgatatttgccagcagtaaggctgggcgtaacttatctatctacgagcggatgacacaaaagaattttgtcgatgcgatcatcgttagctcgaacagggctgtggagaaaacgaccaagaaagcgttgcatcattcaaacacgtgttgttttgcctctaaagtacccgaatttacgattgagcctagagaagaggttcaattgaggaccttacacttctcttccatgggtagagtttccgaggctgtatcggtgaagagaggcgaattgttgaaaattttaaaattagcggaaaataaacgaaacacgggtaatgtagaaactcgtaatcattacgaggatttgattattcggattaaagaggcgttgaacatgagatgattttacaccttataacatacaaattaaataagttagcatgaagaaaagtttattattgattgcgttattgtgtccgctttggctgtttgcccaaagcgagagcgactatcgtacgatcaaaggagtcgtgatggactccgtgacgaacgagactttgattggagctacggtaatgatagacccggatgcggcagaggctaagaatctcggcccgaagggaacaattactgattttgacggaaagtttgaattgaaagtgccgaaagcggtgaaatatgtggtggttagttttgttggttataaaaatgcgaaactggacgtgacgaagaccacggaatttaaggttatgttacaaccggatcaggagcagttgaccgaggtggtggtgacaggttaccaacagatcgagaaacgtaaatcgacatcggcaattcagaccgtaaagatggacgatataaaacgtatcggtgttgccagtatcgatcagttgttggaaggacaagtggcgggtatgactgcaattccaacgaatggagctccaggtgccccgagtaaaatgcgtattcgtagtacggtttctttaacaggaagcacagacccactttgggtattggatgggatgattctggaagggaatgatattcctacagattttagtgataaggataatattgacaatctgtataatacttcaattgctggtgtgaatccggcagatattgaaagtataacgatcttaaaagatgcatcggctacagctatttatggagctcgtgctgcgaatggagttattgttgtgacaacgaagaaaggaactgccggaaagatgcgggtaaatgcttctgctgcgatgttcgtaacaacaagaccagatcttggaaagttgaatctgatgaatgcttctgagaaagtggattttgagttgggaatggctgccaatccgaatttgacttatcaaacggatagaggtgctgtttctcgtattcttactgaatatgatcaattgggagtttaccgagatggtggttttaatgcaatatcttcagaagctcagcaggcaataaataaattgagaagttccggaactaactggggcaatcaagtttatcagaatgccgtgaatcagcaatacaatattagtgtttccggaggatctgagtcaactcgttattatgtttctgctggttattataatgagaagggaacaacgattggtactagttttgagcgttttaacggaacgatgaaaacggattttgatttgagagataatttgcaattaggagtttcgttattcttaactcatagtaaacggggaagttatctttcagatacagatgcttttacaaatgcatctaactatactcgaactgtcaatccttatttggaagcaaaagatgaaaatgggaaatatgtttatgacgaggatattgatggattaaaaaataatgaagccagattaaagtttaatatgttggaagaacgtaaaaacacggattattggttgaaaaattttgcggtgaaacccatgctttcattagcttataaacctgttacctggttgaacttatccacgcaagtatctatgcagattgagagatccagtactgaaaaatttgcagatcaagaaacatattttgtgcgtaaatacagagaatttaccgcctatggggacaatcagtattttttgccagatggagggattattcaaaattggaatgatgatatgactcagtatcagtggaaattgcagggagagtttaacaagacttttgcagagatgcattctgttaatttcatggcaggttttgagatgcgtgggaataaaagtacaagtattcatacgaaaggttttggatttgatccccgttctttggcgacaaaacctcttattttcccggaagggacaacttcttcggcttctgattcaaagtttgtacaatatcagaaaacagaaacagagaaccgttatttgtcatattatatgacagcgtcttattcgtatgacaaccggtacacaatatttggaagtatgcgttttgacggatcaaatttgtttggtgttgccaagaagtataaatatttaccattgtgggcattgtctgcagcatggaatgttgatcgggagagttttatgagtagtgccgattggctttctaatttgaaattgcgtatatcttatggattacagggaaatgttgacaagaatacgtctccttttgttgttggagattggaatactacaacaattttaccaggaaattcagaaccgattatttctgtttcctcccctccaaaccagaatttgcgttgggaaaagacaaagaactggaatgtgggagtagatatgggtgtatttgataatagaatctcgttcagtgttgatgcgtactatcggaagagtgtggatttaataggaatgcgatctattcctcaagaaaatggtttcgagttttcaaccatgaattgggctgaagcaacaaataaaggagttgaattttctttatcaacagtaaatattcgagccaaagatttccgttggactatggattttaatattgcgcataacacgagtaatgttgataaaattcaagtgagagatgattcgtataccccttcattggaaggacattctattggcgccttgtttaaattgaatacggcaggtttggatgagaatggtatgcaaatgttttggaaggaaggtcagaaagtctctatgcaagaatttttcaatcttgaagatttgtatggatttatgacattgtcaaatctgacagctgaagaatatagaaatctgttcacgtatgcaggaacaacagagcctaaatttactggaggttttataaatcgtttctattataaaaattttgatttgacaattagtacgagttttattattgatcaaactatgcaggaaacaccattttataatccttccgcaacatctccgggatcaaattactcaaacagggtttctcagatttggtcgtcttccaataccacgggattgtatcctaaagtattaggaaataatgagaatgatgctatgatttataattggtataatagtgatgatccggctaattcgtttaaaaattacgattattggtttaaggatatgagctatttgagagtaaatagtatccgattgggatacactttacctaatgaggttataaagaaattacgtttaggtagtgctcgaattagttttgaggctcgtaatccgtttgtaatcgcatcaagctataaaggttattttgatccggaaacctggggaaatatatatgcacaacctcttccaaagacgttttcatgtggtttagatataacattttaaataggcggatatgaaaaaaatattatatataatttgttcaatgtttgtgctaagttcttgtaattacttggatatagtaccgactggtaaggttattccagaaaaagttacggaatttagagcgttgcttactaacggatatagtgcatttccgaaatataaatatttgttgtcacttcgttcggacgaggtaatgccgatagttggagatagttattatatggactatatagattttgcaatatggcaggataattctccgaatacgactgtaaactatccttggagtaatccatataaagcaatattttatgctaatagcgttattgaggatatcatgtctgcggaggaggatacagaagaagattctagggagcaagtgaagggagaagctttattgcttcgtgcttatactcattttgatttgttgaatttatatggaaagccctataaacctgaatctgcaatatctgatagaggaattcctatcgcgactcaaatagatatagagcaaaaatatgaagcggcaactgtcgaagaggtgtataatcagatattcgcagatataaaggaaggacgggagttattacaagtggaacaacaatctcgggatgtccagtatcgtttctcaaaaagatctgctatggctcttgaagccagagtgagactataccatcaagattgggaagatgccttagaattggcagaagaattgatcccttcatgttctttagaaaatttgaatgaggcaacagcgggagatccggctttagttacatctaaagaggcgatcatgtctttggaagtgattggtagttactatttgaatggaggaatgcatattacctctcaattattggagaaatataatcaagcgggcgataaacgtttaggggtatattttaaagagaatggagattattatgtatgtaaaagagaatacggtaataatgcgagaattaccttcaggagtggagaaatatatttgattgcggcagaagctgcggctcatgtggaaggaagacttgaactcgcaaagactcgattaaaagaattgatggttaatcgattaactccggattattatgcggaaaaagctgtcgagatagatggtatgaatcagaatcagttaattgaggaaattgctaatgaacgtgcaagagaattagcaatcgagggacatcggtggtttgatttacgtcgtactactcgcccaagtatggagaaaacctatgttttaaatggtgaagagagaacggcaactctaactcaagatgatgttcgttataccatatctttcccgaaagaagcaacggaatctaatccgaatttgcacaattaatttgtatgttactaggttgatctagtagttggaaggccgtgggggtggttccccacggctatttttattgtttcgtgaattattttcgctatttttgtgaatactgaaacgatggatgaaagaatcatccggaggaagtattgataaaaatagcctatgaatgcaattataattgaggatgaatatcttgctgcggcagagcttgaacggttgttgggagaggtggccccagagatcacgatattgacgaaactggattcggtgagcgagagcgtgaagtggttgaagaagaataaggccgatgtgatttttatggatattcatctgggggacgggcagagtttcgatattttcgagcaggtggaggttacggcaccggttatttttatcacggcttatgatgaatatgcgctgaaggcattcaagtaccaagggattgactatatattaaagccttttgacaaggaggaattgcagcaagctttgaataagctggaatcgctttcgccgacgaatactcctttccccgtggcatcgttgaccgtgtatcaagagcgttttttggttaccgtggggacgaagatgaagtccgtgacggtgggagatgttgcctatttcatggcagacgggaagt

SEQ ID NO: 10796 - DNA, 44349 bp, Unknown
  gut microbiota DNA sequence
ccgaaggcaatttatctgatttctggtaactcgataccttttattttgcggtataaatttaaagcgtaagaatccgtcattcctgagacgtaatccgttaccgtttgtattttcgtgtaaatggaatcatcttgatgaaccttgtactgttctggcatgacggatagaatattccgggcgtaataggtttctggtttcagaacagcatcaatatattcttttaatatggtggcaaggattttgaaccctgcaatctgtatttgagtaacgatatttgtgtgataaatccgagaataggctaattcggtacaggtttcataggcttgtttattggtgcctgttaaatgatgtatcaagctaccttgaaaggttccgttcatgattgcctcgtagttttggcaaaagatgtctgcacaggcattgattaatttattaataatacctgcacgtagaaatgcgatacattcgtttttgtccgtgacaatcctgaaggttctggagatcgtctttaaatcttccttgtctgtatctttgtcgtagaaattaagaagtatccgggtagtttcatcataggatagaattttcagcttatgagagtcttcaatatccatgatctgatagcaaatatcgtcagcagcttcaaccagataaacgagtgggtggcggacgtattgcaaaggttttgagttgagttggataataccaagttcttcggctacttccttgtatatttctttttcactttggaaaaatccgtatttatgtcctttgagagaggctttagattcaaatgggtatttaacaatggatgcaagagtggtaaaggtcattgtgtaaccacctggtctgcgtccgttaaagctatgggttaataaccggaaagcatttgcgttaccttcgaaatgactgatgtcagcccattcctcgtccgtcaggagttttttcaagtattgcccttctccttccgtgaaaaaataagaaatagcctcttctccggaatgtccgaaaggaggattccccaaatcgtgagctaaacaggccgtactaacaatggtaccgatttcttcgaggatttccgggtgttccaatgcctctttggttttaacaaattgtgcaatcttgtttcctagcgaacgtcccacgctagctacttctaggctatgagttagacggttatgtacaaagatattgcccggtaacgggaatacctgagttttattttgtaatcgtcgaaacggtgaggaaaagattaaacgatcgtagtctctttgaaattgtgatcggtcatgagagcgaaacatggtgatagtacttcccggttgataacgtctcgatgataataatttattccagtccatcatggtagttcagattacaaatttataggttacagatttagtcaattggagacctgtaaggctatacaaatgtagtaataaaaagaagaggaagcaaactgcttcctctttcgatctttattttgaaatgaagtggtagtgactaccaaatctttcgaatgctgctttatcaagtgtttctcggtgatcgggatgagcaatattaattaaagtctttgctctttcctgaagggttttaccataaaggtctgcgataccgaattccgtaacaatgtagtgtacatcgaaacgagtggtaacaactccggctccgtttaacaaggtcgggcaaattttgctcacgcctttgtttgttactgccggtaatgcaatgatcggttttccaccttcgctggctgctgctccgcggatgaagtctaattgaccaccactaccactgtaaaatttaatacctaaagagtctgcgttgacttggcctgtgatgtcaacagaaagggccgaattgatagccgtcattttcggttgttgtgcaatgatgaacggatcgttcgtgtaacctacatccatcatggctactcctgggttgtcatcgatgaagtcatatactctttttgatcccatcaagaaggttgatacgatcttacctttgtcgaatttcttattcatgttgttgacaacacctttttcatacaagggtaatactccgtcagcaaacatttccgtgtgaatacctaagtttttgtggtttcctaattgggaaagtactgcattggggatggctccgattcccatttgtagagtagctccatcttcgatcaaagaggctacatttttaccgatagcaatatcttgctctgttaatgttgccggatgagcctcgataagtggagtattatcctcgcagaagatgtcgatgtctgataatttgatgatagcatctccccatgctctaggaacgttcgggttgataacaccaataacgatttttgcattctgtacggcagctaacgtggcatcaacagaggttcccatggatacaaaaccatgcttgtccgggggacaaacttggatcatggcaacatcaaccgggtgaataccgcttctgatcagtttctgggtttcactcaaatgaacgggtacataatctgcatatccttcttgagtcggtttacgcacgttactgcctacgaaataggattctaggaagaagattccttcgaattctgcttctgcatacggggcactaccttccgtgtgcaagtgttgcaacttgacgtctctcaattctcctgcacgtcctctgttgcaaagagcttgaattagaccttggggggcacaagccacactgtgaatgtgaatccggtctccggattttacaacttttacagcctcttcaaatgacactgttttgattccttgatacatagcaagttattttgttttgatttcttatgatttaattattagctaacctcttgaaagaggggtgcaagttaacaacactcttttaattaaacaattttttccgtaattattagtgttcaatttgtgacacggtttttacttacagtagccagcctagaatggcctttcccgtgaaaagataaatattcaaaccgatgatgtcgttcgttagggtgataaacggtccggtagctagagccggatctatctttagtttattgagtaataacgggaatgctgtaccgaacatggatgcgaacatgatcacgataaataaggatatagttaccgtgatgggcatggcaagtgatgttaggttgaaacaaagggataggataaaaatgatggaagaacagatgcaggcatttatgaccgcacatgaaatttcttttgagatactctgtaatatgttttttgatgtcagggtgttggaggcaagtccttttaccacgatggcggaagactggatacccacgtttccccccatggcggtgataacaggaatgaacatggctgttgctgggaataaggcaatgtctgcctcgtagaaagaaatcatataggctgcaagcattcctccgaataaaccgatgatcagccacggaagacgtgctttggtttggtcccagatcgtgtcagaagattccacgtcctgcgagataccggacatcatctggtagtctttttctgcttcttcccggatcacgtcaaccacgtcgtcgatcgtgattcgtccgacgaggcgtccgatggaatcaaccacgggaatggcgactaaatcgtacttctgcatgatacgtcccacggattcggctggttcatcggtggttacgtaggttacgtccgggttatatatactttggattttggtagatgtcggggaaagaatcatctttttcaatgaaagtcttccttttaagatattgtcgtcatcaacgacgtagatgtagaatatttcatctaggttctctgcttgtcggctaagttcgcgtaggcaggtgaggacggtccaattctcgttgactttcactagctctttacccataagtccaccagcagaatcttcgtcgtaatgcaacagatcgacgatgtctcccgcttgttcgaggtcttccatgtgtgaaagaacttcttgttgttgttcgttgggcatactacccacgaggtcggcggcatcgtccgtgtccatgttgtccacgaaacgtttggctataatttccggggggaaagaatcgataaatcgttgtctttcgtcttcttcgatttctgccagaacatctccggctttctcttcatctagcaacagaaacaggaattgggcttctttggtgtccaattcattcatgatttcagcaatatccgccgaatgaagaggttctaccaacttggagacatcttctttattatccgcttttatcagtccctctatctgggaaactaactcttccgagagttcaaactgttgcatagttcatcaattacttgtttgcctgctgaatctctttacatagtgtaatgaaatcctctacacttaattgttccgggcgcaaagataacgtttctgaggcaaaatctggagaaataattgattttaaagaattacgtaaggtttttcgtcgttgattgaaacctgattttacgatattgaaaaaaagtttttcgtcacaatcgagtttttcccttttattccggatgagtcggattacggcggattttacttttggtggtggatcgaaaacctgttctcccacggtgaaaaggtactcgatgtcgtaaaatgtttgcaggaatacgcttaaaattccatatgttttgttcccgtgagaggcactgatgcgttcggccacctctttttgtatcatacagacgacttggggtattaaatcccggttttctaagatacgaaaaaagatttgcgaagagatgttataaggaagattcccgatgatcgaaaacggttctgtgtagaaatttcgaatattcgattttagaaaatccccgtaaataatctgctctttatgagcaggtagctcttcgtgtaggtagtcaatggactcctgatcgatgtcaatggcaagcacggaaaatttcgtatcttttaataaatgacgtgtcagtactcccatacccggcccgatttccagtactcctttggtgacaggtagtaaactcgccgtgattttacaagcgatgttttggtctttcaaaaaatgttgtcccagatgttttttggctcgaacgatactcatagtatgaattcagggtgttatgggttaaacttccaattatttatttacttttgcaaacgacttacaaaataatgcttttattttgatttgtgaaaattattagagtgtcaatcttgacgaattttgtgaatgaagccattttataaacaggttataaaatttcttgcctttttgctggtaacagtttttttgttctggctggtgtatcgagatcaaaatttcgatgatttgatgaaggttttgcgtgatgatgtcgactatacgtggatatgggtagcgattgttttcggcttacttagccacgtgagtcgttctctgcgttggcagatgttgacaaaatctatgggataccggatttctttcatgaatagttttatgggggttatgatcggttattttgctaatatggcgatcccccggatgggtgagtttacccgttgcggagtagtgagtaaatatgagaacgtgccattctcgaagttattgggaacggttgttaccgagcgggtatttgacatgattatgttgctgttgcttactttggttgttgtcgtttcgcaatttaaacaggttgggatattcctggataataatgaagagattaaacaaaagttatacacgatgtttcattccccatggacttacgtggtgttgggagtattgagcgtgggggtggcaggtttcttctggtttgtacggaaaggtacttttttcacccggttacatcattttttatcgggaatgaaagaaggtttattgaccgtgaaggacgtgaaacataagtggttatttattggtcatacgatttttatctggctgatgtattttctgatgctatacgtttgtttcttctgtttccagttcacctctcacttgggaccgatggttggtttgaccgtgtttgttctttccagttacgggatggtggctccggtacaaggtggcgtgggtgcgtggcatttcatggtgattgcagccttgatgatttatttaccgcatacggaagaaattgccagcctgtctaagacatttgctttattgactcacggcacgatgacattgttgtatatcgtggtaggcgtgttgtgtttgttattcttgccaatatataatcggaagtaaatttcatgtttatggatattgttgaaaaatattttaccgggttaagtgagagacaatcggaacagttccaacaattggaggggctttaccgagaatggaatgaaaagattaatgtgatttcgaggaaagatatagatgctttgaacgtgcatcatgttttacattctttggcgatagcaaaggtgatttctttcaaagcggggacaaaagtgctggatgtcggaacgggaggaggttttcccggaattccgttggctattatgtttccggaggtagatttttttctggtagattctatcgggaagaaaattaaagtggtagagggagttgcaggagctttaggtttaaaaaatgtgatagcaaggcaattgagagtagagactatgaaagaaaaatttgatttcatagtgagtcgtgccgtgacggcttttccggcttttgtagccttgaccaagaagcgtattcgggagaatagttttaacgatttgtccaatggaattttgtatttgaagggaggggattttgaagaagagattcgggattttaaggataaaatttctatttataatattcctgatttttttgaggaagagttttttgaaacgaagaaattaatttatatgaaattactcaaataattttctattaacgatttgggaataagaagaattcttcttaaatttgtcgcagtttacatttccacctggttcatgccgggtgattttacttacgtaatgagaattatccaaatataacgtgactatatgtacgatattttagaactgaatgaaaagttactttcagatttgcgtcaaattgcaaaagaactgaatgttaaaaggattgaatcctttaaaaagaaagaattaatatacaaaattttagatcagcaagccatgattgctaccgaggaaacagctcccgttgaactgaaggagaaaaaacctcgtgtacgagtgataaggggaggtgctgaaaaagtgggagattccaaaggaggattggccaaatttaatcggaataaagataagaaggctgatgctaaacaagagaaaccccaaaatgaaactgtcaaagaggcttccgaaaagaaagatgcggttttacccgtagaggaagtgcagccgatcaatgttgtgcatagtgatattttggataaggatctggttttcagtcgtacggaaaacggtattgttgtagagaaaaaaggagaggttgttgcagaaccacaggaaatggaagtaaagaatgaaatttcagaggctcctaagcgtgagcaagccggacaaaagcaagaccgtaagtttttcgataagcgtaaccggaaacaaaccaatagggaagaggtgaaaagtgaagaaggtaaagaagaggtgaaagaggaaaaggtggttgaagaggttgttaaagaggaacaggtggcagaaagacccagtcgtccgaagtttgtaaaacggaatagacgtgttgagagagatgaagaaaccattcgtcaagatgtggaagagaatgattttgaagatgttgaaaatgaatctggcgttaaggaagaagctgaaaatgaaaattatgaaagcgttcctgctgagtttgaagaaagaagagaaagtcaaaacaagatgcgttttgacaaacgcgataaatattatgagttcgaaggaattattttaaattcgggtgtgttggaaatcatgcctgacgggtatggattccttagatcttctgattataattacttgaattctccggatgatatttacgtgtctcaaagtcagatcaagttgtttggtttgtcaacaggagacacggtggaaggaaccgtgcgtcccccgaaagaaggagagaagtatttccccttgattaaagtgtcgaaaattaacgggaagtctccggaagcggtgcgtgaccgaatcccgtttgatcacttaaccccgctttttccaaatgaaaaattcaatcttaccggaagtggacgtgctacgatttctactcgtgtggtggatatgtttgccccgattggtaaaggacagcgcggtttgatcgtggctcagccgaaaacgggtaagacgatgttgttaaaagaaattgctaatgcaatttcagctaatcatcctgaagtgtatttgatcatcctgttgattgacgagcgtccagaggaggtaactgatatggctcgtagcgtgaatgcagaggtgattgcctctacttttgacgagccggcagagcgtcacgtgaaggtggccaatatcgtgttggaaaaagctaagcgtatggtagaatgtgggcatgacgtggtgatcttgttggattcaattactcgtctggctcgtgcttataatacggtatcacctgcatccggaaaggtgctttccggtggtgtggatgcaaatgcattacacaagccgaaacggttctttggtgcagctcgtaatattgaaaatggtggttcgttgacaatcctggcaacagctttgacagagaccggttcaaaaatggacgacgtgattttcgaggaattcaagggtactggaaatatggagttgcagttggatcgcaagttgtccaaccgtcgtatttacccggctgtggatattacggcatcaagtacgcgtcgtgatgacttgttgttggaggactacacgttgaaccgtatctggattttgcgtaactatctgacagatatgaattctgttgaggcaatgcaattcgtgaaggatcgtttggaaaagacgaaatctaacgaggaattcttgatctcgatgaatgataaatagttttataagttttataattatggaaaagcgagttcatatggactcgcttttttgatacctcaaatatagaatcattttaagtatgtacttatatcgcaatagtgtagcgggttatgtgtgaatgaaaattctttgggaggtatgaaatgtatgttttgcaacatgtagattacaaaactatgctttttttattacctttgcattgcaaagaataaaaaatggagagtttacgtaacacgcataagatcttgatgaaagaaaggacatcggctatccgtcgtggtttattggatgcgatagattctcgtgcccggttgattgcgataaagggaagtcgtggtgtagggaagaccaatttccttctagatttttgcaaggatcattataaggacaacccttcttgtctttacgtgaatatcaataacttgttctttgcgatggaaggattgtttaatttcgtggaacgtttctacaagctgggagggaaagtgttgttattggatcagatccataagtatccaaactgggaccgggaattgcgggaggcttacgatcgtttcccggatttgcagatcgtttttaccgcatcttctattttgcgggtcaaatccaacaaatatttgcatggaatcgtggagatgtacaacctgagcggtttgtcgtttcgggagtttttggagttagaaacgggatataagtttcccgtttattctttcgaggaaatcgtggaacaccacgaggagatcgtgaacgatattcttgaaaaggtacgtccgttagctttttttaataactatttgaaatatggttattatcctatatatttggaggagaaatcacatattgattatttgctgaaaaacatcaacttaacattggagtttgatattccgtataataatcaaatcgagctgaagtacttgacaaaattgaaacaattactttttatcgtggcaaatggtaatagtaatattaatattagtaagttgagtgcccagattggtgtttctcgtgcaacagtgttaaattacctgcattacatgaagaatgctcggttattaactttgttgtttgatcgggaaagtgatgacgagaacgggctaaaaccaaatcaagtatttttgcataatccaaatttgctgaatgcggtttgtctggatcagacagattcatttatgattcggaaaacatttttaattagtcaattatgtgccgtggcaaaattgaatttttcgggaaatgaagatttattcgtgaaccagaaatacgagatttctgtacggcaacaaggagataaagggcgagtccgagattcagtaattctgatgaccgatatgatcgaacgaggtaaaaagaatgttatacccttgtggctcgctggttttgtgtattgagagaagtaaaaatcttaaatagagtgatcaactattgttagttaatgtttaaaaagatggcaaaagaaaagaaatttatcacatgtgatggtaacgctgcagctgctcatgtagcttacatgttcagcgaggtatcgtgtatctatcctattactccgtcgtctccgatggcagagtatgtagacgaatgggctgctaaaggtagaaagaacttgttcggggagacagtaagagtgatggaaatgcaatcagaggcaggtgctgccggagccgttcacggttctttgcaagctggtgcgttaaccacgacctacacggcttctcagggattattattaatgattcctaatatgtataagattgcaggtgaattacttccttgtgttttccatgtgagtgctcgtgctttggctgctcatgcactttctattttcggtgatcatgcagacgtttacgctgctcgccaaaccggtttcgctatgttggcctccggttcagtgcaagaagtaatggacctttctgccgtatcacatttgactgctattaagtcaagagttcctttcgttaatttctttgatggtttccgtacctctcacgagattcagaaaatcgaagagttggacatggaggaaattcgcggattggttgatatgaaagctttgcaggaattccgtgaccgggctcaaacttcagagaaccctgtaacaaagggaaccgcacaaaatccagacgtgtatttccagggtagagaggctgccaataagttctatgatgcagtacctgacatcgtggctaactatatggatgaaatgtccaagattacaggtcgtacttatcgtccgttcgtttattacggagctaaagatgccgagaatatcgtcattgctatgggttccgtgaccgagactattcgtgaggtgatcgattataaacttgctcagggagagaaagtgggtatgatcgctgttcatttgtatcgtccgttctctgctaaatatttcatggaagcagttcccgctaccgtaaaacgtattgcggttcttgaccgtacaaaagaaccgggagcaaccggagatccattgtatcttgacgtgaaagacgtgttctacggacaaaagaatgccccgatgatcgttggcggacgttacgggttaggttctaaggatgtaaccccgggacaaattatcgctgtttacaagaatttgactatgaacgagccgaaaaaccaatttactattggtatcgtggatgacgtgacttttcgttctcttccagttgaaccggaagtgaaggtgaattcagatcatatgtacgaggctaagttctatggtttaggttctgatggtacagtaggtgccaataaaaactctatcaagattatcggtggagcaaccaataaatattgccaagcttatttcgcttatgactcaaagaaatcaggtggtttcacggcttctcaccttcgttttggtgatgatcctatccgttcaacctatttggtaactactcctgacttcgtggcttgtcatgtgcctgcatacattcacatgtatgatgtgttgaaaggtttgaaaaaaggcggttctttcttgttaaattctctttgggatgagaaagaggtaggtgaacaccttccgaatgccatgaaacgttatttggctgaaaacgaaattaatttctatattatcaacggaacgaagatcggtcaacagttaggtttgggcaaccgtaccaatacgatcatgcagtctgctttctttaaaatcacaaacgtgattccttacgatttggctgttagcgaaatgaaaaaagctatcgacaagtcatacggaaagaaaggtgaagccattgtgaaaatgaactatgctgctgttgatgcaggtggtttggctgaaaacgtggtgaaagttaccgttcctgctgaatggaaaaacttgaaagacgagacgtgcgctcatgacgaaaaccgtccggaatttatccgtaacgtggttgacgtgatgaatgctcagaaaggtgatgatcttcctgttagtgcatttgcgggacgtgaagacggaactttccctgcaggtacttctaaatttgaaaaacgcggaattgctatcagtgttccggaatggcaagtgaataactgtattcaatgtaatcaatgtgcttacgtttgtcctcacgctgcaattcgtccgttcttgattactgatgaagaattggctgctgctcctgccggaacagaaaccaaaccggctatcggtaaagaacttgcgggattgaagttcaagattcaggtatctccgttagattgtacgggttgtggtaactgtgctgatgtttgtccggctaaggagaaggcattgatcatgaaaccgcttgaatctcaagaggctgaaatcgctcgtttcgaatatatggataagaaggttggctacaagaaagtagttgagccgaataacgtgaagaattctcagttccaacaacctttgttcgagttctccggagcttgtgccggttgtggtgagactccgtatattaagttaattactcaattgttcggtgagagaatgatggtggctaatgctaccggatgtacttcaatctatggaggttcagctccttcaactccgtattgcaagaattatcagtcaggacgtggtgtagcttgggctaactcattgttcgaggataatgccgagtatggtcttggaatggcagagggtaataaccgtttgcgtgatcgtgctaagagattgttggaagagaacttgtcaaacttctctgcagaaactcaggctgctgttaacgaatggcttgctgctttcgaggatggagagaagactttagttgccagcgataatatgtctgctgctttggctaaagaaaattcagctattgctaaagagattttagaattgaaggcttacttcacgaagaaatctcaatggatctttggtggtgacggatgggcttatgatatcggttatggcggtttggatcacgtgttggcaagcggtcacaacgtgaacgtgttggtagttgataccgaagtatattccaatactggaggtcaatcttctaaatcaacacctgttggtgctgtggccaaatttgcagctagcggtaaacgtgttcgtaagaaagatttgggtgcaatggcaatgtcttatggttatgtgtacgtggcacaagttgctatgggatctaatcaagctcaatatctgaaagcgttgaaagaggcagaggcttatgacggaccttcattgatcatcgcttacgctccgtgtatcaaccacggtctgaaagcaagcatgggtaaatctcaggctgaggagaagaaggctgttgaatgtggatactggcaattgtaccgttataacccagcgttggaagaagagggtaagaatccgttccaattggattctaaagaaccagattatagcaaattccgcgattatctaatgggagaggttcgtttcaactccttgttgaaagctgctccggaagaagccgagaaattgtttgctaagacccagtctgatgctaaatggcgttatgaaggttacaaacgtcgtgcagaaatgaaatatggagagtaaggtctcacgttaataatagaagaagatcgcccggagttatttccgggcgatttttttgtagattctactggcaagccataaacacaactcttttgtattatccgagtcttcattttaatatattctgaaaaatgaaacaaaacacacccgtatatgatgaaattatctaaatacggttcaattgttaattttaattacttcattagaggcacgatagattgtaaatacactataaatagtactaattcttgatttactgaaagtatttttgtattgtataaaatgagaaggaataatggataataattaggtattttttggtagatgacaattacagttacttgtttcaagtagaaatgatgattaaatgtgttttgatcatgctggggttgttagaagtaaaataaaacctttttgtttatctcaatttgatgagtgtatattggactatttgtagttggaaggaatgattaagaaaatacatatattggggataattctggcatctgttctactggtgtcctgtatcgaagagcgtttaagtgcggatgatacagagaatgcatcggcctatttacaggtgcgagggaacagtttgttgagttcaacagacccgcttgataatgagattaagagccttaggatacttgcgttcaagaaaagcactggacaatgtgtaagcaacaaattgtatagtgcagaattaaacgatgtgattaatcatcctattgatgaaggtgtgtatgatttcgtgtttttggcgaatgagccgaacttggtgagtgttttggatggtttaaatgggattaatgattacgccgatcttggaaatatcacgtatcccgaacaagcttttagatctgatgtatccattccgatgtttcaagaattaaagaatgtagaagttcttcctgaccgaggtggtgcaagagttgatggaggggaaatacaaagtctggttgagttgcaattagaacggcttggtacacgcgtggatattgtgttggaaggagaagaggatttaacgaattattttaaaggaattactttttacaatcttccggaagggatcacgttgatgtcagcaagtaatgcctcgcttggtagaagtaaaaatcggaaatttacattgacagatgatgccagctatttcacgagtgtttttcccagcttggagcaacaatctcgtggtatcgtgtgggtaaagaaaatcactcgtttcatcttgcctttcagtaatttttcacctgaagatgacgatagcaaggctattacattaaaagttgatatggagaatcggcatagcccttcttgtcacttgaaaatacaggccaagggagtggccggagcttcgaaggataactacactttaccttataattctgcacttttacttactggcacgattaaatctcctttgaatcttaatattcaggtaacaccttggggtgaagaaaatcataattggcaagtggggaatttttacttgaatgtttctgatattaacgtaagtattaccgatttcaatggtgcgaggataactttctcgtctaatatgcctaaagttcacgttttgccggatctgtatgtcggggaggagcaagttgtaaatatgtctacaggaaaagtctttaatgatttggtttttactcccgtggtaaatagcccttggtttgcacaatatggcaacccggtgcatgatgggaagtttgtgaagtatgagacatcccgttttagttatatctatgatactgaatctaaaacaggttcgggatatatggatattttacttgatgagtataatgaaatacataataagacctttcgtttagttttatccggagaagttgatggagaaaaaaaattgcaacgagaaattaaagtacatactcgtcaagaaggctatcgttttgatggaatttattgggatggaccgtatgttggggctttttttagggacgatgaaaaaggagaacgtattatcacggggcagcagccacgacttgaaaatacgacagatctttccgagtggcaagtgtggatagagaaaggagatggagatatcgttttgagtacaactcctagttttgacccgtttgttggtacggctacacccggtgacgccgaggattatccggtacgtcctaacgaatttaaacaacatgaatctggaagttatgttacgggaagaggtcgagtttattttcgagttgcatggaaaagggaaaatcctaatcctgtcattgataacgggctcaaacaaccgagatatgcagtagtttgtttgtcttataggcgatcaacgggttggagtcctctttcacgtatttatatacgacaaggagaagctgctgattatttaatgacaaatggggataatatccagcttggtcctttggccaataaaactcggacagaagcaagaaaaatagctgtttttaatctgacaactactaaatataagaatggtggagaaaataattatgaagatttatcgcagataaagagtggcgtattcgtgaaatatccgagtcaagccggggtattttttcagtggacttcaaatgctcatcctcgcagggcatatcatccaacaaaaccagtgaatggatattcttcaacggatgattgggatgatattttcgtgggagctcgaccgatgtgggataatggatccggaactgattatgcatggaatcataaggacatttctgaagtttgtcctccgggatatcatcgtccgaatgatggatacacaaatcagatagcgtataacgggccttacccgaattttgaacgtactttgccgttaccggtagaacgttccactcatgatggtgaccctgcaagtaatagcaatgatcaaatgtattcggaacaaattgaaaaatcagaatggaggcaatcgttggcgcttaatcctgttgcgggagaattggtattgggaaatgaagcgatacttgatgagcagtatcccgcagaacgtgtgggatggaaaatttatcgttacccaacttctccaagctttcgtgaggatggtgaggatgagaatataaaagccgtagatggtttttatgcggatggttatttcgatcgtcgtcctatccagaagcaacaaattgctaatggaactaatcgttacggggttagtgttaatacgtcacaggttgcttaccggggatgtgtgttctataattcagcgactggggcttctgtattttttcctgctggagggcgtaaggaattgaaaggtagattgatgtatgcgggggagactggctattattggtcctcttctgtgtccccgatatttcctaattcgatgtataatgcgtgggctcaggaaagtcgtcgggatttggtaggaaatgtatcaacttcaatctcagcgggacatttaattagatgtttccgggataattgaatttaatatatattgaaatgggggatattaaaatacatataatttatttgttggtgttactgacttttttttcggcttgttcaataaaagaagaagtgccgggtgaacctgttacgataggggaaacaaaggttcgatttgaacttttcacgaaagctgggacttatggtcttcctgtttctcgtgccggagagaatgaaagtgttgtggatcaacaaccgtgggtacttgtttttctaggaacaggtggaacggctagttttgtggaggcagttcaggctgagttatataatggtaaaacatatgtttatctggaagaacaagcgggaaattgtcaattattgatattggcaaattctccaagtcgattttatatgaatggagttggatatgcttatacagccgacaattttgtaaatactttaagaggacgtgatcttgattatgcttgtcggaatttgcttacggaggcattaatagatccacaatatacggtaccttatatcgggcaaaaattaccgatgagtgatttggtcaatttgtctaaaattgatgctagtgtaacaatcccgaatatacaattgaaacgtatagttgggaaaattgtagtagaaaatacagatgcggattttgtgctggagggaattacagttgtgacgaatgtggctaaaaattcgaagttacataacttgacagatgcattggaacaaaatatcggagcggacaatttagtggaatatagaaaagatgattcgtatgcgctaaatatagttgatgcggaagaaattgtaacgggagggcagacaacaaagaataatccgctctatgtttatgaaacccatagtttatcgaatgatacttatctcgtgattcggggacattataaaggggagagttttttttataaaatggctcttgtgaataatgatcaacacgtattggatatcttgcgtaacacggaatatatctttacaataacttcggttagagggagaggatttatttcgatggcagatgctaaagcttctctggcttccaacacgaatttggattattccattttagtacaagaggaatccagttacgagattgttagtaataacgaatattatttgggagtaacgaattctcattttgaaatttatgcctcggcagcttcaggtacggcgtatgtcgcattttctttaataacagattgtaagtcggaaagtataggagaacgaacgataacggcaacaagcggtttgaggattgtttctcctgtggatggaatgataccggtttcaacaactttaccttctcaggtaaaaatagagatgctggccgggtttacttcaggtgaaattgaattacgtttgggaaatttgagaaagactgtaacggtaaaaagacgggagcaagtaaccagtagtggtacaataattagttcatttatagatgatggttattatatttctgcttacgtggaagattatgtgaaccatagttggttaaaattgggaccggaagagggagaggtgcgtaacgacccggattatatatacgtggataacggaaagattaaattatatgtcgaaaagaacacgtccggcaatagagagggggtcgtgtacgtttcggtaggaaaggggataactcaaagaataaaagtttatatcactcaagggataccttcctcttgattgtaggtcaactataaaacaaaactatgaagaaactacgattaatatttatttttttatttgcttgttgtgttatgccggaggcgtatgcacagaaagttgccgtgaaaagtaacttgctatatgatgcaacagcaacattcaatctgggagtcgaattcgggttagcccggaaatggacattggatgtacctgtgaatctaaacccatggaaattcaatgatggaatgcggttacggcattggggtgtacagcctgaagtccgttactggttttgtgaacgattccgacgtacgtttatcggtttacatgctcattacgcagattttaacgttggtaattttcctgactggtctttcataagtgagaatatgaagcaaaatcgttatgaggggtatctatacggggctgggatttctgtcggtcatgcatggattttgaaaaagcgctgggggatagaggctactattggtttggggtatgctcgtatcgtctacgataaatatccttgtgcggagtgtggttctcgtttgaaatctgatactcgtaattattttgggcctacaaaagtgggtatttcactaatctatctaatcaagtaaaatatgagaataatgatacgatatacggctttcctgttggttgctttcttgttagagacattaacttcggaagcccagccaaaatcctcttataccgggactattaatatcaatccggtacgagtgttgcaagcaggcaaaacgctttacgtggaaatggatattattctggatcacgtaaaagtgaaatcggcgggagcggttgatattattccccggttagtgtctgcttcggatacacttgtgcttcctaaagtttcgcttaaagggcgtaacgagtatctaacctacgagcgggttctttccttgatgagtctttctgaacgatcggtttattccccctcttatcaagtggtgagaaacttgaaggttgaaaatcaaacgatagagtatcgctatacacttccttttgaggcttggatggcggaagcctatctggatgttcagaaagatgaatgtggttgcggggaagtggcttggatggaagtggagacaatcgataccgtgaagctggatattattccgtttccttaccggatagttccctacttggcttacgtgcagcctgtgcccgaaccggttaaaaaccgggaaaaacaagtggaggcttttttggatttcgaggtgaaccaaacttatattcagccggaatacatgaataatcccttggaattagcgaaaattcgggcgatgattgatgaattgcatgtcgatcacgatattacaattaaccgattggatcttatcgggtatgcttctccggaaggttctttggccgggaacaaacgactgtccgaaggaagagctttggcattgaaaaattatctggcaagacgctattcgtttgcaccttcactttaccacatcgttttcggcggtgaaaattgggaaggtttacgtaaagctttgactgatcttgatgtagtatacaaggctgaaattgagttgattatagataattatgacgggcaaaagcgaaaagagcgtttgatgaaattacaaggaggggagccttatcgttatttacttcggaatatttatccgggattacgtgttgccatttgcaaggtggaatatcacgttaaaaatttcaacgtggaagaagccaaggagattatgaaggtgcgtccgcagaacttgagtcttaacgagatgtatttggtggcaaatacttactcgaatggatctcgtgagtttattaacgtgtttgaaactgccgtgaagttgtttccggaagatgacgttgctaaattaaatgcggcaatagcggcgctttctcgtggtgatatcgaaatggcaggacaattcttggatcaggtgaaatatcgggaactaccagaatatgcgaatgcggcgggagtactggctcttctaagaggcgattatgatgttgctgaaagattccttcaagctgcttctgatgccggacttgaagttgctggaaagaacttgaaggagcttggtaagaagaaagcgaatgatttggaaataaaatctaggatgattaatgaataagaataaggtggaataaaccaataaataataatttgataaataaaccaatcaattttttaacaaataaacaaccaattttcaattaaactttgtaactatgaagaagatgtattattttgctgcaacccttttaataatgttgtttgcagcgtgtagcaatgaccatattggtcaagatgatgatgacgggattgtaacggatcctactggggaggcttggatttctttggatattaagactaccgcaccgaaggcgttaggtagagcattgaataacccggataaggagatgggtactccggcagaatctgccgtaagcaaactccgagttattttctttgacgagaatcggaatgtaactgctgacaagtcttttactgttggtactaattcggaagctggagaacccggacaaccggaaggaatttttggaacggcttttaaagttccggcagcgtcaaagcggattttggtaattgcaaatccaagtgtggacttgcctgatgtggggttgtttaatagctatgatgattttaatcaagctattgtagctgttgcctcgttatccacaccttcctatttcatgatgacgaacgccaagggagatttggaaccttctcaggccaatggtgatgaaaccgatctgaccctttacaattcagcttcaaaggctgagagtcagccgctttctattcatatagatcgtgctgtggcgaaggttcgggtgtatactgacaatggtaatatttcatccaacaatttgaaggcgaatatatctgaacccggttgggttttgaatgcgacgaacaaaaggtatttcccggtatccaagcgagtgaagacttggatggaaggaacttcgagaggatgtattactccttttgaccagtatgatctcgggtcatacagaatagatccgaatcatgacgtgcaacccttgatgtcagacccaggttttgcaagttatttgcaagagtataattatgagatgaatgcggcgaatatagcttcttctgcttggcatccgactgaaatatccgtggataacgtggagtattgtctcgaaaatacccagacagccgatcataacgtgtgggcttacacgactcaagtactatttaaagttatttattctccgaagggattgattgatccggataagaatgtttacaataatcctgcggataatgtgaacaatggagaattgcttcctggtactgattggcttatggtcaatggtgggtactatacttggaatttgttgatggattatatcaaagcggaactgttgtataaatacactagcgaggataaagatccgactgttatctatactgctgcattatccaaaacgttgaattcgtatttgaaggctattgggactccggaggtatcgactgacagaggtaatgggactcccgaaacgagagctaatgaagtggttgataattttaatcagaaaagaagtaatgtagaaaattatggagctttccgtcatggaactgtatcttattacaaaggtggcgtaaattactatccgattatgattaaacatgatgatacagaccaggtttacaatgaatatggagaattcggagtggttcgtaattctgtttatgatgtgcatatttctaaggtgaataatccaggttatccgaatattccggagccagatccgggtaccaaagatgaagatgaggataattacttgtctatcagaattaacgtaaatccttggacttggtatactcaaactgaagaattataattagttcgatgattttgttaaattgtggggggcaacgtttgtccctcacaagcttatacctcttggtatgggaggataattgtttgccattagtaaaatggaacgccaaaaaagaaaaaaatgaatttcaaaagtcatatgaatttactaatcgttggtctactgatgattggtacagggatatttatatcctgtgatgcctttaatgaagatttgccggaatgtcgcctgtttgtcaagtttaaatatgactataacatgctatccgtctgtgcttttcataaacaggtagataaagtggaactctatgttttcgacaaggatggcaaattccttttccaacaagccgaagagggggatgcattggctaccggtaattaccagatgtccgtggcacttcctttgggagaatacaaacttatggcttgggccggggtacatgattcgtacgatgttcctcagttagcccctggtgcgtcgatcacggagttagaattgaaattgaagagggcttcttcgctcgttattgataaagcgttggaaccgctttggtatggtgaaatcaatgaggtaaattttaccggtaatatgaatcttgtcgagacgattaacttgatcaagaatacaaatacggtaagatttattttccaacaaccggaaaatagcgggggtgggtttgccgtggatgattataattacgaaattcttgaatcgaacggttatcttgatcatcagaatcaattaaaggatgatgatgagttgagttttcgtccctattatagtaaacaaatcagtcctgctgccatcggggtggaattgaacacgatgcgcctggtggatgatcgaccgactcgttttgtcgtgacggaaaaagccacgaataaaccagtgtttaatataagtcttaccgactattttagtaagacaatgatggccggacgtaattggagtactcaggagtattttgatcgtcaggatgaatgggatgtcgttttctattttgccggtgagaacggagaaggtttatggcatgccgtgcaagtgatcatcaatgattggacttggcatattcaagatgaaggagaggatttataattttccaaagaaaattgattactttaggtctggatcgtggcgacgtggagcattttatggatgatagcgataagttccggttggtaatcgggaccgaagccggtgagagtcgagccatagatgctattgaagaggtactgaaaaagttgggatcggttatcgaagaggtagatcatgccaagtatttgatgtatattgagcatggaacggatgatttaatgatggacgaattggtccggatcgtgaattgttgtgaggataaaacggggggataagatggagattgttgaggggctgggcgtaataatgaattagggaatcaactggaaattttattgttggtcgggtggaaataatgagaggttctgattggccatagaaaatgttcacggaaatcttttttaggattcccgtgaatgattattattcgtaagttagtttgaaattctggtcatttgaatagacagctttttccggtgaaaagaaaaatacataaagatgaagagcctttgccgtttcacagtccacgtggaaaactgctttttgctcctttcgggttgcggagcaccttcgatgagtcgtggacggaaactgcggtgattgtacatggcgatgattcccagacgagagttgtcatatgaggcgatatattccagatggtttgtccatgtgagcgtgatgttatctttttggtcaatagagatttgcatgttgagggcttggggaagagttccctgcggcatgtgctggttcgaaagatctccgattttaccgtttggaagaaatacgttcgtgttaaccttgtgaaacaaggtgtaatgatcatcatggtattcgagaggtttcgaacgcactcgatttcctgtcgcttgttttgggatttttttgtttttaagtaaccttgaaaaggggaaaagcgtaatgtgtgaaaattaaacaagaaaaataatgaatttgaataaaatgttgaatttgacgggaatggtagctctcgtgacgggaggcggtaatggtataggttgcgggagtgcccgtattttggcagaggcgggagctgacgtggtgattggtgacgtgaatctggctgcagccgaagaggttgccgaggatatacggggaatgggacgtaaagctttggctctgaaatgtgacgtgacgaaggaggcggatttgatgaatttcgtggaacgagccatcgtggagtttggtaaattgaacattctggtgaataacgtgggagttggtgggggaggccgggaaaatccttttcgggtgacggtggaatatttcgaacatattttcaaggtaaatgtgttcagtgcttggagattgtgccagttggtcgtaccttatatgaaacaggctggttatggttcgatagtgaacattacttccatgggaagtatcaaccggagtccgaacatgagtgcttatgcctcgtcaaaagcggcattgaatcacatgactgccaatctggcaatggatttcggacccgacgtacggattaacgccgtgggaccgggagccgtggaaacgcaagcactcgcatccgtgctgactccagagatcgagaaaaaaatgttggaacacacgccaatcaagcgattgggtgaagtggaagatattgctggggcagtcctcttttttgcagcaccgatttccagttggatcacagggcaggtgttattcgtgaacgggggaggtgtccaaacgttggattaatccttttcaggaccacccgttccttctttttgtacttgtaattctttgatttctttgttgagaaaaatggacaggattgtccgtaaaattacaactcccccaagtatggccaattcattcaagctgggttccagaactgtttttagaatatcggaggcgatcaaaaactcaaggcctaatagtaaataagttcctagatcggcacgaagttcacgagttgccgtgaacgagtatttcccggtaaaacgccgggattcattatgtatgaatgcgcaaaaagcgattatcgctccgtagataacgatgattaggctgatgatgctgatactcgtggataatatttcaagatagtgcatgattttcatcgtatgatatttataatgtcgtaattacggattttttgtataaaggttgttacgattcccgttttttcgctaaaatcgttatctttgaggtgctgttaaaaataaatcacttactataaagaaacaatggagcaagagaacaaacaaatgaattcactcccggataacgcataccgggaactcgccccgggcgaggagtacaagccgatgatgccggcgaatacgaaccccaaggaggttacgccttattccgtgacattcggtattatcatggcggttatcttttccgcggcagcagcttaccttgggttgaaagtaggacaagtattcgaggctgcaattcctatcgctattattgctgttggtgtgggcaatatgttggggaagaaaaatatgttgggacaaaacgtgattatccagtctatcggagctagttccggtgtgatcgtggccggggcaatctttacgctaccggctctttacattttaggattggaggctcaattttaccagatatttctttcttctttgttcgggggatttttgggtatcttgttattgattcctttccggaaatatttcgtgaaagacatgcatgggaaatatcctttcccagaggcaacggcaaccacggaagttttggtttctggtgaaaagaaaggtaatcaagctaaactattggccgtgagtggtctgattgggggtctttatgatttctgcgtgagtaccttcggttggtgggcagaaggaatctctactcgtatcatgggatggggagaagtgcttgctgacaagatgaaagtggtatttaaagtgaatacgggtgcggcagtacttggtttaggatatattattgggttgaaatatgcggcgattatttgtgccggttctttcaccgtgtggtttgtgctgattccttttatcagccatttcgccgacggacaaacgttagccgtgggagaggggatctcggtgttattgcgggatatgaccccagagcagatattctcaaattatgcccgtcatatcggtataggtggtatcgctatggccggagttatcggtattattcgttcttccagtattatcaagcaggctttaggattggccgttagtgaattgggtggaaagaaaaaaggcgaaggtgcggtagaacgtacacaacgtgatatttccatgaagttcattttgtcaggaatcatttccatattgattgctacttttgtgttcttccaatttggagtgttgggtaatttgacacacacgatcattgctactttgattgtattcgtcatctcgttcctattcacgactgtggctgcaaacgctattgctatcgtgggttcgaatcctgtatccggaatgacattgatgacattgattttaagttctttggtgttggttagtgccggattgagcggcacgagcggaatgatggccgccatgattatcggtggtgtggtttgtactgcgctgtctatggccggaggtttcattactgatttgaagatcggttactggttggggaccactcctgccagacaggaaggctggaagttcttgggtacggctgtttctgctgccacgattgccggggttatgatggtattgaaccagacttatggtttcgtgggagagaatgcattggttgccccgcaggcaaatgcgatggctgccgtgatcaaacctttaatggaaggaggggcaactccttggttgttgtactttgccggagcggctttggcattgatcttgacgatgatcggtgttcctgcgttagcttttgccttaggtatgtttatcccgttggatttgaataccccgttattgattggcggtttggttagttggtatgtgggtactcgtagtaaagatgagaatgtgaataaagctcgccgtgaacgcggtacattgatcgcttccggatttattgccggtggtgctttaatgggtgtgatcagtgctatcttgaaatattgcggtgctgactggtttatcagttggagtggtgctgaggtattggctgtcgtgatgtatattttgatcatcctttacttcatctacgattctatgaaagctaaactggcggattaatttacgatttatgatttacgattgaagatttgattccagtcgtaaatcataatctgacatcataaatttgaaatctaaaatttaaaaattatacaaggtggatttaaaagatcgttttttgaaatacgtgagtttcgacacgcagagtgacgaaatgagtgagactttcccttctaccgaaaagcagaaagtgttgctgaaatacttggtagaggagatgaaatctcttgggttaaccgaggttgagatggatgagcatagctatgcgatgggtacgattcctgctactccgggttatgaggatcgtccggcgattggttttatcgctcacgtggatacgagtccagatatgagtggggcgaatatcaaaccgcagattatcgagaattatgatggaaaggatatccgtttgaacgagaatttgatgatgacagtaaaggattttccggagttatcagcattcaagggacacacgttgatcacgaccgacgggacaactttgttgggtgctgacgataaagcgggtgttgcagagatcatgacggctaccgaatatttgatggcgcacccggaggttaagcacgggaaaatccgtatcggtttcacgccggatgaggaagtaggccggggtgtggattatttcaacgtggagaaatttggtgctaaattcgcttacaccattgatggtggttttgagggcgaattggaatatgaaaacttcaatgccgccagtgccaaggttgctattcaaggacggaacgtgcatccgggttatgctaaagataagatgattaatgctttgcaggtggctgctgaggtgaatagcctgctgccagcctgggagcgtccggaacatacagatggatatgagggtttctatcatctggtaggattgaacggttctgtggagaatgcggaaatcagttatatcattcgtgatcatatccgggataagtttgaagctaaaaagcagttcatgacgaaagtggtggaacttttgacccagaaatatggagaaggtgtgttaacgttgactttgaaggatcaatattataatatgcgtgagatggttgagccgcatccggaagtgatcgacaaggcgttcaaggctatggaacaagccggggtgactccgattgtccgtccgatccgcggtggtaccgatggggcccgtctttcatacatgggattaccttgcccgaatttattcaccggggggatgaacttccatggtaagtttgaatattgttctttagacacgatgagacgtgcgcaacagacgattttgaacttgattcagctttgggcggaatagaattaactcgataaaaaacagagacactccaatattgaaaaattggggtgtttttttttatggagataatagacgttttaggatttaaatgcatatatttgtaaaaatacaaaaagatatgcagaagtttataaccttactcgtgttcgtgtgtgcaatttgttcatgcgagaaaagtgataataagccttcccaaccaaggtatttagtattgaccaggactgtaaaaatgttgccgactgagtaccaaaaaggtcgcgagatgaaagaggtttatacatacaacgatttcgggtatgaagatagttttatcttgtacgttgacggtgaaaacgtggagcaaagaaaaaattacaagcatgatgaactgggacgagttttgcattgggaagcttttaccccggatgggaggaaagggttaacgatggattatacttattctgcgtcgggaaagatattggtggaggacaaagtttttcttccgacagcagagagcgggtacggggcggagacagatcattacctgacgcaatacacgtatgatgaacaggatcgtgaaattcagcagctttcttacctcaatgacgaggttcttggggtacatacaaattacaagtatgataattctgggaatttacttttggttcataatgttgataaagacggacaacttaaaatgaaatatgaggctacttataatggggccgggaagatagaagaaagcacggtgacatcatatttaggtttggaaatgactactacatggaagtattcttatgattccaaggggtatttgatattggaggaagaatatcaagatggaaaacttgcgcacgtgcttaaagatcataaatacgacgaggcggggaatcttttgtcgtgtaattcgtatggggttgatggtgttgtatgtactgaatatcactacacttatcaacgaattgattgaaagtaaatatcgtttgcttgatttttatcaaggtttgatgtcaagaaaatattaattttacatcttaataaagtaagatttaaaatatgaaaaataatatgtccgtagccgaacaagctactcttttcccttttaccccgccgaaacattcggatagtttgtgtattcccgttcagacatgggagtttttatgtcacacgctctatttaaagcggtatccttttttactcggtccgaaagggtgtgggaagtcttccattgctaaggaattggcagatgctatggggatggagtatttcgcttttgatatgggacaggcttttaagccgaaaaagatgttcgtgggaggattgattattggggatgatgggaagacgaaagcggtacgttcggaatttttcaaggctttcgtgtcaactaagcccacgctaatattcctagatgaattgacacgaaccccgatggtggcggcgaatttcctaatgacgattttggatcgtcaacaatcgtatatctatgatgaggattccgggaaacgctataataaaggtgagaatgtgcttttcgtggcggcaggtaacgtgggatttgcctatgtttccacgcagcgtttagacacggctttcgaagatcgttttattaaagttcggttgaattacttgaccgcggaggaagaggctacactgattcgggctcgtttcccgaaagtgtctcgtgatgcggctactcaattggccaaggtggcagaggtgttacgtttggctgaacagaaagaaacactatccgtttcactttcgactcgtcaagtattggatgcggcagcttatatcccgttagggtaccggttggatgaggtgatcgagcgggtgattcttactaactacgtgattacaggggaagagacggtggctcgttccttaatacagactctttgaacgtgtgaacatggattatcgacgtatagaagagatatatgacgagcagtttatcgaccgggattggtgggggaattttcctgcgacacgaaatttactggatcggaatctgggaaccacggatttgttgaaattgatcccggtatgtgcgagaatcgcttttcatgtcacgggagagattcctaaaatggtactttccaaccgggttcctagtttatcgatgaatcccaagcatattgccctaaatttgaaattgttgcgattgggagtgtcggacgagacgagagtatttgtttttttcggatatttcgttcacgagctggcgcacctgatttatacgggaaaagatattgcagagttgagagatgatgagttgcgctatacgccaatgcattatgatatgattcattttatagaggatcggcgggtggaatcgaaactcgtaaaggagttccccggttatcattattatttgtatgcggctcgcaagctgggattggcaatgggattgaatgccgtggagcattatatgggattctatggtggacagagtgaagatggtgtacatcggggaatggatggttccgaggctttgtatgattatatatgttctaaaatattatatccgaatctgctggatgagagcaattacatgcgggaagtgttgtcttttcccggtaatgatgggaaggtacttcaggtgaataccatcttgaaatcgatcaaggattacggggaattgacttacaaggaggttgtttggtatgcggaaatgttgaccgaattgtttcaagagaaggagatatgtccggatcatttctttttgcaagagatgaaaaaggcgatgaagggtattgaggatttcaagacagacaggcagattaaaatggctgaatccgttattcgtgatttgcggaaaacattgaaccaagagcctgtcttttcgactcagctatacgtgagtccggaacggtcaaagttggaatggaagggaacattgggtgtttgtgaccgtatcgaggagttcgaggcagatgtagccgagatttcggatgatttattaaaccgggcaaaggaactggctgctaaaatacaactgagtctggctatgttttccgggaagatggatcgaacccgggtgatctacgagcaggattccggggagttggatgaggatgaattgtatcaatctcggtataaccggaatatattttttgaggaagtaatggctccttcggctattttggaagtggttatccttttggatttgtcaggttcgatgtgtacgggagacaagatacccatgcaaattgtgatctcttctgcgttggccttggctttcaacaagtatccgaacgtggtatattattcgatatatgggcatcgctgtggagatgagggcatcgagattattcgttttcatgatcggggcgagaaactgcaactggggaaactgttttctcaacaggcgttaaatgccaatgctgacggatatgccatgctgtattgttttgataagttcaagtcggatgccaaaaataaattgtttttcatgatttccgatggggctccctcagccacgggatatgacggggagaatgcccgtgaacacgtgtgggaagtcgtgcgggaaggaaagaagagaggaattgaagttttgtccgtggggattgataatttcgagcaggcggatatgtatgaagagtttatttcttattccggtccggagatcacgacgaaaatctctcaatggattcgtaagaaattcatgtcgattacggatgataattcgttttaacgataataaaaaaacagcagcaaaactgctgctgtttttatttcttattataatcctaatttcttacgtattgctttcggaatagcatctttgtgaaccatgattgccacggtttgcaagcgacagaatggttcggacatataaagataaccaccgaaggggttacgatcttctccccaagaatttttggtcttatagtagatcgttccgttctgatcctttaacattccggtgatgtgcatcaagtgatcgtccgttgtctggcggttattgaaggtgaattgacgtttgttgtcatctactctcatttccggtacgggggattcgaaagattgcattttgcgttcccgatctcttgcgctaagtgttgtccacttgtcaatctcggcattgatcatctcttctggattgtttgtcgggagaatggccaatccgttcgggtggctgaaaccgttgtggcttacgtcaccgtcccaacatacggagtatccgtttttcaaggcgttgttcattacttccatgagttcatcgatcggtagattgtaataacgggcatgcatccagttgtcgggaattgtgagttctacttcttcgtagaaaggatacatctggtaagaagtcaactccacgtaatcattcaagtttagatctagggatgctgcaaaactttgcggggtatactccttaccttcgtaagtgaatgtttccgggctgtcgcccaagtaagcctcgatatatctcatgaaaccttttgtccacacgggagtaatttgccggttcggatttttgttcacggcgtcaaggattccttgcaaagcagccaccatttctgcatgaatgtggaagtctcgtccgtattgcaaaccggtatatgcttcttccggaacaattccgtactttttgatcatgtctattacgtcatgtgcttgtccaccctcgctgaagtttgttttcccgtggaattgaacgtaacgtaatcctttctcgaagtaagcgtttttagccacgtaaagctctgccagatcatagaccggtttgcctttgcgtagtaattctgtttctaggaatgagagagttgcgtagtcccagcatgttcccacgctttgttgattctttaccggggtcgtttttaagtcgacgattgttgtaaagttgtaaccggaacgaggtccgcttttttgtgcaaatgcggcagtactgatggaaaccagcagaacaaccatacataagaacgagtgttttatcatatctgaattaattttggtatttttactttggtggcgaagttaattaaaattttgcatacactaaaaataatcttttatctgcaaaacgaatgctttgtagtggataatctatatctttaccttgtttttgtggacgtggagagaaatgatacttaaatataaattactttattcatgaaaaagaccgttatattacttttgagtgttactgcgttagtaacatcttgtaaggatggtgctaaaccagtgaacaatccgttgatgcagaagtttgaaaccccgtttcaagctcctccttttgataagataaaactggtggattacaagccggctttcgaggaaggtatgaaacagcataaggctgaaattgaggctatcgtgaataacccggaagaaccgactttcgagaacacgatcgtggcgcttgacaaggccggggagttgttgaaccggacgtctgcgatattcttcaacctgtatgaagcgatgaagaatgacgaaatgcagcaattagccatggaaatcagtcctgccgtaacagcccatggggatgagattaacatgaatcctaaattgtttgcccggatcaaggcattgtatgacaaacgagagactttaggattggatgctctggctttgcgtacgttgaaactgtattacaatgatttcgtgcgtggtggtgcgaatctaaatgatgcagataaggccaaaatgatgcaaattaatggtgaattggctaaattgagtttgcaatatggtgataacctgttgaaagaaaccaatgctttcacgttggttgttgataacgagaatgatttggtcggacttccggagactgccattgccgccgctgctgccgaggctaaagaccggggaatggaaggtaagtgggttttcacggttcaaaagccaagtatgattcctttcctgacatatgctcaaaatcgtgatttgcgggagaagttgtacaaagggtattacatgcgcgggaataatgacaatgctaatgataataaggcagtgttagcgaaaatggtgaacttgagaacggagaaagctaagttgctgggatttgacacctatgctgcttgcgtggtagacgtgaatatggccaaaaccccgaaggctatctatgatttcatgggacgcgtgtgggaaccggcattgaaagttgccaaacaggagttggctgaaatgcaggctattgccacgaaagaagggatgaagtataaactggaaagttgggattggtggtattacgcggagaaattgcggaaacaaaaatatgatctggacgaatccgagatggctccttatctgaaattggaaaacgtgcgggatggaatgtttgcggttgccaataaattgtatggaatcaccatgcataaaagaacggatattccgttatatcacccgcaagtggagacttacgaggtgaaagatgttgacggaacttctctcggaattttgtatttggattattatactcgtgctagcaagtcggcaggagcgtggatgactgaattccgtcactacacgaaagtaaacggacaggaagaaatgccgttagtttccgtggtttataatttctctccggccgtgggggatgctcccgttttgttgagctgggatgacacggaaacgatgtttcatgaattcggacacgccttgcacggattctttactcgtggcgattaccagcggattgcgggtactattccttacgacatggtagagttaccttcacaggtgatggagaattgggcgagcgaaccagaagtgttgaaaatgtatggaaaacattaccagacaggtgagactatgccggatgcgttaatccagaaaatacaggaaagtggacattttaaccagggattcgcgacggtagaatacgtggcagcagctttattggatatggattggtactctaatacagaagtgaaagattttgacataaacgcttttgagaaagcctctatggataaatacggtttgatcagagagatattacctcgctatcgttccacgtatttctctcatatattcgatggtggctacagtgccggatattacgtgtatctctgggccgaagtactggatgctgacgcattccaggctttcaagtcttccggggatatttacaataaagagctggcagccaagtttagaaaatatgttttgtctgaaggaggatatgctgatcccatgcagcagtatatcaaattccgcggtcaggaaccgtcggaggatcctttgttgcataagagaggattaaaataacagaagaatccgtaaagttcgtaaggtttataaagtttataaggtctataaagtttgtgaatccttggggatgatttgttcttgatggcattattgccgatggagtagtctgaaggatacccgtggcttttgactttatgaactttatggattttataaacttattacgatgtgtgtgcgtgtatttgttcttttgctttgtctattatcgatacagggtggaaggctgtttgcaggaaaaaggaaatgttttccagagatactgagagttgattcattggttcgggaagaaaaatgtgttgtcgtaaaaggagtcgtgtgtgatgcgcaaggcgaggcgatagtcggggtcaatattattgaaaaaggaacgatgaacggggtaactaccgatcggagagggaaattctcgcttgaggtagatttacatggaacgttgattgtctcttttgttggctatcggactcggattatcccggttgaagggagaaccgatttcgttattacgttggagcatgattatattcttttggacgacgtgatcgtgacggcattgggattgcaaaagaaagaatcggccttgtcttacgctgctatccaagtggataaggatgaattagtccgggtgaaaaatccgaacatgatcgtggcgttgatgggaaaagtggccggaatgcaagtgaaccggagttcttcgggaatgggaggggctgtgaaagtcgtgatgcgagggaaccgatccgtggctgggaataatcaaccgctgtacgtgattgacggggtacccatgttgaatgaaagcagtgagcaaccttacacggctatcgggggaacggctgatgcgggaaatcgggatgccggagatgggatttctaatttgaatccggaagatatcgagagtattagcattttgaaaggagcccctgctgcggccctttacgggacacaggctgccaacggggttattttgattactacgaagaagggattggccgggaaacaagaggttgctttcacttccagtgtggcttttgacaaggcgatgatgttgccgaagttgcagaatcattacgggatgagtgatgaaatcgagagttggggagaacgagagaatataaccacgggtaacccgataccctctttttttcgaacgggcgtgacagcaattcattctttatcctttatgacagggaatgaacgtgtgcaaacttatttttcgtatgctaataccatgggaaaagggattctaggaaaacatgagttgtcaaaacacaatattaacttccgggaaacagcgacattttacgaggggcgtttgaaaatagacgggaatgtgaatctgttgagccagcacgtgaaaaatcgtcctgttccgggaggattctatatgaatccgttagttggtctgtatcgcttcccccggggaatggatataaccgaatataaagaacattttgaagtatggagtgaagaacgtcatttgaacgtgcagaattggcatgccccaaccgaagattttgagcagaatccatattggatacaggaacgaatcacgagccgggatcaacgtacgcgggctattgtttccctcgcgttgaacttgaaaattacaaattgcttttcagttcaggcccgtggaaacgtggattacgtgaacgataaattccgtcaaaaatattatgcttcgacggctcctgcgttagcaggaaataacggacgttatatagattccgggaacgagcaggtgcaaacgtacggggatgtgatcggaacttataaaggaaaatttagtgacttttcgttggacgtgtctttaggcgtcagtattagccggaaaaaagccaatgaactccggtacgattcgaaaactgcctctttgaagttcgcaaacgtgttcaatattgctaatataaacatgaatacttctgcctatatttccgagcagattgatgctatccgggagatgcagtctttgtttatcacgacacaaataggttttcgagattatttatttctggatgtttcagcccggaatgactggagttccacgttagcttacacgagccgggaatcaaggggctttttctatccgtccattggggtttcttgcttgatgaatcgggtgttgaaattgcccgaacaggtgacgagtggtaaggtgcgggttgcatggagtaaggttgggaatgacattcctttgtatattacgaatcctgtggctcacgttctggccggagggggaatacaggcatcggatgcggcttcttttgaagagatgaaaccggagatgagcctgtcggtggaggtgggaacggaatggaaattctttgactctcgcctgcatattgactttacctattatcagacacatactaagaatcagtttttcaaattgccagcaaaagatggcgacgagtatgcctatcgttacgtgaatgctggaaatattcagaatacaggtgtcgagttgatgatcgagggtactccggttgagattaaaaatttcagttggaaaacaggaataaattacgctttcaacaaaaataaagtggtgcgtttgcacgccgagttacccgtgtttcaatacggaccttatggtttttcatccagttatgcgatgaaattgaagaaaggcggatctttcggggatatatacggtaaagcgttcaagcgggatacagacgggaaaattctttacgagacggatggagaacgtcagggattgccgatgattgaaggagatgggaacacggtgaaagtgggaaatgccaatccggacttcacgttgggatggacgaatactttctcttggaagggattggtgttgagcttgttggttgatggtcggtacgggggtaaagtgttgtcgcagacacaggccgacatggatatgtacggggtgacaaaagttaccggggatgcacgggacagggggtacgtgatgctggaaggagagaagattactaacgtgaaagggttctacaagtctatcgtcgggggacgtgccggggtgacggaatattatatgtatgatgccactaatttccgtttacgggagttggctttggggtacactttccccaagcgctggatggaggcgacgaagtttttccgggatgttcaactggcttttacagctcgaaatctgttttttatatacaaggaagcgccttttgacccggatctgattctttctacggggaatgataaccaggcgatagaagtgtacgggatgcccaccacgagaagtatgggattcagtttacgtgtcatgttttaattggaagaaaggatgagaggtttaatctacatgataataggggtgatatctgtctcttgcacggggcgtttcaaggacttgaacacggataaggcggggatcacggatgagaatatgcaagtcgacttgaatcacctgggaatacccttagacgtgattcagcagggaatctattttaactatgattacggaaaggggaagaattggccctatcagctgatgcagaatctgagtgccgatatgtttagcgggtacatgcacgattacaaacctctaaacggtggaagtcataactccgattataacctgcaagacgggtggaacgggacgttgtgggagaatacctacgcttacatcatgcctcagattaaacggctggaggactctacccggttaaaatatcctgccgtgtatgctgttactgaaatcttgaaggtggaagtgatgcatcgggtttccgattactatggtcctgttatttacacgagtttcggaaataaaaaaatgatttatcagccggatacccaacaggatgtttatcattatttcctggatgatttgaagacggcggtgggaatactggaaaattatgtgaatttagccgactacacgcctgaattttcccgttttgatttgttgttggatgggaaggttgaatcgtggattcggtttgccaactcgttgcgcctgcgtctggcaattcggatggcaatggccgatccggataaagcccggcaagagttcgcggacgctttagctggccctctcggggtttttgaagaacccacgcaactggtggcggtgacgactgatgaggaatacagtaacccgttgggcgagattaaccgggtgtggggcgaggtgtacatgaatgcgtccatggaatctattttgaatggttttgacgatccccggcgggaggcttttttcgagccttgtcccgatgatgttcttttgccggatcgggatgggagggattcggtgcttattcctttgaaagggcagtaccggggaatccgtcagggaaccatgtttgcccacacgctttattccgctctgtcgaaaatatacgtaaatgtccagacaaaaccgattctgatgacggcagccgaggtctggtttctgcgggcggaagccgctttgcggggatggactgcagaggaccccagaatttgttacgagcagggtatccggtgttcattctcccagtggcaggtggccggcgtggaaacttatttgcagagtgattgtcgggcggctgatttcgaggatgcctttacccccgaaaataatatcaaggctcgttgtctagtttcccctcgctgggatgatgccgcttctgacgagatgaaattggaacggattatcacgcaaaaatggctggctgttttcccggaaggttgcgaggcatgggcagaacaacgaaggactggttatccgaggttattctccgtgcggtataacaatagtcgtaacgggtgtgttgacacggaaaaaatgattcgtcgtctgaattatccatcttcaattttagatagtgataatgggcaatacgagatgctggtcaatgccttgggaggtccagatcatgccggaactcctttgtggtgggataccggacggaatttttaggaatcttgcttattctggggtgagaaatagatattaaattttaagctataatcgaaactttatcgagttcctttcgtttctataggtgttgaaaacgaaataaaaacgaacttttaaatatttatagttatgatgaaaggaaatatcggtttaaatgctgcaatgattaaatccagcaaaaccattttgaataacctgttggctgaccattttgttttacttgctaaaacttggaattaccactggaatatgaaaggcccgagttttaggtcttatcacacttttttggaagatctttataacggcttgattgaagatatagatagtattgccgaacgtgttcgtgatttggacgaacgtcctatcggttctttgaagggatgtttggaacataatcgtattaaagaacatgatgatgaaaaaccactccccgatgcaaagggaatgctggcagctttgctggacgataatgccgaggtgattcgacaaatccgtaccgatttggaaaccatggagaaagaagagtcaaaggacttcggaacatccaatttcttggaagatatgattgagaagaaagaaaaagtaacttggatgatccgggcccatttggaatagggatagatttttttgttattagtgaatgaaagggattgctgtgatggtgatcccttttgttttgtgtatagtaaccttctaatccgatgtttttgtatcttcgtggcgaataattatatgagatggaagatagagagattagcgatatattgattcgttggtacgaggagaacaagcgggatttaccgtggcgaagaacttctgatccttacttgatctggatttcggagattatccttcaacagaccagggtggtgcaggggttggagtattttaaccgattcacggaacggtttcccaacgtggcggctcttgccatggcggatgaggacgaggtgatgaagtattggcaggggctagggtattatagccgggctaggaacctgcatgcggcagcccgacagatcatgaatgattttgatggtgtttttccccgcacacgagaagaagttctttcgttgagaggaattggtgattacacagttgctgccatttgttcttttgcctaccggttaccctatgcaaccgtggatgggaatgttttccgggtattggcccggttgtttgatatagatttatctattgacgggggagaagggaaaaaatattttacggcattggcccaatccctgttggatgaacgtcgtccggatttgttcaaccaggcgatgatggagttcggggcgttgcaatgcgtgcctaagtcaccggattgcgagtgttgtcctctaaacgggaagtgtttgggattggcagcccgacgagtggaacgattacctgtgaaaagtgggaagaccgtggtgaaacctcgttattttaattatttgtatatacatgggcaaggtatgacccttttatccaagcgaatggagaatgatatttggcgtaatctctacgagttcccgttaatcgaaacggagtgtgcggttacgtggggggaattgtccggtatggctgtttttcaagagttatttgatggtatcgaaaaagttgaaattacccgggagtacgtggcgaaaaaacatgtcttgtctcatcgagtgatataccctgtattttatgaaattcgggtcgattctttttcggagagtatggggaaatatttgaaagtacccgataatcgggtgggagaatatgctgtctcccgattaattcagtcatatcttgaagtgcgggatggtttgttgttttaagaaaaagttcattgtttgtcgatcgctgttgaaaaaagtttatttttgcactaatgcgaaaaagtgatcgagatatactggatgtgttcttgaagaaccgtaaggaaggagttcggatgttgtttgatcgatattatcggcctctcgtgctgtatgcgggaagtttgattgacgatgatacgatggctgaagatctcgttcaggaatttttcgtgcgtttatgggaagatgattatttgaagcatatagaggaaaaggccttggtttcttatcttttttcttccgttcggaatagttgttacacttacacgcataagaaggatgtgttgcgtatgcgggtggattacactgctattgatgtggcagcggatacggcggcagtgttgaaccaggaaattgtggatcgggtggcggctgttattgctcggatgccggaacaaacgaggaaagtggtggattgtgttctgatgcgggatatgaaatatcaggatgcggcagatgagttacaagtgtcattgaacacggtgaaaacgttgttgcgtaacgggatgcgtatcttgcgggaagaattaaagagagacgaagagttgattttgttgcttatcatgtcccggtgtttaggtgactaggttatccattatccattcatttgttattgttcgagaatagttaacctttccgttatggttgctctaccctttcgctatctcataaacatatcatgaacatagcaactacataacatgaatactgacgggtgtatgtgctccgttcgggttatgtaggaattttgtagctgcctgcgggaagggatagagaagggattagtagggtatggctcagccctgtttttaagaatgtatttattagaattaattttgctt

SEQ ID NO: 10797 - DNA, 1594 bp, Unknown
  gut microbiota DNA sequence
ccttaattccgcaacataattgataattatttttataagttcctgggcaacattttgttgcccaggtttttgccatgtcagagttttcacttaccttagtgttgcgaatccaaagacaagaaaaatcgtaacagacatggcaaaggtagcaataaaatccgaaaaactcactccttttggaggcatatttccaatcatggagcaattttcctcccttctctcctccacaatagattcaacacttgggttgaggtgcaaactctatggttatcaatatagcgaaatcatccgcaccctcctatgcgtttacttctgcggcggttcttgcgttgaggatgtcaccacccacttgatgagtcatctttcccttcatcccacactccgcacctgtagcgccgacaccatccttagggcaataaacgaactggcccgggaaaacatctcatacatatctgatgccggaaagtcctatgacttcaatacggcagacacactcaacatattgctcctgaattgcctgttggccacagggcagttgaaagagggcggggagtatgacgttgactttgaccaccagttcattgagacggagaagtacgatgcaaagcccacgtacaagaaatttcttggttacaggcccggtgtggccgttatcggcgacatgattgtcggcatagagaacagcgacggcaacaccaatgtacgttttcaccaggaggacacgctgaagaggattttggagagacttgaagaaaagaagctgacagtcaaccgcttcagggccgactgcggctcatgctctgaagacattgtggatgaggtcaggaagcattgcaggacattctacatacgtgccaaccgctgctgctcgctctatgatgacatcttcgccctcagagggtggaagaaggaagagataaacggcattgtgtttgagttgaattccattctcgttgagaagtggaagggcaaaccgtatcgcctggtaatccagagacagagacgcatgggcagtggaccggacctgtgggagggggaatatacataccgctgcatcctgaccaacgattacgaatcatccatgagagacatcgtagagttctataacatgcgtggtggcaaggaacgcatctttgatgacatgaacaatgggtttggatggggcagactgcctaaatccttcatggcggaaaatactgtgttcttgctcctgacggcactgatacgcaatttctacaaggccattatgcaaaggattgaagtgaagaagttcgggcttaaggaaaccagccgtatcaagacgtttgtcttcaaattcatttcagtacctgccaagtggattaagactgcaaggcaatatgtgctgaacatctacaccgataaccatgcatatgcagaagccttcaaaacttcttccggatgatttacatcacttgatggccactaattgcgtattgcctcaagtcgctttatggggtaagggaatggtatgcgtattgaaacggatgcgaggacttaatggctgtcttacgaatcaaaagttcattcctctttatgtaggtagcacttcgggaatggagttgcggatttaagg

SEQ ID NO: 10798 - DNA, 12633 bp, Unknown
  gut microbiota DNA sequence
agcaggatatgggattccacaacaatacggctgatacttttataagagagccgtcaccggccaaagcggaagcggacggcaatgttagcggttctgctgaatccggctcaaacatcgtccaagtgaccatcggcacactcatggagttgtgcgtgcagccgcaccaagccaaggtctcatccagtggcggaggtggaggaaacgaaagcggctggggagacaatgacaacgaaaaggacaaacataaaccaaggaggagaaaaagatgaaggacaacaagcagaacttaaccgaccttatcggggcattggcagtggacatcgaggaaatcaagaaaaaactggacgcaaaggatagcccggacaagaacgaggcattgaaaagactggaagcgaagctggagcctgttatacggttcttcaatggcaatgcaccggaaaatgtcaatgccattttcggaagcaaggaagccatcgaggaatacaagcaatcaataggtgatgaagcggtagcaagtctgcggttatacaccgaagccaacgagaaggatatgcgcaaacatggtgttctcaccatcaaggaacagctcaacaagatattggaaaggctgacaagccacattgagaatgacaaactggcttcggaaaagtcacgccaaaagcaaagtgccatatcggaactatggcaggcaatccgcccggacaaggcaataagcgcaataaggctgttatggagcaaagttcccgatggctggcacaagaacccttacgcatgggccggtatcggttgtatgctcgtattctttgccctgtttgccgtcagttgggtacaatggcatgagtaccgggaagaaaacaggcggttgagaacggttgctgacaaacaccttgtgactacgttcatgctcaacgaactgcatccgggactggctgtgaccgtcggagcttacgagaaactggtggatgttgtcggtgtggattccacgctggtcatattcaacaggcaggtcaagacagtgagagaggaagaaaaacaatccaaacaacaaaaataaagtgaatggcatccataaaagtgaaatttcgtccttccaccgcaagcggcagggatgcctgcaaaagcaactgaggaccgctctccttgtagtcgaaacgctcgatccaagaatccgcgttttcacggaagaactgctggaaatccaacaacagtttctccatgttgatgctgttgtccggattcatgtaccatgctgattgctggattaacgtctgctgacgggcccacgtcagttcacgggggatgatttccttgtagatggcgttggatacacgcaaaggcttgtcgcgcacaatcagtcccatatccaccacatattggatgtcatcgtcctgcaaatgcgcctccacctccccatcctcgttcgccaatatcggaccgatgacacggcgtacacgctcctcacgcaacttgtcgataaggatgtcgatatgcgtgtcacggcggtagatgatttgttcctgcgcacggtatatcatttcaggaatgatgcggatgctacggtcgcggttctctttcatgcggctcgtcacttcatagcccaaggcgttcaccaaccacggctgaccctccgttgccgtccagatcatcggaaaacatgattcgtcaaactcctggcccgtggcggccgtatgctgaagataaagctcacggatttcctcccgggtgaaattgcctaaacggagggattccgatttgatgttgaacgccgaaccgcccgtgatgatgtcctggttggatagcactatccggtaatcacgaacatcacggacaccgcacaagataatgttctgcgggaaatgggccggacgttcgtcatagcccgcacggatttgacgcaacacccccaccaaggaatctcccaccaaggcatcgatttcatcgatgaataccaataaaggacggtcaagcgattcgcacaaacggcgcaggtaaacggttatgtattccgaaggagatgtactttccacaacctcacgcaccaattccagcggcatatcgttctgaatcaccaaacgcatccgttcagccagacttcctatcacatgacggctcacctcgtccttcagattccgggatgcctgacccgcctcgacattgacgtagacggcatagaactccccacgggcgttcaggtaatcgcgcaaagccaacaggcaggaggtcttaccggtctggcgcggggcatggagcacaaaatatttccgctggtaaatcaacgattccaactcttccaaatcgatacgtgtcaacggatcgatattgtaatgaatatcaggctggatgggaccggccgtattgaaaaatttcggtacgcgtgtcattcttcggcgtttgtgttcgacaatttatgcaaagatacgaatattcatccactttacaaataaagaaccggacaacctagtctccgctattttaagagattttcttatcatttcatactatctctacaggcaaagcagaaaaagaatcagaggtaactgaaacaactaaaacaaaggaatatccggatggcgtgcaaacttgcacatatccggatattccaaacttaaagactgccgattaaaaaagtgtgtcacttcactttctccagcattttttcgtacgactggcagtaatattccatgatgggcattcttttgccgcccactgtcatcgtccggccagaagtatcctttttgcctttcaaggctttgacacgcttttccagcagggcagcgaatttcttgcgttcatcggcattttgccattctttctgcccgtaaaacaaagaagaacaagcataatacaagtggtcttctgtcatgcggctgaagcggctatatacgaccatcgcttctaacaatacccgccactcctgagcaccactcgctccatccaacagaacgatagcacggagtgcttccgcttcgggtacgccgcattctttcataagggtataataggcttccaggccggcggcatcgtagccgacagtcttcttgccttcccgtttcagataacggcttccgaatgcttcccaacgcttgtctaacgcccggacagcttcctcgccatagcgttcggccagttccgccttgcgggcgtacacttgctgaaataccggattgacgggaatggcataatccctgaaaatggcatatatggccgcatccgtaaatacggcatctgtcttgtcctgcaaataatcgttcgcaacagtatacatcgtacccgacatggcagcttcttccagttgtgctaaatacccccggataaactccaccgaacgttcgcctgcggcatagcgtttgtgcatatctgtcagtccgccacccttcacgccattctccgcaaagtctatcaatttgtccacactcagataaccggcatggcggcacaacaattccccttccgcattcaacacgagcagggtcggataagcgttcacgtcatagcgtttccgcaactccacgccctctcctttctccatgtctattttcaccgatacgaaacggggattgaaatattcgcctgccttttcttgggtaaactcttgggcagccattcttttacaggggccgcaccaactggtgtaacaatccataaacaccaatttgttctcgaccttggccgcctccaatgctttagcaaatccgctttcgcggaaatcgatttgcgcggccaaaggcaacacccaaacggccaggcatataaacaaaatcactcttttcattctgtcataaattttatcgtttaatataccggagcgacctttccgattgtcgctccggtacaactgtccatgaaaacatcctctcatcaatacggaatagtaggtgggtctggatacctggtgaaagggctggaattaataccggtaccattatatggaataacataacaaacctttttcacctcgcctgttcccgtaaaggtatgaacaggagtgccggcaggctgaccgcccgcaatcccatacatcgccatagtatatttgtctccgttttggacaccgacgacaatgaaatcaaactcttcgccataaaaaaggttcgacaggtaggtaatgtttccacccggcaattcatcgaacgtcaaggaagtttcactcccctccgtcaccgaataacggtacagccgattatcatcgatgcaataaatgacgttgttttccttgcccctgccggcaatgatttccgctttagcaatatgcagcgcagggtccataagacgtacctcttctatttttacctttttcccataaacagattttattatcaccatgtaacgtccttcgccaggcacatcgaacatataccaaatagtattttctgaatcaatataattccatcccgaagttaccggaatcgctttttcccagtcgattctgaggccggtataatcttcttcataatctattttaaaacaaccggcaaacgctccatattccgtagttgtacgcatcaggcaatgctcattttgactccaatacgatattccgtaaagattataagactgtatcaaaccacttgcccctgcctctgtcggaagcgaaagctgtcccgttgcatattcagaagtccaatcatcataacatctatcagtagctacacctttattggataaataataatttgaaccattaaacgttaccatcgcataaggcacttcgtccgcctccatttcgccgtattgcaggttcgtgcggtcgaacatcaccgacatgtccgttgtgttgaacaaaacgcaaccgttatcaccatgcgccacgaaaaggccggtggcatgcgtagaggttgccgttgccgggtcaaggtgcgttttctgaaatacggtactgaggttacgcggttccccggctaacggagcttccagaaccttggcaagcaaatcattattggtggttttcttcaaatgattgtaaaaatccagttcggtatttccgtccgccgtctctttcaaaacataaaaaccctgcgaaaaatcggaagtcacattcagattgaacgttgccgtcgtaaaataaccactcgctttatgcgtcacttcacaaaccaccgtataggaaccgattttcaattccacgggataagacagttttttcccttcaccaatggaatggctgcgatagccctccgaatttttactgtattgtcctccgtagatgtaccaggcatatgtcagttcatcgtccgcaaatcccgcaacctcggccgtcaactccaacggctgtgcgtatgcaatcatcgaagtgtccttcaatccctgcacattgatttcacccacccgactcgcatccgttgccagcgtcgtgtcgtcctgaaaacaaccgttcagacatatcagggtagacaagcaaaaaaataatatgtatcttttcatattcattccattttaatccgttaatttcagtagtcccatatacttttaggctcaaaacttacctccttgccgttcttttcccgataaacatcctttccctcctccaaacggcgggcattttcctcatccaattttttcgcgaaccaggcatccagatagtctatataagccccatcattgaatacccacatgccccaatcatcgtcgtatgctgcaagcgtcttgaaatacgcatcatcccatgttttccccgtccattgaatcatcagttcgtgttttttagagccataggtacccagataataatccacacccagttcctgccacattttgggttccgccaaataatcggaaatcgtcaacgtataggtggtaaaactcggatagccgggtttaaaccaaccgttgtctccgaaagtaatctttaacgtcacatcgctttccttcaaagaaggatcccgaagcaccaccaccggcacttccgtcacagaggaatcgccgggcatgcgatagagttctgcgagcgaggaatcgtcgaaagccacataatgttttcctgccacggcattgataacgttccggttcgtatcctccatctgcaccaaggctattggccggcagtccggagagagctttccgagggtgtttactttcagccaaacggtatcgcgtgtctgttcctcggcggcattcagcaaaaaggaatagcttccgcgcctgtcactttccgaaacggtggcatcccccgtttttttacctgcaccataattgaatatcaggaaaccttcatcatccgaaaaggtcggcaaatctttttcacaagcggctgccaacaagagcagacccgccgcatacaatatattgaacaatttcataaccatcgatttaagggttaaattccgtattcacacaattccacaatacataatcttcgggcgcaatcttttccccgaacaacgtttccgaagcacccacgcgcttatacgcataaaacatctgtccttcggcgaaaaattcgcgggcatattccggcagcaatacttccaagcggtcggtttgcgatgtaaacctgtcatcgcccgccaccccacaacctttcagcaggtaatcggcgtaccatttattggcttcctgtacatccggcgtggtttcgatacctatcagcactacctcggccatccgcaacatggggacaatttcgtaatacaacgaagcgtccgtaacattatccacgtcatagtaatatttccggatggccgcatacatatctttaaggccgttgacctccacctgtttgttccatccctgcgtatatctcgaatccgagtccttgttttccggaaacagtttttcggtcaaacgtttgacactaatgagcaaattgcttctttccgcactgaaagcgttagccgccaacatggatgtagccgctttgatgtcgtgcttactcagataaaacagacactcgcccggacaggcataacgtctttgtcccctgtccgtatgccccgataattccatcaccggccggttttccttatccttggcatcgattaccgctttggccgccgcatacgcttcgccggtacgccccaaatagaggtatgtccgcgcctgtaacgctttcaccgcccagtaattcagccgagactgtcgatatgccatataagtatcctccaaggctttctcaaaataagcgggagtatttaaaaagctatatgtatattgaaaaatagggtcattgtctttcaacaaatcctctgcccgtttcaggtcagtcaataatttttccgcatatccggaaaaatcgtaacgtgtagcccgttcgtcgaatgccttgacttcggaataagggaggctgactttctctccgtcgccgccgggcacttcgccgaacaaccgcaacacatccagctggcaataggcacggatggcatacgcttcaccgagaatgacagaacgggtcgcttcgtcgggaaacgcgcctccgtccgcttcggcatgggcgatgattttattggtctgcacgatgacgttgaacattttggaatagatgtcctgtatcgtactcctgactccatcgttgtaattatgcgtggtcaaatcataattcgtcccggaattatccatcatctcccacattcctgccagcaattcaatatcggaggtcgtcagtttttggccgtaaacactggtatgccccatcgcggcataacaccccgacaaagcattgcgatatcctttgtaatgggaaaacatgtcatcttctttccgctgatcttcgggctgcacgtccaaccagtcgttgcacgaagcaaacaatatgccgaggaaagtcatgcttatgaatatgaatctatgtctcataataactctattttatcggtttttaaaacaagaatttgatgctcgcctgaatgttgtgggcaaacggataggaagttccccgttcccgtttcactgtagacacgtacagcaaatcggacatgttcaccccgaaagtaagggacgaagcgtgaaggtttttctttatccagtcgttgtcccaacggtattgcacactgacggactgtatttggaacactttgtcgggcatgacgaatcgagaagaagcccttgtcgtattgtcgtcgaatttccggaatgaaactatgtcgcccggtttttgccagcgttcatacaatgcccgtgcatccacattgcggtttttcaccgtattgatactgacttccacccgatcaaccagagtcgagttatattgtttgcctccccagtggaaaccggcagaaagattcaccgtcaagcctttccacatgaacatggtattggcaataccacgatagcgcgcttcggtctgtccgacgtacactttatcagaaggttgccaggtatccgtgcgattgccgttcttgtccaggaatacctcttccccgttgctggggtcgatgcctaaagagcgcacgacataaagcccgttctgcggacggccttcatagaaaagattggccacgtccacattcgactgcaaataggattccgtctgctccttgatagcctccgacaatttggaaacgatgtttttattgtatgccagttgaccggtaaccatccaggtcatatcgcgttcggcgttccgcatcaggtagacactggcggatgcttcccacccggtgtttttcacttcacccacattgtctacgtatgaagagaatcctgtggaatgcggcaaatccatgttggaaagcaggttgctcgttttcttggaatacacgttgaactctcctttgaagcggctttgccataagccgaattccacaccgaagttgaactcgtccgtcgtctgccacgtcaggtaggggttgcccagattctgcaattcggcaatagtccaattcatataataattgtcggtcaatatattatagagtgtactggctcctgtagaaccttgctgcgaaccggtctgcccgtaggaagccttcaaacgcaatacattcatgcaaaacccttccatgaacttttcgttgtgtacattccaaccgatacccgaactccagaacgtaccgtacttctttttgcttccgaaagaagaattgccgtctacccgcagagaaaaatcggcataataacggttgttatagatatagttcaggttggccgccaggcccatgcttcgcatcgtcgattggttgccaccaggcttaccgttttcctgatattgacgggcagaagccaaaaagtggacatcctcatccataaatccctcggcatcaaaactatagctacgattgttccgttccctcaaagagtagtccacacccaaataaatctggtgtttatcggcaaaggtttcggaataggccaggttgatactgccgtcataattgtttccctttccggtggaatacttatactgccctcttctgagaaaaccgtccgtagtcttatattcagcagattggaagaaggtatgttcggcgggcaaaaaataatcggaggtattgtcggtggatgaaatgccgacctgcccgcgaagggtaagccctttcagtacctgccactcaacagagaaattattgctcaaacttgtataacccgatttattaaagctgttcaaggtcgcgtcatacagcggattagcttctcctgtttgccccggactaccggagaaatgctcgaatgtttttactaatttgccgtttgcatcatacggcgaattgtagggctgttgctttacatagtcactgaaagtgccgtatttgctttctgaacttctggaaaggccatacgtcgtactattcctgaatatcaagtttttgacgctatacatcaaggtgatggaaccgttgaaattcgagcggtaagaatctttcatggctccgcgcgtatcgttgtaagcaccggaaatactccagcggaattcccggctaccgccttccaaacgcaggttgtagcgcattccggagcccacccgcaaaggcttgctcaaccaatcgacatccgtccctccgaccacttccctcaatctcctggcataagtgtttttataggtcatatcggaagatggtgaatccatgttatacaatcccaagtcccactccaattgtaacttctcagcggcattcagcatatcataagaggtcaggtcaggaatttcaaggtttacgcccacttctgcattcacccgcattttaccggcttccggctttttggtaaccacgacaatgactccgttggcccctctcgaaccgtaaatggcagtagccgccgcgtctttcagtatgttgatggattcgatttcctcgtcgttatagtccatcagacgctccagaccgatttcaaaaccgtccataataatcagcggcgtatttaccgaattatcggcaagtgcattatattcggaaacactcatcggcagggaggagttaccgcggatattgatttgcggcaaagtattcgggttactgccggagtagttgtcctctgtcaagttgatagacacatctatgtttttcagtgtctgcaagaggttttgtccccggaatagtttcagctgttcattggtaaccgtactcacggatcctgtatagctttccctggcctttttgaagataccggtcaccaccacttcgtccatttccgtagcatcttcctccataaccaccatcaaaggtttcgcgtcattcaccctgatttctttaattttcatcccgacaaacgagaaaatcagcacatgttccctattgtccggcaaagtcagacggaattttccatccgcatcggtaactccccccaattgcgtacctttcaacaaaatcgtcactccgggtaaaggcattccgcccttatccttgaccgtaccggtcacggtaagttcctttcccgcctcttgaggagcaactaatttcggagaaatgacaatgacatcatcctccaaccgataccacaaaccggtatttttcagacattccgccagaatatcgctcaaatcccggtcttccacctgtacgctgacttttcccacatgacggagttcattgctactatacatgaactcatacccggacaagcgggttatttcctggaaaatctcgggcaaagtcttgttctttgcatccaaggtcaagcgggtctgagagtgcgtccgagcagataccgttgacaatcccaaaatcagcaagcaaacacaaattttcatagtcaaatacattttccaaacgatatcaggccacgacccgatatccaaatcccgattttttttcataaatttgttgtgttaaaattaataatggccatttgcacgatggcgttaataattctattccgggaagatgctgcacacatcttcctgttttgttattcagcaaatacctcaatcgcacgcccgtcctgcacaaaacggatatgcgtcgtgagttccagtttgttcaatacctggtccagattcctgtacttcggcagatttccggtaaaacggatttctctgacctccgcatcccggagaataaattccacgtcataccaacgccccaatttacgaatcacctcttccaataaatcgtcattaaatacaaaacgccggtctttccaggccgtataggcttttacatccacattccggatttccgggccttccgaactgtaattcaactgctcccccggctgtagtttccgggaataattccccgcacacacttccacttttccctgcaccaaagtggcctgctgagtttccgaaggataggctttcacattaaaggaagtccccaataccttgatatccaattgtcccgcttttaccacaaagggccgggaaacatttttggccacctcgaaataggcttcccccgtcagcatgacctccctcacctcatcggcaaaagccaccggatatttcagttccgtttcggcattcagccacacctgcgtgccgtcggcaagagtcaattggtattcccctccccgcggaaccgtaattgtattgtaaaccagaagaggaccgacatgctcagcagaataatccaatcgcttcccctgcacacgaatgtcggcggtccgttctttcaattgggtttccagactgtccgacaataccacctgccgcccgtccgacaaagtcaatacggctcccgcctttcccggttttatcacctcggcaaccggcaaatgcccgtcctgctccgttccgctctgctcccgcaacaaaaaagccagcgcaaccccgataaccaacgtccccatggcggcaaccgcagcccagcgtttcccgatacgcaaccggtcgcttttccgtttaccggccacaaaacggcggtatccctccccagcctgaaactgatgatgttctttccgggcctcctccaaaaatccgggccggacaaattcccgatacatccgttcatgctcgtcgctctcggccatccaccgctccaactgttcccgctcttcgtccgtgagcacgccgactatcgacttttgtatcaaaaccgctatctgaaaaggataatctgtcatctctttgctttttgttttttataaaaacacgacctcgggcaaaaagtgtcaaaaaaaatgagaaaatattttataaaagcaactttctttatggaatggcgtcaaaacgaaaagtggggagaaaaaccttaaatccgcaactccattcccgaagtgctacctacataaagaggaatgaacttttgattcgtaagacag

SEQ ID NO: 10799 - DNA, 301 bp, Unknown
  gut microbiota DNA sequence
agcgcaataaccgtaagggctcacgaattccaacttcgggtcaacgttaaaccaacgaccgagcgtgggatcgtaaaagcgagagacaaaatcataaaaccccagcaacttcccgccgagagattgatcctgcaactctttaccgctaaaaaggtaacgattcaggttcaagttcccgtgaccgtgagccaggccgaaagggtaatatccagtcgtttgatccgccaccagcgtgttaccgctcgcgtgacacaaaacccgggtgcttcccagatgatccctcttcgcgtaataataaacg

SEQ ID NO: 10800 - DNA, 1027 bp, Unknown
  gut microbiota DNA sequence
cacccctgcccggaattatacggcgagcatttctgtcatgcgccccgtccctatttcaagcccggagtggattcaccgagggatgtagccgcgcggaacttcgaggcacagatgaaccaagaaatagcggagatacgaagaggattttaactaatatgatacacagatggcaaacggagaactgacatacgatgacttcctgcaacgcttggacatacaggacgtactggtggatgcaggctatcacctgaacaagcgtgacggcctgcgttatccgtcctatatccgcacggacagcaatggcacacgcatccgtggagacaagtttatcgtgaccggaggtggcaaatgttgcttccagcccccacagcaaaagctctacaacatcatctcctttatcaagtcgttccccgaaaagtttgcggaacacagaaacggcgtgtctcccgacaggttggtcaaccttgtctgtaaccgactgttgaaccaccccatcgaaaacagaccaatctgtatcatccaacccaagcagcacagccgcccgttcagtctccaagattacgacatacaccattttgacgtaaacgaccgggagacccacaagcgtttctatccctacttcaagaaccgtggcattgacatcttcacgcaacgtgcttttgccggccattttttcttagccaccaaacacaggacagacggtctgtcatacgccaacctcgccttcccgttggtattgcccaaagaaccagacaaagttgtcggtttagaagaacgtggacgtcccaagatggacggcagcggcagctacaagggcaaagccgagggcagcaacagcagcgaaggcttgtggatagccaatttcagcggagaacctttgcatcaagccggaggtgtcgcctggtttgaaagcggctacgatgcgatggcattccaccaactgcaccgtgacaccttccgtgacaatcccgaactttccaagaaaagcgtgtttgtctccaccggcggcacgcccaccgatatgcag

SEQ ID NO: 10801 - DNA, 1096 bp, Unknown
  gut microbiota DNA sequence
acttgttacgatatacaatgtagcaggtggcttttatgtatccggctacggctgctcgttgattgccgtagcgatgtactgttttaattctaccgcaaagtggtagatgtaacctgctaaaatatagtatgtacgcaattcttccatttatacaaccacttgtgccgtttatagcaccactcaaaggtcaaatctgttttacctactaacaacccattatagttttttgagtattctcctttgagccgaccaccacgccgcgcggattgttttatggtgcaaaggtactgctgtgggagaacgccaagtatcgcttcgtctaacaaatcaccggacttaacgacaactttcctcaatttccggcaggcagaaattgggtatttcattaactccctgtttgtttacttgtcttatctcccttgtaacgcagtctttaacgcacataaaacatatcccggtggcgaagtcggaaggcttccaagcagagggaaacaaaaacaagtctaacaataaaaatttacgattatgccgaattggtgcagcactgcgtatgcgatagagggcaacgcaacagaattgaaaaaactctatgagttaatgaaagatttagaaaaacgacaaaagccgtccgttcaaaatggttttggaactacgtggttagggtgtcttgtagaagccctcggagaaagttgggaaaagatatattgccgtggaacgtgggataacctcaaattcaacggtgaggtgcttacattcaatacagaaacagcgtggtctccctgcaatgaaatgtttgatatggtatgtgagaaatatcccacgctgcgatatttctatcagtcggaagaacctggtatgtgtgagtattggacgaatgatgatgagggcaaatactttcctgacagatactatgttgatgtatgcacttcggaggaagaatactattccgagtattttcaagacttggaaagcgtatatgactggctggaggatatttgcgaagtacaagtcaaatcccgtcaggatgtcaatgcgattgtcaagcaatggaaagaagaaaatgaagacgcatactgctctattcacgaatatcaaa

SEQ ID NO: 10802 - DNA, 4956 bp, Unknown
  gut microbiota DNA sequence
acaagcaccacctctgccgaactagagttggaagtcgtgatcacgggaacctaccagatggaactgacaacaccccgtggcctgcttagcagcgagatcaccgcaggagataacaagaatatagacttaattgtccggaataccggatcggcagaactaaaggacatccagctatctgccaacaaaccggttgactgggaagtaaccttcgaaccgacaaaaatcaatcgcttgaaagcgggtgaaaccgctaacgtgacagccacggtaaaagcatccaaaaaagctcttccgggagattacgtgactaaaatatctaccaaaacaccggaagtaaactcctcggcagatttcagaatcgcggtgagaacacccatgatctggggttggatgggcgtactggtcatccttgtcgccttgggatgcgtgtactacctgttccgtaaatatggaaggaggtagatcatgagcgagcctatcatcgaacttcatgagctgacgaaaaagtacgggaaattcaccgctgttgaccacattaatctctccgtccaaaaaggggaaatattcgggattctcggacctaacggggccggtaaatccacgacaattctgatgatgctcggattgacggacccaacttccggaactgtacaggtctgtgggatcaattcgacccgaaacccgatacaggtacgggaaaaggtgggttacctaccggaagacgtcggattctatgatgacatgacaggtatcgaaaacctgttgtacacggcccgcctgaaccggatcccggaagcgaatgcaagaaccaaggctgaggaattactcgaacgggtagggctaccggttgacacacagaagaaagccgggaaatactcccggggtatgcgccaacgcctcggactggcggatgtgctgatcaaacaaccggaagtgattatccttgacgaaccgacatccggcattgacccggcaggggttcaggaattcatggatttgatccggcaactgagagaggaaaacgggctgaccgtactattctcttcccatcacctggatcaagttcagcaaatctgcgaccgggtaggcctgttcgggggaggtaaactcttggcagaagtcaacgtcaacgagttacaaaacgaggaacacgggctcgaaaatatgtataaccgttatttcggaggaggaaaaagccatgaataaaatacaaagtccgttctgggttattgtccgtaaagaagtggccgaccatgtcagaagctggaaattcattatcctaatagccattatcgcactgacttgcatgggttccctctacacggcattaaccaatatcggggcagccatcaaacccaatgatcccgacggttcattcttgttcttgaaactattcaccgtatccgacggcaccctgccctcgttcgtgatcttcattaactttctcggaccgttattaggcatcgcgctcgggtttgatgccatcaattccgaacaaagcaaaggaacgcttagtcgcatcctgtcccaacccattcaccgggattacctgatcaatgccaaattcgtgggagccttgatcgttatcgggagtatgttactaaccctggcacttctggttatgggattcgggctaatagcgatagggataccgccgaccgcagaagagtttttacgcattatagcctttgtggtggttagtattatttacgtggccttctggctgaacttatccattttcttttcaataaagttcaaacaggccgccacctcggctctggcatgcgtggccgtatggttattcttcagcgtgttttacaacatgattatcaacttggtcggtaaagctatcagcccctcggccatggctagcgcctaccaagtcatcagttatcagaaattcatgctcaacctattgcgttttgccccgagcatgctcttcaacgaggcaaccacgacactactgatgccctcggttcgtagcttgggccccttgaccatggaacaagttcatggggcaatccccagcccgctaccactgggacaaagtttaatggttgtctggccgcaactcacgggactgattgctgccaccgtcatctgtttcgcactctcgtatggttctttcatgagaaaggaaatcagatcccgatgatgcaaagcggaatgtcaaaattgtttttgacattccgctagtttataaacttcaccaactttttcccctcgaatttgtgaattcataaaaaccacattatcttcgcacgactataaaaaacgagtatgattaaaacttttatactggcagttcaaactgcacctacaaacaacgctggaatgaatctatgggatatggtcgtgatgggcggctggttgatgatccccatatttatattgtctgttatcattatctacatcgcttgcgaaagattctggcttattcgcaaaacaggactaacggatgtcccttttatggaaaaaatacaagaaatcttgaaaaccggaaacacacgtgtcgcactcgaagaatgtgaaaaagaaggctccccactggcacacaccatcgccaaaggaatcaaaataagtaacgaagacccgcaagaaattcgccaggccatggaagacacggccaattacgaggtcgccaacttggaacgaggccttccgaccttagccacttgtgccggaaccgctcccatgatcggattcttgggaaccgtggtcgggatggtacaatctttttacgatatgtccatggccggaaacagcatcgacataggtctcctctcccggggtatctacaccgccatgatcaccaccgtggccgggttaatcgtcggaatcatcggacagttagtctacaacttcttggttgcccgtgttgacaaaatcgttttccgcatggaacactactcttctgaacttatcgaatacctccgtaccaaaaaataattttcaattatatcgtcatggcaataaaacgtaaaagcaagatcaacccgaatttcaacatgtcgtccatgaccgacatattctttctattgttgctattcttcatgatttcctcgacgctgatcaatcccaacgctttaaaattattattgcccaaaagcacgaatcaaacttcagacaaacctgttactgtcgtgtctatcgacaaaaactacacgttctacctgaacgaaaaagtaatcccgttctccatgctggagcgtcgactcgtggaagaactacgggaattggaagatccgtgtatctctcttcaagcagataaatctgttcccttagaacaaatcgtgaaggtgatgaacattgccaaagatcacaactaccgccttatcctaagcacggaacccgaatagcctctaaaaattcatactaccggattaacacagaacaggttcacgaaaaaaataatcgtgtagctgaaacctatcgtccaagtcggcgtatacaacctcacaagtgagcaaaacttgacatttatcgcttgcaatgattatctcgttgtagataaatatattagcaacaattgttaaactaaaactaacacagtatgaaacgtttattatttttatcattcatcgggctgtttgcacagtttctggtatcatgctatcccggaggcgctgacaacgtggaggagatggacgttgccataacgaattatgacaaaaatgcggacttcaccaagtacaccacattctcgctccccgacactattgtttatttcgtggcaaaaggagaaactccgaaccacgaattcgatgcccaaattttacaactggtaaaagacaattttacccaactcggatactcgtacatcgaaccgactagcgaggaggatcaacaaccgagtttcattgtcaccgtatcagctttctctaacgtgaactactattatggctcagactactggtataactactggggttggtatccgggatggaactggatatggggcccgacatggggtccgggttggggtccttcatacccgtggtacccggtaacggtatactcttacagaagtggttccatcgtgattgacatgatcgcaaccaaccaagaagccagctcaaccaagaaagttcctgtactctggagtggtatcgccgacggtttgttacaaggatcaaaacaatctattattgacagaatggaaacgacgattgaccagtgtttcatccagtcaccgtacttgaaaaaatagtaggatagatcattaattgtcaattttaaatttaaatgattatgagaaagttattaattatatcgctcatactattcgggctaagcccattagtaaaaggacaaatgctgaacttaaactaccagatgtctgttccacttggaaaaatgaatgactatgccggcaaaatgagtttccggggtatggatcttgaataccatcatttcctaaacgagaaattctctatcgggggtatgatcggttggaatacgttctacaaggacaaaggtaaattaacgggagacttcctgttcaaaggcagtaaagatatacacacgatcaccggttatcaataccgttacatcaacacggtacccatcatggtgatgggacgttactggctaacagatcagaacaccacgttaagaccttacctgggactcggattaggtaccagttggacagaactaaaaaccgatctgggacaattcactgccacaaacgcaagatggcaatttgctttcgcacctgaaataggtaccattatccccgtcaacgaccaatttgcattcaacatcggggctaaatacacctacggaaccaaatctggcaaagtagaagccatgcaaaacttcacgatcagtgtaggtatcgtttttatgggaaattaaacaggttaaaacaactaggtaatcaatagggaggcgtgtcaaaagagatttttggcacgcctttaatttatataactctgacgttactgattcaac

SEQ ID NO: 10803 - DNA, 10792 bp, Unknown
  gut microbiota DNA sequence
aacttgtattggctatcaaaagtgtagtagatttgatatagtcatgtatggtaggctgtatattttggcttgtacatttttgctgatacaagttttatatctgaaataattactatatttgaattgataaaataattgtttaaccagtggtgaatatacaaaataatgtacatttataataatgattaaaattagttgttgatttacagtgagataacaaggactggaaagacttttagaaaataataatcggatttcctagtttttgttttaaatttgctgctgttttatcaaaaaataatgagatggctaagtttttaacttcaagagaagaaaattattcgcaatggtacaatgatctggtcgtaaaagccggattagcagagaattcagctgtaagaggatgtatggtgattaagccttacggttatgccatatgggaaaaaatgcaacaacaattggacaagatgttcaaggaaacggggcatagtaatgcttattttccattgttaatccccaaatctttcttttcaaaagaggctgatcacgtggaggggtttgcgaaagaatgtgcggttgtaactcattatcgattaaaaaatgatccgaatggaggtggggttgttgtggaccctgcagctaaattggaagaggaatatattattcgtccgacttcagaaacgattatttggaatacttataaaaactggattcagtcttatcgtgatcttcctatcctttgtaatcaatgggcgaacgtgatgcgctgggagatgcggacgcgtatgttcctgcgtacggccgaattcttgtggcaagaagggcacactgctcacgcgacgagagaggaggctgttgaggaggctcagaaaatgattcgggtgtatgcagaatttgcagagaaatggatggcaatgccggtgattatggggcataagagtgaaacggaacgttttgccggagcattggatactttgacaatcgaagctatgatgcaggatgggaaagctcttcagtctggaacttctcatttcttgggccagaactttgcgaaagcttttgatgtacaatttgccacgaaagagggaaagcaggaatatgtatgggcaacttcatggggagtttctacccgtttgatgggagcgctgatcatgtcacattccgatgataacggtttggtattacccccgaaattagccccgttgcaagtggcaatagtgcctatttataagagtttggaaggattagaaaaaatccgtaaaacggttagcggtttgatggataaattaaaggctgcgggaatcagcgtgaaatttgatgatcgtgacacacagaaaccgggttggaaatttgccgattacgagttgaaaggagttccggtacgtctggctatgggggaacgtgatcttgaaaacggtacgattgaagtggctcgtcgtgatactttgaccaaggaaacattgccattggaaggtgtggaacaacatatcgagacgttgttggaggaaattcaggaaaatatatacaaactggctttggaacgtcgttctaaattgattacaaaagtggactcttacgaggagttcaagactttgttggacacgaaaggcggattcttcctgtgtcattgggatggaactccggaaacagaagaacttatcaagaacgaaacgaaagcaaccatccgctgtattccattcgatgctcccgaagaggagggtaaatgtatggtaacaggtaaaccttctcataagagggtattgattgcgagagcctactaattttaaattgaatgattttagattttagattgaatgaatcaagccgagagaaaaactagaatctaaattcaacaatttaaaatctaaaatttaaaatctaaaattattttatgctgccagtagttgagcgttttatcaggtatgctaagattcacacggaatcggatcgggagacaggtttagttccgagtactccgggacagttgcagtttgcctatcttctttgcgaggaaatgcagaaaatgggaatgcaggatgtagccgtggatgattacggatatgtcatgggttttgtaccttctaatgctgacagagagtgtccttcgatagggtttattgctcatatggataccagtccggacatgacgggtaaacacgtgaaacctcagattatcgagaattacaggggaaatgacgtgttgttgaacaaggaaaagggattcactttgtcaccggatgattttccggaactgatgaattatgtcggtacggatttgatcgttacggatggtaacacgcttttaggagcagatgacaaagcggggattgctgaaatcctgacggcaatggagtttctggttcaacatccggaaatcaagcatggacgtattgctgtttgttttacgccggatgaagaaatcggggaaggtgttgatcattttgatttgaaaaaattcggggctaaatttgcctacactttggatgggggagaaatcggtgagttagagtatgaaaattttaatgcggctttagctcgtttgacgtttaaagggcgtaatttccatccgggatatgccaaaaataaaatggtcaattcaatcaaggtggctaatgaattcatggctagccttcctaaaaaggatgctccggaatacacttccggttacgaaggattcttccatatctattctatcaaggggactgtagaagagaccttgctagaaatattgattcgtgattttgacaaggaacgttttgaatggagaaaggatgtcattgaaaatggagttcgtgaatattcaaagaagtatgatttaccagtacttttggaaatgaaggatcagtatgcgaatatgaaagaacgtttggaaccggtaagatatatcgtggaaatagcaaaacaggccatgtcagaactggggattaaacctttgattgctcctattcgaggaggtactaatggggcaagattgtcatttatgggattgcctacaccgaatttgtccaatggggcacataacgggcatggacgttacgagtatatacccgtgtcctctatggaaaaaatcgtaaatgtgattgtgaaaatatccgaactatgtgctaaaatataagtgaaaaaagacttcttctaaagcaggttagaaaataacctgctttttttataacaaatctttgttgtttcacgtttatcagtcaaaagatagtataatttaaacctaaataatttaataagagtatgatgaaaagattctttgttattgccctatttgtattgggtttgggacaattgtatgcgcagccggtaagagatacggcgtggacaaaagtcggttacttcgggttaaaattaacacaagtaagtttgagtagttggtctgccggaggtgagtctgctttggcatttgatagccagataacatatagtgccgattttaagcgagatcgtcagttgtggcaaaatcgtttggaactgggatacggtttgacgaaaaatgatggtaagagcgcccggaaaacaaacgataagatatattttgcttccacttatgggtatcagatttataaaacactttactggagtgctttattgaactttaatacgcagtttgcgaaaggatacgattataatattgaggattctgattttatttcaaagttcatggctccgggatacttgatgattggtaccggtgttacttggagtccgaataagatatttacggccacttttaccccggcttcttggaggggaactattgtagctgatagccgtttgtcggatgaaggagcttttggtgtggataagggaaaacatttgttatctgagtttggtgcaaacttgaaggcagaagtgaattatgagtttttgcctaatatgaaggtttattctcgtttggaattgtattctaattatttgaaagatcctcagaacattgatattcgctgggaggttcaattaaatatggccattaataaatggttttcgacgactttatcaacaaacttgttatatgataatgatgtaaagatcgcccaagaagacggaacggcagggccgagagtgcagtttaaggaagtgttgggggtaggacttcagatcaatttttaagaattgattttgatataaaaaagagttcagaattttctgaactcttttttattgttgataaataaggttattttgtaactctttcaagccatttcaccataccaagcataactcccatagatacaagacatacgatcaagaatactgaccagcattgccaaatcggccatgcgttgtacatgagcgggccaatccaaagtagaaggttaccaagagcggtagcagcaagccacaggccttgacacaaaccaagcatgctctttggagcaacttttgatacgaatgacaatcctagaggagagataaatagctctgcaacagttaagaagaagtaagtaacgataagaacccaccaatgagcttttgctgccatttgttctgcgataggaagacctttgaaagtgtctgcagaaggatagcctttcatcattgagaacactgcaaggaacaagaaagccaaacctgcaatgaacataccgattgcgatctttcttggggttgagatttctctaccacgtcttgcaaggaatccaaagatagccatgatcattggggtaagaacgatgacaaaaaatgggttgatagcttgccatacttcaggggcaactgcggaagaatcaacgaaatcgcgggcaaagaatgaaagagacattccattctggtggaacgagaaccagaagaaaatcactatacctaatactgcaaacaaggcatacattctttgtttaatttctttagccatagcagctttttcttctgccgtgtaggttacactctgcgcagcagctttctttgctggattcgggaatgttttttgtgaaacaaagaaaattacaagagaaataagcatggctgcaacagaggcaatgaatgagtagtgaattccttcattgaaaatttgcagatattggagacaagaagcagtcatatcggtaatagctccaccagcagccgtcataagttgctgtaagttggcaagtgcttcgggagccatgtttgcagcattattaacgtactcgtgacaaagggctggaagttgtgcgttgtaagataatccgtttacacccaaccaccattggcgtaaaaccggagcaatgaacggagcaattagaccgcccacgttgatgaatacgtagaaaatctggaaacctgaatctctcttgtcttttgcgattttgagagcctctggcccctgttttgctgcctctgcttcaaaattatcatacatttgacccacgatggcctgtaagttacctttgaacaaaccgttaccaaatgcaataagaaacaaggcaacacaagtaagagtcaataaccaagttgtattttgcgatgtcgcaaggattggaacagataggataatgtatcctattgccataactacaagaccagtcttaatggttcctttgtagttttgcgtgcggtctgcaataagacctccgacaaggcttaaaatgtaaataccagcataaaagaaggaataaatggtaccactggcggcttcgctcaaaccaaatttagaacataggaataacactaacacggcattcatgatgtaatagccgaaacgttctcccatattacttagagccgcagtaagcaaccctttaggatgatttttgaacataacttttgtttttaatttgtattggtaaataattaaattttttcattcacgctaatagtctgcaaatataaattatttttttatctttagtcattgaaaacgtttgaaacctatcgctatgttgaagaataataaaattttcaagacttcggatttacaaaaattggataaatatacgattgagaatgagccggtaacatcgttggatttgatggagagggcagctactgtttttacagaaaaattattgatttttttccccaataaccatatttttaacattctggctggtttcggaaataacgggggtgacgggtatgtcgtggcaagattactgttaaaaaaaggattgaatgtcaaggtattcggtttgcatggaaacagtgtcctatctccggattgtgctgtgaacaggaaacgattcattgatatgggaggatgttatattgaggtgaaaaatccagataatttgcagccggatgaaaatagcgtgctcgtggatgccattttcggggccgggttaaaccgtccagtaacgggatttttgggaaatgtaattcatcggataaattgtttgtcccatccggttgtggcaatagatattccatccggtttgatgggagaggataacggggaaaataacggggcgatcgtaaaagctgattatacgtttacttttcaatttcccaagttagcctttatgtttccggaaaatgtagtttacgtggggcattgggacgtgttagatatccgtttgcatccggctatattgcgggagtatcctgctgcttattattatctgacagaagaagtggttgcatcccggttattgatacctgaaaagttttctcataaaggaactttgggtaataccttattaatagcgggttcttatcccatgatgggggctgccgtgttggcggccaaaggggccattcgatccgggacgggactactttccatgcatgttccctgtaagttgaaagaagtgattcatctttccgtgccggaagcattggttgaagtggatcggaatgaattttgtttttccggtgtagacaatctttcccgtttccaagcggttgggattggtccggggatcgggacttcacctgtcacggcagaaggaattcgtcaactgttatccgtatggcaaggaaaagttgtgttggatgcggatgctttgaatttgttggcgtcaaattccggattgttagagctgcttcccaaaggagcggtactaactccccatccgaaagaatttgaaagattagcaggaaaaagtgtaaatgattttgatagattaaataaattaagcacctttgcacgtctacaccaagtgtacgtcgtactaaaaggtgcacatacgataatcgccactccagagggggaatgttattttaacatgacaggtaatccgggaatggccaagggtggggcaggagacgtgttgacgggtattattgcggctttactggcaagtggtcattctccgttggatgcggctgtaatcggggtatatgctcatggtctggctggtgatttggtcgtggaagaacagggaatgagaggagtgcgtgccggggatattgccgataaattaggtttggtgtggaaaaagatggaaacatataatatggctaaacagcgatagaaagatgaaaaagttattttttataatcgggttagtgggattaatatccctgtctgttgcgggacagaaaaagagagagttgaccacgcaggtgtcagttgattatactttaccaaagatcagttatgacgtggttgtcacgatggaatgttgtcgtttgattccgggacctttccggcaatatgccgaacaacagttaggcgtctctcctgagatcacgagtgaaggcgaagagtgggcgatcaaaaacatcaaatttattccgagggccttgcctgatccgaaggcttcttataccgtgaatgctgttggggaatataactctattttattaaatgtgactcctgaaggttttttagccggagtgggaagtggtaacacgaaccggactgatgaggaggagattgtttacgaggaaaaggagaaaagcgttggtacaggtatcaattacgtgtattttggtattcgctccacccaaaaagaagtacttgattccaatttcacggagatggaagtagagggcgagattcgtcgggtatgggacccgatagaacgtcatgtgttaaaagaaaataaagattacgtggacgagatcacgtcagagatattcaatattcgtaaaaagagactggaattactagccggaggttcggccacggctgaggctttaaaagctctagatgagcttgaagcgaattacatgagtttgttcatgggaaaaagggaaaaacgtgaagtggttaaaaccatctcttttgttccggaaaaagctgacgagtcaattgttttattccgtttttccgcgaatgatgggattacggcaaaaaataatgtatctgctattccttatatcgttgagttgaaaaatatttacattccgaagagggatgcccaacaaggtgggaattcccgtccggttccgtcactctcttatcgagaaccggctgttgctgatttgtgcttgttgagagggaaagagaacgtgatgactgttcgttgtgtcataccacaactcggattcatcaagcaattccctttggatgtcatcaataatgaaggcatttctattgatttctacccgcaatatggttcgataaaaggtataatgaaaaaatagtttgatatacttttggatcatggcggcgattaacgaaaaagggttattgggaaagtttttggtgtggcgtgtccgctacatcaaggaaaagcaatttattgtcatgttgagcatcctggttggtattgttaccgggttggcgggagttgtgctgaaaaatatggtacattttactcatatgtttttcacggagcggatgcaggtggatagtggtaacttgcttttctttatatacccttttattggaatattgctaacgacattatttgtgaaattttttgtgaaagagggaatcagccatggtgtgacaaaggtattgtatgctatttcccgccgtaatagtatgatcaagccgcacaacaactatacctcgatgattgccagtaccctgaccatcggtttcggaggatcggtcgggacggaggctaccatcgtgttgaccggggcatccatcggttcgaatctggcacgtttgtttcggatgaactacaaggtgatgaccttgatgatcggttgtggagcggcaggtgccattgccgggatctttaaagccccgattgccggaattgtattcacgatggaagtgttgatgcttgatctgacgatggcctcattggtaccgttgatgttcacggctattacctcgtatgtggttacattcttcctcatgggggatggtttcgtgttttcttatcagatcacggataaattcgtgatggccaatttcccttactacgttatactgggaatctttgccggggtgttgtccgtgtattttgttcggatgaatctccgggtagaacaatttctagggcgtatcaagcaaacatggaaaagaatagctatcggtggagctttattaggtgtcattattttcgtgtttccccctctatacggtgaaggttacacggctttggatgacatgatggctggacattccgataaattattgaataatacttatttcttcggttttcggggtagtgcctggatgatgatccttttcgtggttgggttgatattcgtaaaagtgattgccactgccttaaccaatggtagtgggggtgttggtggtgtttttgcaccgagtttgttcactggtggtgttgccgggtatttgttggcgatgttgattaatatgagtggaatccgtatcgtggaacccagtcatttcgtcttggcgggaatggcgggaacaatgtccggggtaatgaaagccccgttaacagccatgttcttgattgccgagatttcgggaggttatgccttattcttacctttgatgctgacctcggttatttcttacctgaccagccaagggatggaaccttattctatttatgcccgtcgtttggccatgcagggagacttgttgactcacaataaggataaagctgtgttgactttgatgaaattggacaaggtggtggaaacggatttcaagacgatcgaagtggatgcgacattaggtgatctggtaaaggtagtttcgaaatcaagccggaatctattccctgtattgaattccaaccagcaattactggggatcgtcttgctggatgatattcgtaaagtgatgtttaatcaggaattgtattcgaaaacctacgtgcgggattttatgacaacgccttccgtggtgattgacattaatgactcgatggaggtagtcatgaagaaatttgaggattcgaaagcgtggaatctacccgtccttcaagatcataaatatattggttttgtttctaaagcgaagatattcaacacgtatcgaaaagtgttgattcacttctccgatgatgaatagtttttagtgtaacaatttggatcgttttgcgttatttatctcgatacattagatttaatgtgtctaaataacttcttattagaaaaaagaagttgtattattagaaataaactatatattcgcggcaaaaataagaaattacattaaaaacgatataactatgtattggacactagaacttgcctcaaaattggaagatgcgccttggccagcatcaaaagatgagttgatagactacgccattcgttccggggcacctatggaagtgatcgaaaatcttcaggatatcgaggatgatgaggaaatatttgaaagtattgaagatatttggccagactatccgagtaaagatgactttttcttcaacgaggacgagtattaatttattcaggtggatgaaaaatataactaaccactccgtaaggggtggttagttgttttatatagtaacgtgaagtcttccccgttatttgg

SEQ ID NO: 10804 - DNA, 22769 bp, Unknown
  gut microbiota DNA sequence
atttttcatcatatatggggattgtcatttttatttataaatttgatatttgtatctggaaattgttaaaatcaatagaggcgtttagaggttttgaacagatccaattttgatgatgggtgtgatacaataataaaaggttatgatggagtccatgaaaatattagtgaggcaggtgtcgaatggagacagggaggcgtatgcgactttatttcatgaattttacacccctctattactttattccataaaattcacgaagaatagggatgcctcggaagatattgtacaggattttttctgtcgtttgtgggaggaccgtaaaaggttgataaatgacaaatcctttcatgcttatatttatagttctgtgcgcaatcgttcgttaaattatttaagggatacccattctgtttctatcgagggttttgaaaaacagtctgacgaggattttttgcgggaaatgatggaagaagaggtgtatagagagttgtatgctgccatccaaaaactgcctgaacgttgtcgccagatttttttgttgaaactggacggggaagaaaatcaaaaaattgctgatatgcttcaaatatcggaagaaaccgtcaggagccagttgagaaggggcaaagagttactacaaaataatgttatcagcttctatattttgggattaatatgttattggtgtgatttttgaattcatcttttttgttgaaggttcataaaaagataaacgtcggaactattttgatgaagtttacaagttgtgtttatcgtgttatcaagttattattaaatatttattatcgtgttaatacttgctatgtaagtataatatattgttataatgataggagcggaataggggaggaatgggagcggaatgggagcgggttgcatgatgataagaatttggtcataattttataacattttgttacatttgatatcttgtaattatagaatttgtgggaataatgtgcttttgagtagattatgtatatatcattttgtaaatcagtgtattgctggtcgtgataaataataaagattattttttcaaaaaaatagggaaatgatttgcacgtttccttgttttgcgtgtatgtatagtaaatatgatgtggtatgaatgtggataacgagaaaatcaagagtataattgtaaagtcagttttgggaactttgacggaagaggagaactttgtattggagggatggcttcaggaaaatgaccggaacaaagttctctatcaaaagttatcttctgctgtcgaattgaaatataaatacgagcaatacgagggggtggacgtggcggaggctttccggagaaatcaacgtcgtttgcgtcaagatgttccgaacaggatgatgaaaaagcttctgccatatgcggcaaccgtgttacttttgttcagtggagctttttgttttttaatgaatcgttcaggggaagttcgggaggaggttccggttgccctgtcagcgggtggaaaatatgcggaattgattttggcaaacgggcagaaggtggatttgcatgaagggatggagattaaacttcgggaaaggaattccaatattcaagtaaaagggaatgtggtttattaccacaagaaaaaagatagcgtgatggttgaggaatacaatatgattcgtaccccgttagggggagagttttccctaacgctggcggacggtacgaaagtttggttgaatgcgatgtctgaattacgttatccggtggcattcgggggagatactcgggaagtcgagttgaaaggggaagcttattttgaagtgaagaagaatgaagctaaaccgtttatcgtgaagacggatgagttcaacgttagggtgctgggaacctcttttaatatttcagcttattctgatttcccgttggctcataccacactttgtagcggacacgtgcggttaagtgaccggatgaacccgggaaaagaggtagatattttgccgggagaacagttgttattccatagggatagccgggagatgaatgttcaggaggtcgatgtggacgtgtttgtttcttggcgggatggatcttttcagtttgataataataccgtggaggaagttttcacgatcctgcaaagatggtataatattcaggttttttatgctaatgtggaggtccggcaggagcttttcaccggtaaattgcctcgttttgacaatcttcaaattatcattgatttgattgaacgggtttccgatttgaaaattgaggtaaggggaaaaatgatttatatagataaataaaaaagatcggcagaacagctaaccacaaccttctgccaatctcatatgatgtttaacaaagtaaactctacaaatttatgaaaaaaaaatcaaaatgtagggagttggtcattcctttaaaagggaataggacattccttgccatgaagtatttgattatcttgcttgtggcatttaatttaaacggattctcggtggtgaaagcccagcaaattgcggagtacgaggtggaaaatgcaaatctgaaagcgtgcataaaaaaggtggagcaattaacggggaaagggttcctttataatggtaacgagttggaacgagtggggcgtgtaactttacacttgaaggatgtgggattggatgatttattgacgagaatattgcagggaagcgggtatacttacgaattggtgaacggggttattgctatagtgagaatgaaggatgtgccccagagagaggtggaacaggaacgtttgaagggacgggtgctggatgcttatggtaatgctcttccgggtgtgacggtattgattaaaggtacgaacatgggtgtcgtgacagatacagccgggcgtttcacgtttgctgttccgaaggagagggaaatcgtgctggcattttcgtttgtcggaatggaaaaacaggagattaaaatcgttgattttcagcgggaaataaacgtggtaatgcgagagaaagcgggggaattggaagaggtggttatcacgggatatggcgagaccacgaagcgtaaggctgccggatcagtggctgttttgacgaaagatgctttcgaaaataagattcctacctcggtagatgatattttgcagggattagtagccggggttgccgttaaagctacctccgggcgtccgggcgagtcgtcgaagattaggattcgcggtataaacacgatacagggagatgccgagcctttgtgggttattgacggggtacccttgcaggatgaccttccggaaattgataccgatcagattaaatccggtaatttgaaccagattttcgtgaacggggtagcgggaattaacccgagcgatatcgagaacgtgacgatattgaaggatgcggctgcagcagcgatttatggttcacgagctgcaggcggtgtgatcgtggtcacgacgaaacaaggacgtcccgggaagatgagggtgaattattcgatgagtttgacgatgggattaaaaccgcaacgggatgctaatttgatgaattcgcgagagaagttagcttgggaacaagagttatgggatgagttttccgcggatgcttttgctgccagtgcccctcacgtggcggttgtcgggataacgggaatggtccgggcaaataaactgggacgcgacggtaaactttggacggatgaaggattcgaagcgatgagtgcggcagaacaggaagcctatttaaatgatttggcatcccattccacggattggtttgacgagttgttccggaattctttcgagatgaatcatcacttgtctctttccggtggtgaccaaaaatacacgtattatttttctatgggatacgcttcccaagagggtttggtgcgtaaaaccgattatgaccgctacaatctgaatttgaagttacacatgatgccttccccaaagattacgattgatgcgactgttaaggtgtcccgtttggtttcgggttcttattccggtagtgttgatccgttttcttacgcttattttgctaacccttacgagcgtccctataacgaggatgggagttaccgggcagatatgacttaccagaatctgtcggcaataaatgatggtaacttcagtacggatttgctcccgtctaatgggtttaatgttttgcgggagattgatgaaacgttaggtaagaatgacaaaatgacaacttccggttctttgaatttgaggtataacattactagtaagttggctgtatcgggattggtttcttattcctacgatcataataaatcagaggacgtaattggtaaagatacttacgcagctttcacggaccggctctattttgaccggacgaatgaaaactggacaccttacggttctatcacgcaaaccgcctcttccggtgatagttatgatgctcgggctcaggtgtcttacatggatacattctgggataagcatacaatttcgttattagggggagcggagttacgagggaataagtccaagcgtttttacacgaaacgttacgggtacgatccggataccggtaatttttccacgcctgtgaatccggatccggatggatcggatgcgtcttcttatgccaatttaatggatgatttatccgggcagtcgattaaggaaaacacgtatgcttctttttatgcctctttggattacacgtttttagatcggtacattttgaatgcggcattccgcacggacggttcgaataatttcggtagtaaggagcagtttaacccgacgtggtcattgggggtggcatggcatctggatcaggagaattttatggcagcattgcaaccttatatcagtcggttaactttgcgagtggccggtggatacacgggaaatgtcgttcagggtgtgtataaacagttggtgattaaatacggttcttcctactggaacggggaaaaaaccgggagtattgataaggccccgaatccacggttgcgctgggagaaaacaagggatatgaaagtggctcttgattttgggttgtttggtgaccgggtgagtgggttggttgaaggatattaccgaaagagttttgatattatttctaattcggctctttcaagtacaaccggattcaaatcgattgtttataacgcatctgatattgtgaataaaggtattgaaggtacgttgcgggtggcggcgttgaaaactcgtgattttggtattgacgtgggggcgaatgtcgcttggaattacaataaattagctcgtttccgtacttctaacggtgcaacgttggtggacggtaggtttgaaggttatccgcaggatggaatttacgggggaaagttgcttggcatcgatccttggacgggactttatctttacaagttgagaccggatgccgatattaaggagacttccgatttgaacgaggtgaagaattatcgttattatatcgggacgcagaatgccccggtgacgggtggttttaacgtgcaattcatgtacaagaatttgaggctgaacgtgggggcttcttacgcttgcggggggaagactagtagtctgatggattctccggcaagttatgataaggtggcttggtatggaaacgaaacgcctcaatccgcttacagtgatttgtatcgtaatcacttgaacgtgaacaaaaacgtgacgaatcggtggacgcaagagcgtacgacgggagtgaaatacccgcgaatagtggattatttaggagagtctttgtcgctggggacttataatgcaatgtatgcttctattgtgaatggtgctttttatgagagtaattcttatttgagaatccgtgatattacgctttcatataatttgccgaaatcaatgctgcaaaggatgggattatcttctttgatgatgtatttcacgatgaataatttcttcacgtttaccggctattcgggaattgatccggagactccgggagcgacttatccggttacccgttcgatgtctttcggtttgagtgtcggtttttagttttgaaattattaaaaacaatgtctatgaaagttttgaagttatatatgatgatgttgattgtaggaatgtgttgttcctgtgatgaatatctggaggtaaaaaattacgggcaggttttgcctgaaacggacgaggattatgccacgctgatcaataatcaattgtccgcaatagataaagggactgccggggctgcgaatatgctggggtctttcgcttggatgatcgagttggaatgttattctgataatctgaataccagtttgatgacaagtaacactttatcatatatttatgtcggtacgaatgttaattcggcccagtatagatttatgaattattatagccttattaaggattataatattattatagataatctgaaagagcgagacacagagttagggaagaagattctggcaaccgcctacgcgatgagaggggtgatgtattttaacctgatgcgtgagtgttgcgaggcgtacgagaaggatagggccacggaaattatgggtgtccctaacgtggaacattttgatatagaggctaaaccggggagagggaatattcaagagttggtgaattttattgttcgggatttggaaacggccattcagatgaatcaaacggatgaacagtatcgtttcacggcggatgttgctcgtgcttatcttgcccggacctatttctgggctcaggactggaagaatgcgataaaaatggcaaaggaagttttagataaatatcctcttgtcgatggggatgaatacaaagagatgatccagtccccacaagggaagctagggaatatgctatttcgcacgtttatcacgggatcgctaacggcctacaaccggaatttgaagaatgtcaagactcgcccggtgaatatgtctctgattaatctgttcccggaaaaagaacgggatattcgttacacgacgttttttgattctaaatattttagcacgaaaggtattcgggtttgcgttcgtgcggctgagatgtgtttgattctcgcggagagttacgctcatttgtcggatactgacaatgctctgacctatttgaatttattgcgttccaagcggattgctgattatgttccttatacggtagccacgttaccggccgtggacgagagtgacgtgattaagacggatgctacgggggccaagttaacccctttgatgtcagctgtcttgaatgaacggagaaaggagatgtttatggagggggatcgttggtttgagttgaaacgaaacggttctccggaattttgggtcggttataatttcgtgaagtacacgaccgagaagtatctctacacgttccctctccgaaaagccgatctgatcgctaacgagaatttggtgcagaatcccggatatgaaaatctttaaaaaatgaaagctatgaaaaagatatatttttattgtgtgatgttatgtatgtttttttgctggggatgtgaaaaaccgaatgaattgccaccccgagaggaggcgtttaatgatatggactttacccttccggcattacctcggttgacggatgcggaaagagatattatcgctgcccaaaaacaagtgtacgaagaagctatcggtgtgcgggctgtttccagtagtaaccagtaaatgagatgactatgcagaatatattaagattgatcgttttgttttcggcgattgtgtgtttcacggcttgttctgaggatgacgatcatgcccggacggtttctttcaaaagggctgtttatatactatcttctaatcaagcgatagaggttgaaatcgggttatccgaggtggcagaacaagagttgaccgttccttttgaagttttcggtacggcggttgaaggggaagagtattcattatcggctcacgagttcgtggtggctcaaggggaaaattcggcaaaggtggtgattactcccgtggataacgtgtattcagacaggcagattcgcttggaactggcggatgtgccggggtatgcttttggcaactatagggttgttttgattcctgtcgaaacgaaagaggtgattacaacttcctttgcagcagatgcgtgtatcttgaagagttcattgacagtttccatgaatctgtttatcgggggtaaaagttacacgcaaccctcttatccggttacagttccgtttgagatagatccttcttcgacggccgtgttgggcactcattttgagattgagggtggggacttggaattggtgatgccgacgaagggttcgtccgcacaggtaaagattaagtgtttgaaaaaagaggtgggtaaggataaaatcgtgctgcgtatgtccgacagtgatttgcattacttggcaggagagaggaaccggacgacaatcacgattgatggccccacgactttcaaggatttggagggaacgtggcggatgaatggatttacaagtcttactcacgtgaagaattccgtgtttgatgaagataaatccgatttggaacgtttaccggagaataacccgcaaacggataaactggtgttcacgtcgggaactacgaatcgaatgaatgttagcttgctcacgggtgatttggctcattatttaagaaattgtgacttgacgtccgtgaaagaggaagaggagtacttgtatgaaatgggggataacccacctttcgaatccgtgctgacgatggagatgagtgaagctaacgtgaattattcgggcacgaatgtaagtttacgtaaagctcaagttgggttccgggtgctggatggtggaaatacgctggaattgcgtatttttgattacgaaccgacagattttttacagagaacgtataatgatagaaaagtttcttccgcttttggtaaggaaccgatgaagcaggattttacgctggtgtttaagttcgtgagggaaaattagagagatgtttaggtgttgtaaaaaagcaggttacaagtttgaatttcgtcaacttgtagcctgtcttgccggaggcttggcgttcggtttgttatagtatgaaatcacaaattgtttatttatgggagaatcgattgttaaagtagagaagttgtctcatcgttacagcgtgcaatgggctgttcgggatattaattttgagatcacgaaaaatggaatatatggtttgctaggctctaatggagccggcaagtctacgattatgaatattatgtgcggggtgttgaaacagacggaagggaaggtgtatattcaaggggttgatctggcagaaaatccggttgacgctaaacggcatattggttttttaccgcagaaaccacctttgaatatggatttgacggttgaggagtatttgaactttacggcgaatttgcgctggattccggcagcagaggtttctcgtgcggtcaaggccgtgatggggcggtgtgatattacacatttccgtaaacggttaattcggaatttatccggtgggtatcaacagcgaatcgggattgcgcaggctattatccataacccgaagtttgtggttctggatgaaccgacaaacggactggacccaaaccagattgtggagatccggcatttgattcaggaaattgccgaggagcggaccgtgattctttccactcatattctgtcggaggtacaagccacgtgtgactatatccgaatgattgaacagggtaagttggtgtttgccggaacggtgaacgaattcgataattatattgttccgaatacgttgtttgtttctttggctgcggctcctccggtgggagaattggcggcgatcccgggggtgtcgagagtggaagaattaggtggttctgattaccgggtacatttcacggataaacgggatgtcacgaatcgtatcgtgcaagccagtgtggcccgggattgggagctgacggaaattcgtctggaaaagagttcgttagatactatttttgccgaattgtcaaaaaagtagaatgtgatacacgctaaaaaatattgagatgaagacattgagtatgatctataaaatttctaaaacagagttacagactttgttttattccccgatcgcttggctgattatcgtgatttttacgtttcagacgagtatgggatttagtggggtgatgggcgatttagtgaaaagtcaggaattgggctacggattgcaaagtgtgactaaaaatatttttgctggatggatgggacttttttccacggttcaacaatatctttatttatatattcccttgctgacgatgggattgatgagccgggagtttagtagcggggaggtcaaattgttatattcatcgccggtgacgaacacgcatatcgtgttaggaaagtttttggcgatgatggtttttgcattggtgctagttgggattcttctcgtttatgttattttcgggatgtgtacagtggaatcatttgatttgtcgttaacgctttcggggttgttaggaatctatttattgatttgtgcctatgcagcaattggtttgttcatgtcttgccttacttcctaccagatggtggctgcgatgggtacgttggctgttttgtccgttttgaattttatcggttcggttggtcaggatatggcgttcgtgcgggacgtgacttattggttatctatttccgggagggcggaagagtttattaacgggttgatatgtagcgaggacgtgctttattttatcgtggtggtagtgttatttctcgcatggagtattatcaagttgcaagctgatcgacagaaaaaggcgttgagtgctaccgtgggaaagtatgttggtatatttgggattgtcgtgttgatcgggtatttttcttctcgtccggtttttaaagttttttatgatgcaacccgcacgaaagtaaatacattgactcctaatagtcaggaaattgtaaaacaactaaagggtgggttgacgattacgacttacacgaatttattggatgaaaattactggattgctttgccgagtgcaatcaatacggatttggaacgtttcgagaaataccttcgatttaagccagaaatcaagatgaaatacgtttattattacgacaaggtgaagaatgaggatttggataagcgctatccggatatgaatgacgaagaacgggcgagagaattggctaaaggcttagagatggatttcaagatgtttctttcccctgaacagattcgacaaaaaatagatctttcttcagaaggtaatcattttgtacgtttgatagaacgggaaagtggggaaaaaacttttttgagggtgttcgatgataacaagcgtttgccttccgaggcggagatttctatcgcattgaaaggattggtgactacaaatatgccgaaagtggggttcctgatcggacatggggagagggatagtaagcaggatggagatcggaattataatcgtattgcccaagataagccgtttcgctattcgttaattaatcagggattcgcttttgaggatgtcacgttggaaaagaagattcctgctgacatttctattttggtggttgctgaattgcgaagccctatcacggatgagcagatgaagaatctggatgaatacgtggctcgtggaggaaatttattgattgcaggagaaccgaatcgacaggaatatatgaatccgttggtggaacgttttggggtttctttcatgcccggttgtctggtggaacgaaatgagaatttcttgccaaattttataaaagcacgtcctactccggaaatttgtgaattagcttacgtgtttgaagggttattggagaagaatcgttgtgtcacgatgccggggtgtacgggattggcatactcggagggtaaaggattccaagtgattcccatgttggtaagtgatacgattggaagttggaatgaattggaaacgacgaattttgttgatgattcggtgagcttgaatcctgttattggtgaggtcgaaaaatcttatcccacagctttggtcttattgcgtacgattggaagtaaagagcagaaaatcgtgattctgggtgatgcggattgtatcagtaacggggaagtcagcatttatagaaagacggtgaaagcgtctaattttgccgtgattgcaggggtgttctactggttatcggatggggaagccccgattgatattcgtcgtccggttccgcctgatgatacagtttatttgagccaacgggccatgaatggagttcgaattgcttttatgtggggatatccggggatgttgttgttgatagctgtttttatctggttgagaaggagggggagataaatgtatataagaaatggtaacttcgtagaggctaccatttcttatttttattgttgcacaagaaaatgctacttctcttctttcttttgaatatagtattttaacgtgtcactggtgacttgatactcgatgatggaatctttttcgacaatcttgaatcgtgcctcgccttttagttccacggttttaaagctggacgtgtctttcgcgtggatgatcgtgtaagaatcgcttgttgacttttctgattctaaatagattgtggtgccgtctgccagtttataagaggttacttttttgtccggactcccggaagtgtaagtaattgaaacaacaccatctttccctttttctccatactgggtgatagcatatttatctcttagaatcgtgatcgtttcaattttattaggatctagcattttcacggaatcaacagaaacttctttgccattgacaataaatagaacgggaatctctggtattgtactagtgcatgaatcttggaaggttatttgacctattgtgagagggaatgaagtagcttttactttttcccttgtcaaagaaaaatgttgtgtttttctttgaacagaatcctccgtctggatggatctaaaggtagattctgtgattgctattttttgagccgtatcaacggccgtaagggaattatttactccttttgcatcgagaattgaagtaatatcattaactttgatagttgaaatctcgtttagttcgttcgagatttcggggtgggcgaaagcggttaacgtgattgccgcaacgggaagtacgtagaggtacttcatccgggcccaaggactggatttttcttttaacatcatagttattcgttttttaagtttactgtgattaaagctgttggccatagagtagagccttgtgccgacagctttttttattaataataattgatactgttttgcgttgacgccttgacggataaccgtttcatcagcctcgtattcatgaatattctgtaattcctgtttcaagagccaagatgtggggttgaaccactggaaaatgatacaaatatcgctgatcagcagatcaatggaatggcgattgtgtacgtgtgccatttcgtggatgagaatttccttgccattttcctgcaaatctttctcggaaatgaccacgtatttcatccaactgaaaggagcgatattcttgtcatggatgatgagggtaatacctttttctaacttttcctgccttccgccatgcaatagctggagcatatgagacagtgaataaagattacgtccgaggaagaaaagaattcccagtaaatagatacacagcaggacgggaagccacaacgggatggatgaagggaggacttctacttctgtttgtggaacgtggtctgctagggtgagaatttgttcaatggttagtaacgtttgttgtacttccgattcttcggggacggttatttcacagaacgggataagctgggataatagtagaatacccagtaatgctacccggttgaaacgatggaaggtctctttgctgagtaataatctgtaaaacaagtaaaatcccgttaaacagatggatgtttttaatatatagacaaagaaagtacccataaattgtttatttatcgtgtgctttttctacctcggaaatgagttgtttcaattcttccaatgaaatgtcctcctcctgcacgagtgaagatacagcactgaggtacgagttgttgaaatatttgctgatcacgttcttcaaggtgcctttgcggaattcttcttcgctgatgatcgcgtaatattgataggtgttcccgtaaacttcgtgagcgagataacctttttcttccagtccacgcacgatggtggataacgtgttgaaatgcggtttcgggtcttcgtaaaatgcaagcatctgtttcacgaatagagggcctttttcccagaaaaagcccatgatttcttcttctttgctagttaatcctttcatggtttatttcttttgtaacaaagaactaaaatatttagttgtaaaactaatttttatagttaataaactttaaattctagttttgattcattattcttttatttttagatatttaatctcgtattttacccggatcggtagaatgtatatttaattttaatgaagggtaggaagtcctgtaaaaatgtttatatttgtgtagtagtgtgcttgtggggaagttagtgaatatcgtctaattaaaattgaatgtaatggaagaatggtggagttctctggggttatttatgcaatcggtgtggtgcatcacgctatttgccagtttggtatttgttatccagacaatcatgacttttattgggatggatacggatgggggaatggatgttgacgtgagtgcggatactgcgattgacggagatagcggtcctttccagttgtttactttccgtaatttcatcaatttcctactggggttcggttggtcgatcatctcttttgaaaaagcgatagaaaaccagttcgtgttgattctcgtgtcggccgtgatcggcgtgttgctggtgatggccgtgatggctattttcagattcatgagccgtatggaacaaagtgggacgatcaatatggcaaatgccgtggggtgtagagggaacgtgtacctgaagattccgggagaaaaacggggagaagggaaagtacaaatctcgatacagggagccattcgggaatttgatgccctgacgacaggtgaggaattggagacgggagccccgattcgggtcgtggaagtgattaatgacagcactttactggtggagcgtttttaaatgactatttattattaatcttaggaatatatggaaagtatggaaggtagtttgtatttgattgtcgccatagtggcggtattgtttgttacgtttgcggcgatattgtcccgttataaacgttgtccgtcagacaagattcttgtcgtgtatggacggaccggtaagaatgcgaccgggggagtgagttccgcacgttgtattcatggaggtgcggcttttatttggcctgtgttccagagttattcatttttggatttgaccccgatctctatcgagtgtaatttgacgaacgctttaagtaaacaaaatatacgggtagatgtgccttgtcgttttacggtgggtatctctaccgaaccggatagtatgacgaatgcggcagagcgtttgttggggcaacggcaggaaaatattcaggatttggccaaggatattcttttcgggcagttacgtttggtgattgccacgatggatattgaggaaatcaattccgaccgggataaattcttggctaacgtgagtgctaacgtggaggccgaattacggaagatcggtttgaaactgatcaacgtgaacgtgaccgacttgcgggatgagtccgggtatatcgaggctttgggaaaagaagcggcagcgaaagcgatcaatgatgccaagaaaagcgtggccgagcagaatcgattcggtgagatcggtaaggctgaggcagatcgggataaagatattcgtattgcagaaaccgtgcgggacactcgtatccggacggccgaggctaatgcaactgcggtggagggagaaaacaatgccaagattttgattgccgattcggatgccatccgtcgggagagagaggccgaggctgcccgtaaagctattgcggcagagaaagtgcaagctgcaaaggctttggaagaggcgtacatggcagagaaagaggccgagatcgctcgtgccgaaagagaaaaagccacacaagcggctaatatcgtggttcccgcacagattgacaaggagaaagctattattgatgcggaggccgaggcggaacgtttgcgccggttggcgaaaggagaggcggatgccatttttgccaagatggatgcggaggcacgaggtttatacgaggtgctgacaaaacaggcggaaggatatgctcaaatcgtgaaagccgctgccggagatcccgacaaggcggtgatgatgttaattaccgataaattgccggagctggtgagaacgcaagtggaggctgttaagaatatcaagatcgacaaggttaccgtttgggatggcaataatgcagggaacgggaatacctccacggctaacttcatctcgggcatgatgaaatcagttcccccgttgaatgatctgtttaacatggccgggcttaatctaccgactttcctgaaaggtgctgccacagaagagaaaaacacggaggccggacaacaggatgagatcgttgaagaagtagagaagtaggggagattctaacttttagtttcgttttttcgtttactaataattacctttgtggtatacttcaatcgggtatatgacaaaggtaattaatcaattcataaaatagaggaaagtttatgcgctggataattgacggtgttgatgatttgaatcgggtagtaaaagagtttttggaaagtaccggaaacaacacgatatatgctctatacgggccgatgggggtgggaaagaccactttcgtgaaagcggtagcggggtgtttggggatagaggatgatgtgaattccccgacgtttgctatcgtaaacgagtatctgacagccacgggagactcggtttttcatttcgatttctatcgggtgaagaacatcgaagaggccatggactttggttacgaggaatatttttatagcgggaatcgttgttttattgagtggccggagatggtggagcctctgttgccggaaaacacgttgatatgtaagttctccgaactggcagatggccggagagaattggtgattgaagaaaaactttaaagtgtaggttatggacaactcgggtaaattattgggagcccagattaatcgggagtggtttctataccaggaaaaagaggtgtttgcggaataccggcagaaacgattgacaatcggtttaccgaacgagaccgagcgacgggaaaaccgggtgtgtttaaccccggaggccgtggccatgatggttgatatggggcatacgataatggtacaacgaggagccggagaggctgcacattaccatgaccgggagtacgccgatgcgggagcccagatgttggatacctgcgaggaagtgtacacggcggatattatactgaaaccgactccggtgatgcaggcagacgtggagatgatgcatgatcggcaggttataatgtcgcccatcgagctttttgaattacgcaaagaggctgtcgtcgagatgatgcagaagaagattacggctgtcgggtttgatattctgaaagacgagaacgagacttatcccgtggtacagatgatgagcgagatttcgggaagttcggcgatcatgattgctagcgagtacctgagtaattcccgagaaggtaaaggaattttgttaggaggggtgacgggaatcacgcctgccgaggtggttattctaggtgccggaactttgggtgaatatgcggctcgcacggcattggctttgggggcagaggtgaaagtcttcgatcattcgttggagcgtctgcgtcggataaatcattgtctggggcgacgggtatatacttctgtttttcacaagccggttttggaacgggcactattatctgccgacgtactgattggggctttacgtttctttgatgatgatttgggaatcaccgtgtctgaagaacaggtgagattgatgaaacagggggcggtaatcgtggatatgtccattgaacacggcggatgtattgaaacctcaggtcctaccacccacgaaaatccgacgtatgtatataacggggtaatccattattgtgtcccgaatgtcccgtcgagagtggctcgtacggcttccattgcttatagtaatttattcactcctttgtttgataagatctcccgggcgggaggttttaatgccgctataaaaaatgacaaaggattgcggcatggggtatatgtttataatggagtgttgaccaaacgggtaattgctgatcgctatggtttggtttccagagatattgatttattgctagcggctttttaatcacccgataaagacgataattcccagtattattccatacacgagtgcataagggaaagcttgttttaggatttccccttcttggccttgtaattgacatgcggaggcggcaatggcaatactctggggggagatgattttcccggcggtagtgcctgtggtgttggcggcggcaagccaagaaggatcaatgtccatgtttgcggcgattcctgcttgtaacttcccgaaaagaatgtttgccgaagtaccgctacccgtgataaatgttcctatttccccgaccagaggggaccagaaagcgtaatacttcccggagatggacgtgagtgtgtcggccagtaattgcaccataccggatatttccatgagtgcggatataccgaccaaggcgataaccataataatggtactgcggatttgtacaagagtttggccgagtaacgtgaattgcctgcttgtcgttacgccctgtatccgtcccccgataaaagctccggcaaaaagcaataaactcgttgccctgaaattgaagggaatagccagtaatataaagaaaatgataaggccgtagacactccacgcttggtatatttgtcggggcgagtgtttcgtgggaattgtgtcacttttttcggtccatctgctccatgcgataataataatgatggaacaaatactgcttagaatggctggcatctccggaccgagatatacggccgtggcgtattgtgctaggaaagatacgcccccgacaagcgtgccgagcaaaatgttcttgagtaaagcttggcggcgtctgtcggccaacatagccaaggtaattgggatcaagaatataaaaggatataattgttgaatggtagccttacacaattcaggcaacgggcagcctgtctcttccatgagaacagtttccgcaataccgacggctccgaatgtcgtgggttcactgttggcgatgagactcacgagtacggcgaacaacgggcgaaatcccagcgttacgagtatggcagccgggattgcgaccgaggtcccgtagccggccattccttccagtaggcccccgaacccccacgtgatcagtaatacctgtacactcctgtccgtggaaatcgttgccagttggtcttttaacacttcaatcttgccggaatccagcagaatattatagctaaacacggccatccagataacggaaagaatggtgatacaagcacgtgcggtactgtttattaaagtgaaaccgatctctcgtgtgggaataccaaaggcgaaagtggccaacataacggtaataacaagggtaagcaggctactcttatccccgggccacttgcatatccccatggctatgatcagtataaccataggcagtaaggcaaacaagacttcgaacatggcgtatcgttaaccttcttattgcttgaggatagagtctataaccggggttaaatcactgtttttcggtattttaattccccggattccggctgcctctgccgcttcgatgtcccgagagccatccccgattaaccatgaggcggatttgtcaatgtcgaactcccgaatagcttgctcgatcatgtaaggcgacggtttacggcatttgcagggggcaatactactgtgatgagggcagtagtatattttgtccacgtgcgccccgtgcttttccagttccttgcacatgtgggcgtgaaggttgtccacgtcttcgatcgtgtactcccctttagcgactccaccttggttggtaacgacgataatcaagtaacccgcctcgttcagccgacgaataccgtcaataacaccgggattgaaaacgaagtcttcaaccttgtagatgtaataatgaccttcatcagaattgatggtcccgtcccgatccaaaaatatagcctttttcattttcaacctgtaacctgaaattcaccacgggcgaatttcaatgcattatcttaaatattagctctttcagtagttcaccatcagaaatattagcattgccaacaccttttgatttaaggtcatactcccgtaaccaagagataatgttagcgcatttcatggcgttatatcttttcgctccttccgtgtaatctttcagaaaataaggattgatgcccagcaaccgggccatttcctgctggttgggagtacttttcttctggtaatggtacgtcagcaggttcagaaagtaccggaacaacatactgatcgtgagaaccagcgggttgttcttgggattagcctcgaaataattcacgatacggttcgctttcaggtgatccatctgtatgatggctgccgtgagttcgaacgtgttgaattccttgctgatccccgtgtgttcttcaaccagattctccttgatttcaccgccaccgggaagtaggagcatgagcttgtccagttcgttggccaccttgctcaaatcgttccccagactttccgcgagaatacctgcggctttcaatgaaatcatatacttcttgtctttgcagtacgagataatccagtccgggatcttattgtcgtaaagtttggccgactcgaaatagatgcaatgcgaagagctgcttaatttcttgaaaatccctttacgcttatccggtttcttgtttttatagagaaacacgaggattgttgtcggttgaagatgatcaatataaggcagtaaattctcgaaatcccggatattctgagcctctttgacaatgacaacctgacgttgtgacatcatgggaaagcggcgggctgtgtcggtcacggtggtcatggagacatcgttcccgtacaatatcgtttggttaaacgccttctcgtcctccgtgagggcgtttttctcgatgcgtgtcgctatatcgtccaaaaaataggattcctcccccgataaaaagtaaatcggggcatatttccctgcttttaaatctgcaactatctcttcgtatttcataaggcaaaagtaataaactttaaattccgatcatatcaaagagtggtaattttagcaccaagaacaggatttatcgccgggagatgtgagaaggggcttccttttcgatcgagcgcacgacctgctcgatttcccggtctcgtccgttcggttcgtaatcggctttcaggttattcccgaataacaaagccagcgattgccagaaataggcgttcaccgtacccttgtactccttgatgtgattgaacgacgtgttgtttgtctcccggtagatcaggcgaacgagaatcttcccttgcgtgacggttagtttcatcaacggttgtttgaacgtgtgcatgagttccttgtactctttcttgataatctgctttctttttgcttcggaatccgtttgcgctagtttatattcaatctcgttgatcttggcggcggctattttcgcgtacgggaacacctttctcacgttataaaccatcctttggttccgttgttgctggcgggcgtattttcggggattcttcaatcgggcgacgacatctacttcatggagaagaacatgaggcacggtatccctacccataatcacggatgggacaacactctgcgctgttgcaaagctgttaataaataaagataggagtgatatgataaatattttgcacatttttatatctttgcattaacgctttatcaatacaaagttagtagatatatttgacttgtaaaaatattaactagtggaaaaggaatttcaggatctgtttcagatacgtcacaacgatgaccgtgttgaggtgggaaaggtgttgattgcagaaccttttctggaaggtaagtattttaatcgttccgtggtttacatggtggaacatgatccgagcgggagcgtgggttttgtattgaacaagccgttaccttacacgacttccgagttggtaaaagaactcgaaggcgtatatttccccgtgtacattggtggtcccgtggaacgtaatcaattgtattacatccatcggagaaatgacataccggattcggaagagattgcgaagggtatatactggggaggtgattttaaggctttgacggagatgttgaaagccggaaaggtattggaaggcgagattcgtttctttgcagggtatagtggctggacagatagccagttggagaatgaactgcaggagaattcttggatggtggggacaattcctaccgacacgctgtttaccatcccgaacgaggggttatgggaacaagccatgagttctctgggcggaagatacaagctgtgggcgaattttccggaagacccgattcttaattaattgaaaattgagaattgaaagttgaaaatgaagaagatttaacgagtttagagtgagaaacgttggcctt

SEQ ID NO: 10805 - DNA, 24085 bp, Unknown
  gut microbiota DNA sequence
caagcttcccttggcaactcacctcacatacagcacctccttatccctgtatcttcccatatccgagataataaccttctccccgaccgtcagcccctgcaacacctccacgtattcgaaaccactctcgcccagcataacctttctcttttccactcgctccccgttgacaacccacaggtcataatctccccgacccatgtaataagctcctgttggcaaacgcaacgtctcatccttcatggcatgagtgacgtgtacatccactttcagccctgaacgcaaccgggtattaccctgatcatccaagaacacgacaaacttgatgaccccgttattcaccgaaggtgtgacattccccacggtacccgaaagcttctctccaccgattaccacgttcacccggttccccgcggtaatcttatccgcgtaactgtcggcaatctctccctccaccttaaaacttgacaaatcagataatatagccaaattactcccctgtgaaacggaagccccgacctgatcgttaatccaggtcaacgtggccgaacgaggagccatcacctgtgcctccccaagcgtcttgaacaacaaatccatattccttttggcgatcttgtaatccaactccagcgagcgaatctccgaccgtgaagtgctctttttattttcatatttacgtttcaattgctccagttgcatctgcttcaccgtgtaattcaattctgcctcccgcaccttttccctcgtactggccccgatactatccaaatagcgctcgttattcagcgacaccaaagttcgtttcaacatcatctcgtcgatgtccacctgcatcttcatttccgccaaatcactcgctatcgttttacgctgcaaatccaatttatttaattgcatctccaacgactccttctttgtctcgtactctgtccgtatcgtttccaaatccaactgcaacaacggttcatccttccgaacccggtcacccgatttcttgtacacttccaacaccttcgaagacaccggagaagtgatgatctcttctgcgaaaggaaccaccttccccgtggcatacacggatacctccacggccccctcgtccaccactccgaaattcacctccgcccctcgaatcttgggttgaaacatattaaccaaaaaagaaaacacccccacacctatgaccacgatcatagaaactttcacgatcatcttccgcttacgtcgtctttttatctccggagatattgcctgatccataatctaatatttttcttgttgataaattatatcttctctcttctcgaaatcatacaaagtcaacccgcgtaaagtataaaaatacacccatgacgaatacagctgactaacataagtacgccgggcattatcctgttccgtctgcgcggcattcaaatccaacacgctgatctgccccaacacgaaagtctcgtatgccgtcttgtaacgtttgcgggcgacagtatccgccaaacgcacgatctcgttcaaccgattctgttcctgatattgtttcactgccgtcatcacatcttgctcgaaattcaatgtttctttctccaactgcacccgtgtaatctcggcttgtgagcgagccaactccacctgtcctcgtccttttccccagttcaatatcggaatacttattcccaaactgaccgcctcccggttacgcaaattccggtaagtttccttaaaggtcctatcacttcccgagaacccgatagaagcgtaaacgtccgccttgaaccctctccccgctttcgcctgtgccacctgctgacgtgcttgcagcatccgacaaaccacgtcataacggaaaggattattcctgttcgccagctccatgacctgcttaaacgtcacctcgacatccggacactcttccggcatatcgggaataatcaccacccgttcgttataccccagataattacgcaaagcaaacatcttttgctcgtaagcctgttccgtctgaatcagtgaagacgaggcgttcaagtaattcaacttcaactgcaacaaatcattatcggaaatcaatcccctttcccgttttccctgtgctatctgcatcagtttttccgaatttttcaaattctgccgatcaatatccacgttaatcattgccagcaacaaatcgaaataatacgatatagcttgtatcgccacgttttccatgttcacggcaaactgctgctgagcttgcttgtacttctccggctcgatcctcatactccacttcaagggatttgccgtgatcaacggttgcgaaaaaaccacattaaacggcacgctcatatactccgtcgtcttgtcaccatccaactgatccacccgctccacctgtgattgtagggacaacgctcctcccgtcaacggaatattctgcgtcaccgacaacgccaactgctccgaaatcgaattactggaaatatatttatacgtcccatcctctttcaaataactcgataacgtcctgttaaaacttggtaatgttcccgtcaacgtcacgttgggtaacaaatctgccctgtaatttcgatattgccagtatgccgaccgtaaccggctctttgccaccatcgcatccagcgactgctcccgtgccagacgaatcgcttcccccaaagaaacaaccttttgctcctgttgagccgcaacaggtaaaacaatcagtaaacaccaccatatgaacaatcctttcataacacctccatttttacctgtttacacttctcgcatcacctccacgggattcattcgtgccactttataagccggccaccaagcactaaacaccgagaacaaaatcatcaccaagcaagcacaccctaacgccgacaaatgaaccgggtcgaacggataaacaaaacaaaataaaaccatccccggcagcaacgccaacaccgaaagcaacaagctctcgcttaccacaaaacgatataaccctcggggcgtggaacctaccacaattcgcaaggcaaactctttccgccgcttggaagaataaagccagaacaatccaaaagtcccgatgaatgcgaataaaaaaagaaaaatcgtcggaatccctataccaagtaaggtaataaaaacatctcgcatatcattcagtttccacttttcgatatttccaaaagacaatcttacaggctcctttcccatcatcagattaaattctttgttcatcaaattccgaaaattatccgtctcaccctcttttacacgaaccatatattcaaaccactgatccggctgtatacgattgggtacaatcatcgtaggccgagaagcctttaatggctcctgcttaattcccgtcactatgcctacaaccgtaaacacggtccctttataatatattctcttaccgatccctcgtgaccaaccaagttcctgcatcaactgactggttatcacagccgggcagcttccatcctccaacagttcatccgtcaaccattccccctcttccatttgtaattgaaaaacttgattcatatatttatccgcaaatttcaaaaaaacatgaatctttctcgttcctatttggatagaatcactcaaatacatctcttcgggacaggtataaggaaccaaccatttactttttccaaaagcaatcaccatagaagattttcgaaccttttcaacaacacgatccattttttgctgcaattccgaagacgaaagatattccgagggtgaaacgggaagtagcatacatttaaacgtattctttgtattcaatatccccggtgaaaaatattgagcaatcttctctccgacaataacaaaacaaaataataatacaaaaaacacaagcatctgctctgcaagcattcccccatatctccttttttgatttaaaaacaacgtaaaaatatgtttcatcatttcatacctcctttcaacatatctataataggacgtttcactgtcaaatatgcgggaattccccccgacaggaaagaaaacaacaaagccaaaggcaatacactgatgaaaataatggtccaattcaatctcggtaataacatcatctgcccctcgatactgttcgaaaacacgatccagtcaattccgcgacacacgggaaccgtcaacagaatacccaaaacagtacccgtaataaccagtaaaagattttctaccagaataaataaaaaagacgttcttttactggcgcctaacgcacgtttaagccctatttctcttgtttgtacacttgtattggccatactcaacaaaacaatattcaaaacgggtacgaccaaaagtataaaaatcatcacccccaccccggagagaaataaatcacccccgtacattttccgaataaactgtttctccgtgctaatctgcctcacggagacactcttatctatattataatatgtcttaacaaaaaattgataggcattagttacacttcgaaccattgtttccgcatccatgttttccggataaagaatataagtttccacccaatcatttgattcatttttactaaacttctcagggacccataaagaagcctttccctgtggagcaaaataggaaacatctgctaccacaccggtaatcctatacgtgttaccttcaatctgaatttccttgttgataaccgatttatccgggaaaaaacttctcacgaaattctcattcacgatcacacaaggcatctgcatctcgccttccgtgaaaaaatggccttgcacaaactcaaactggaacacgttccaataatcgcgatcgacaaaataaataccatactcatcatatcgtccattcaccataatatctaccgcttcataatgataagacgtgtaacggacatcctctctcacattattcatcaacgttcgaatatccgacctgttcagacctttcacggcctctcccttgttatctctcaacacgaaaggaacacttacaattcgatccgctgcaatagccggagccgtatcacacaatataacgtacgccacttgcaacaatatcgtgatgaacacgaatgtcagcatcgtcccgagcacgcaaaacccggcatacgccttatgacgtactatattataccagattggcttgaaatatatccttatcctttccatacacttctccttttacttcaaagtcaccgccgggtttaccttcgtcacccggtaagccggataccaagtactcaacatcgaaaacacaaccataacaagaatcgttacacacacccctatccattccggtaaagtatactcataaataaacacagacaagagcaccccgggcaaacaagccagtaaagtaacgacaacactctccagcatcacgaactcgagtaacctgcggggagtcgctcccaaggccaacctcaaagcatattcacgtgcccgcctttccgaattctgcataaacaagccaaacgtaccaataaacgcaaaaacgaacaggaatatcgtgggaacggcttgcaacatgatatatacaagcgctgtattatatgaagctcctttagcaaatttcatatccatcgcaaaaggttgagcttcttgaacaggtatcaaccgttgaaattctttataataagccatgataaactctttctctctacccggatatacacgtgcacaaagttcccggaacatattgttatatcccatagcattacatggcataataacagtcggctctgaagccaaaagaacctgatgctttatccctgaaatcacaccaactacagtaaggtcatttctacccataaaaaacttatgtccaatagcttgtgaccactgcaattcatcaactaattgtttcgtgaccacacaggcaaatgaaccatcctccaacctgtcatccgtgagccatttcccctccacaacgtccggacaaaacaccttgtaagcctcctcttcagctcctttataattcacacgatatatctttccatcaatacgcacactgtcataccaagcattatctctcatatatggaatcatcgccatactctgcgtaatcccgaccacgcaatccaactttttcagattatcgatcaaaatatcaacacgtttatcgacctcccccgtattatcgtttatttccgaaagcatatacccgaaactaaccgtgttatccgtattcaataatcccggtgaatatatcttgtataaaattccaaaaacagaaacgaccaccaacatcaacacgacaaaaacgaccgcttgctcgatgaaaatcccgcaaaagatcttccaggaattcctgactattttaaatacatgcctgatcatctatcacctcctttcaaaactaccgccatatttttctttaccgccaagtacgcagaatacccacctgtcaataaagtaaacacaaacatcataggtaaaattccgcccaatataaccatataattaatgcgtgtaattaaagcatctgtcccctccaatactccattaatacaaacctcctcgatcatacgcaccatcgggaaaaataacaacaatcccaaaaacactccgataaccacaagaatcagattctctattataatctgtaaaaaaagttcaaaacgtgaagccccaatggctctcctgatcgctatttcctcggattgtttaacagaattcgccacgttcaacgtcacaatattaatcgccggaataatcaataaaatcaaaagtacagcgggtaccccgtaaaacagtaattgaataccgatatcattcaccaaattttcttttaccgtgtatactttttccgcggtaacttcaacctttcttccccgacgtgaataataatcctctagcacacgtgcaattccttgtttagccgtcataacggaaacatgctgtggaaacaaaacacaaacatcataatcatgatccccgctgggtgtaaaagaattatatttattcgaaaaccaaattttttcgtatatacctgtcgtaaaaacagaaacatccctcaccacccctgtaatcgtgtaaacaactttctggcactcgattcttttccccacggcactctcccccttgaacaatatatccgcaatacttttgcttaccacggcaacggcctgcttatactcaaattcttctcgtgaaaacgcacgtccttccaaaaattcaaactggaaaacattccaataatcagcattcacgtaattcacaggaatagaaacaaacgtatgctccccaaaaacatccacaaactccgagtgactgacagcatacaattcatatcccgaaattccattcattaaactttcgatttcttcggcagaaacatacacggtcttacctcgtatatcccgagaacttccaatttgaacaatccggtccgcattctccatcggcggctcattaccaacaacagaataaacgagttgcagcacgatcgcaataaacacgaacgccaacgccgtacccaacacgtaaaaaatcgcaaacgacaagttgtgccggatatggtagaacgccgggataatataatttttccaccggttcataacactaatttcccgtcaaacaaacgaataatccgcccggtttcctctgccaatctctcatcatgcgtcaccatcacgatcgtcgttccctcccggttcagttgcacgagtaaatccatgatctccgctcccatcttactatccaaattccccgtcggctcgtccgccagaatcactttgggctgcccgatcaacgctctcgctatcgccacccgctggcactgtcccccggacaactgcgaggggaaatgtttcaaccgatgtgtcagccccaccttttcaattaactccagcgcccttttcctattagccgatgcagaacttccccggcgatacaacatcggcagcaacacgttatccaacacgttcaacgacgggattaaatgaaaactttggaaaataaaccccagcttctggttacgaatcctcgccatatccctatcatacaaagaatccgcccggacatcatcaataatcacccaaccactcgtcggcttatccaacaatcccataatattcaacatcgtactctttccacatcccgaaggtcccatgatagccacaaactcacctttctccaccgtcaggttaatatcttccaatgcccgtgtctccacctcgctcgtgtaaaacgttttattaatattctctaaagttatcatacgatttaagtattagttgattcatgatttattttactatcacaaacataacaaactccaacctaagaaacctccccgaattattgtaaaactattgtaaaatttcacatcctgcacatcgcccggatacaactccttgtaaaatcaattctaaatacgtaatttcgtctcgtccatatggcggcaaccattcaacaaacgtgcatgttgaaatggtaaaaggaaagtgaatgaaacacgatttaagaataataggctacattacgttcacgatattcattttattgtggatcaaccaattattctccggcattaaattatacgaaaccgtcaaaacacgttggcagacacacatggattctataatagcatccattattcccccatacgtggaaatcctgcaaacagactctgtccaagaacaaacacatctcctctcgtcactggacagcgcattacactccaaaactcccgatgccgttcatttcaccatcgcacggttagacagcacgcatcaagcaatcgtcaagttccaaaactacaaaacacgcacgtccgacataacacggggaaaaatctacccgataaataatccttcccacgaatccttggctatttattacaacttcccgatatccttctttttagagagagcatggcaggacatcctcaccattgtcgcactaaccctactactcgttctaggcttacaatacctgtcccacgcccaacaacatctatcccgcctccaggaagaaatgattaaacaagtcgtgcatgattggaagacccctctcgcaagtatcgtaaccttatctgaacttgtagaaaagaaatccatccccgaggatgacgaaaaaggacgagcgaaaatccggcttatccaagaagaagccagccgattgaaaaccagttcccagcaattacttaaaacattaagcgggttggcccacttgaacatcaaccgggacgaatttaacctgaaaaacgaacttctctcgttattcgaaaagcaatacctcgccaaccacggacaaaaaaacatccagctgaacctgcgttaccttgttgaatccgaaattatttacgcgtcacatttctacctgctcggagcccttcaaaatcttttggataatgccgtgaaatacagcggagatatgccacagatcactgtcatctgttatcaaaaaagaggaaccttcgttatagaaataagggacaatggtcccggtatccccaaaaaacaacaaaaatatattttcaataaatactatcaggcaaacaaaaactctaccagcaaaaaaggatacggactaggccttaactatgtctacaacgttattaaagcccacaaggggaaaatcacggtggacagcctgctgggaaaaggatgtacattcacgatatacttacgcaaatggaagaaaaaataaatatactctatgccgaggacaataccacggccgcgatgatatacacggaaattttggaagaagccgggtacacggtaacccttgccaaagaggggaacaaggcatggcaactatacgaaacaggcacctgggatctcctgttgcttgacatggatctgccgggaaaggacggccacgaactgattcgccttgtacgggaaaaaggggatcaggtcccgatcgtgattctcagttctgtcaaccacaaccacgccttgtacgagggtgccgacgattatctcgtgaaaggttgtagcgtggacgacgtgaaagcacgcttggacaaggctatcgccagaaccaaacgcttgaacacggaaaaagaacaaggacttttccgcatttctcccgacaccacgttcaataaaaacaaccggttactcaccatctccggcaaacgagaagagctgaaaggcatggaatcgaacatcctatggctattctgcctgcggatcaacgaggtgattcccaccgtggaaatgtgcgagacgctctggggcgtctataccacggacaaggaaaaagccctcacaagatacgtctgcctgctaaataaaaaactgaaagcagataaaagcatcgccatccaaaatgaatttgctcgaggttacaaactcgtgaacggcttgtagtataaaatttcatctcaggccctcaaacacataaatttaaattaatgtcacaaaatgtgatattatcactaacatattcttatcaaatagcgagccgctcccattccgctcccattcctgccctatccccctcctataattaaaactaaatattgcaattaatttgtttttttaaaggaatctatttacatttgaaaactcctatatagcattattttagtcttaaaacaggagactgactcataaacacgaccaaaaggtcaacaaaatcagaaaatacatggcaacattaaacgattctgtattacaaggagcctccgggaaaatcgggggatacgtgacttacacggtagggaacaaaacgtatgcccgaaaactggcggacacgatcagtaacccgcgttcggaaggacaaacggcacaacgttcaaagctccccggagtccagaccatgtaccgtgccacacgggggagcctgctggaaaaagtgtatgcattcgtggcccgggaagaggaacgacgctccggctaccactggttcctccacgcgaacatgaatatgttcggccctaacgactatatcgattacccccggttagtcctgtcggacggtagcctgcaattacctttcgggatgaaagccacggccattcatactgacaaactggaactggaatggctggataacacgtcaaccgtcaccgcgcaagcaaccgaccaactgaccgttgccgccatctttgacaacgaaccctatcaacccgtcgtgctggatgacacggggtactaccgatcagatgagaaagccgtcgtactcgtgcccgaaggagcttggacaacggcccatttgtactgctttttcgctgcccaagacgggaaacgctactccccgtgcatgtatttctcaatttctaaatcttaacacacgaatatcatggcaatttttaaacctaccatatttcaagacatctccggttcagtgggcaacgtaacttcctacaaagtgggtaaaactcaaatcgctagaggaaaaccgggcttcgtgaaggacgcacaaaccccggaacaattaaaacaacgtgccagattaagcctgatcaccaaattgcgccgccgtttcctcaaagtcctatccgttggctactgctccccctccggtaaggtatgcgccaactgtttcacccgtgacaatattcacaaagtgaacgcggaagatacggaaaatcccaccgtggacttgttgacactctcgctctccggtggcgggttgcgcctccccctcatcgaagcgaaagtggacaaggaaaagagacgggtctcgttccaatggcaacaacaaccattaatgcctttcatggctaaagaggatcgcttgataggtgtgattcacgaacgggaagaaaagaaaagccgactcgtggaactcggaaccagaggcacaaacggggaaaaagaatggccgctaccggaagactgggacgtgaaccgactggtcgtgtacggtttcgctgtcagcgagaacgggcagaacgcatcgggtacgctggggttactcgaaaccaacggggaagcctgatcacgaatccatttccagattcgtgaaatcccccgtgatttcaattctcggctccggatattcaaaaagggcaaagcgggattccgtgcgcccttcagcataatcccacaacgaactgtaatcctccacccgttcccccaacgcctgtaattggcgcaaataagccgcgatcgacttgctttccacgatataaatattcccctcgtgatccacttggggactatgtcgtcgtcccgcatccaaagaaaaacgtaaaatacgttttccctcctttgtcatccccaccgtctggaacgtcatgctcttccctatccccggtaagttcatcacgtttcgatccgtggctaaaaacggttgccgatatttatccaacaagcccggcaattccgagggaatcctttccgggtattcgagcaattccaaaacctccttttccagctccatggataaatccccacacactttttcctccaacacctcttgtaccgaacgactattcggggcaaacaaggcataattctcctcaaatcccttcactgaaaaagtgtaataagtcaatataccgattcgattcaaaacctctctcaacctcgccgtatgcccccgacgtgaagccgccaccgtaaacacggcttgattggtgataatccatccggcctccagcaagcaccgggcagcatgaatcacctcttccgtcacctccaaaggcgactcgaaatgagtctgtatgaaaaattgctgaatcccaacctgctccgccttctcccggaatcttttcaacacctcgatcaacccgtcgtttacacgattcggcagataagctaataatctcgatcccaacctcacccgttgaatctcggcatattttttccctttcccacgccgcttgttcaattcccgcttacgcacggccatacggaaaacagcatccaagattctctctaacgtctggttctgactcatcagagcatcccctcccgtgatcaaaatatcccgtaattgagaatcatgctcgtaatacatcatcagacgttccatcttgacttcccacccgtccgtcggcttcagtcgatccaagttaaaattcaaatgtcctttctgaaagtcatacatacgctggcacaaagcacacaacccgccacaagcccgtcccatcgaatccgggatgaaaatggccacttcgggataacgacgatgaatattcgtggcattgggcaacaaccacccggcagcattcggttttcccggttccacaacatcttctttctcccacgcccgaatctgcccgaaattctccaccaactccttagaataaatcacgtaactgcggatcgtggaatcatcgtatccatccacccgaatactcaacaaggaaagataatacggtgtcacgaaaaacgggatccctttctgtttcgcccggagcaacagcttcatcaattccggagacaacgtgttacccatgaacaagttcaactcatccggatcccgaacggctaaagccaaatgaaacttgtaatccccccaccattcattcactaactcccgttttctttccaggctcatctcctcctcaaaacgataacgggtgttcaacttatccctcttctctattttcccgattaacaaaccacatattctctcccggttttccctacgctcccgagcgacatcctcatccatcccggttttccaacgtccccgccattgatcacatcgtgcccgatccggtaaaacgacttcatccgtctggtatttcttaaatagataataccaatccaacaaaaagtccggatgtatgccatccccttctccccgtaaagcttgccataaccatttaatcggttcataacgaatcttctcccccgtggaaaaatcccgaatataccgggtctcgttcatgaacatcctgaaaaatcgttttatagacgaagaagtagaatgctttgctaaagcaagacgtacgtatcccctcagaaattgttcaaactctttccaatccttactaaggtttgcaccttgcatgatcgtcgggaactcccgctcaaataaactcaccaactctatacacgaaaaacttaatatatctttctccttcacattttctccttatcttagattaaacaaaaacgacaaacggatatcgcccaaacaagtccccggaagtcagggtttagaatatttatataggcaataaatatctgatgtctacaaatttaataaaaaaagagaaagttcgcaaccaataaaacaaaaaaaacgctgcaatcttgtgattacagcgtctttttcaacacttatagccttcggaaaaggtactaattcctcctctgtttatacgaagcccctaaactttacaaactttatagagcttatgaacttttgacactcttagtatctcgttttattattggtcgtctgccaaagcctgaattcctcccctgcaccctcttctcgtttattctcaaacgggatacaacgcataggaccatccagcacgatctctttatagataaaagaatcatcaaatcctccgacagccgcatcctccttcgtacaggcataatacacccgttccggtctcgcccagtaaatcgcccctaaacacatgggacaaggttcacaactggaataaatctcacaacctttcaactggaaagaatcaagttgcttacaagccttgcgaatagcattcacttccgcatgagccgtgggatcattatccggaacaaccgtattcccggaagttgcaataatcttaccatcccgcacaactaccgccccgaagggccctcccgtcccattctccacgttctccacggcaatacgaattgcctccttcataaactccggattataagagttcgcctttggcgagttacaggttgattggttactagttacagattctttcatcttttagcttttagtttttaacttttatctttctcccgcttctccaaatcatgtaaatcccgatcaacacaaagggaatactcaaccattgtcccatattcaaggtcatggcgtcttcaaacgcttcctggttctctttcacgaattcgatcacaaaacgagcggtaaagatcagtactaaaaacatcccgaaaagaaatccctgacgatctttcgctttcgtcttccaatacaaatgcattaaaacagcaaaactgatcaaataacagatcgcctcgtacaactgtgctggatgacggggagtcatcggatcaggcatcccggaatgtacaaaacggaatccccaaggtagctctgtcggtaaaccgacaatctccgagttcatcagatttcccatccggataaagaaaccagccaatgcgattggaattacggcacgatccaaaatccagaatattgatttcctacttaccttcttggaatagtaccacaacccggtaataataccgattgcagccccgtggctggccaacccttggtatccggtaaaacggaattccggttgaaaccgaaccggcagaataatttcaaacggatgagcactataatacgcccaatcataaaagaaacaatgtcccaaccgggccccgatcaccgtggcaactgccacgtatatccacaacttgtccaaccattgttggcttaacccttccgacttgaacatcttctcctcgaccttatacccgcacacgaaagccaaggcgaataacaacccgtaataacgaatcgagaaaccacctaaactaattaattcgggactaacatcccaattgataaataatgaaaccaatgtcataattttaaattttaaattgtagattttaaattatcatgcaataatccaaaacctacaattattaattactttagattttgaagtcaaattttatcttgtaaaacccaatctaaaatttaaaatctaaaatctaaaattattctattcttcccccttcccgtggcaattcttgtatttcttaccacttccgcaaggacacggatcattacgtccaaccttgggacccactttcacgggttcggttttacggggagcctgattggtctgagcggcaggagcatcactacgtcccgtacgcatcttacttaaatcggttcgtttctcttctgcctgtttcacttcttcaggagcctcaaaaggaatttgtcccttcatcaaagtagacacaacattcttattgatcttgtccaccatactcttgaataagttgaacgactcgaacttatagatcaacagcgggtctttctgctcgtaagttgcattctgcacggattgtttcaaatcatccatttcacgcaaatgctctttccaagcatcatcaatatgagccaacatgatcgacttctcataagcccggatcaattcctcaccttcagatttgtaagtcttctcaagattagccacaacattgtaagcccgttttccatcggtaaacggcaccactatattcttgaacatttcccctctctgctcgaaaacattcttgatcaccgggaaagcctgtttagcgatagtttccgtcttacgactgaatgtatcccgaacctccttgtacaatctctctgtcaagttgttagcagaagtcttttggaaatcctcttcttttatatcaaaatcaacggcaagatatttcaacacatccatacggaaaccttccaaatcattagcctccttatgttcttccaccaatgcctcgcatacatcatacatattgttggcaatatccactccgattctctctctcaacaacgcatgacgtcttttcttgtagatcacctcacgttgagagttcatcacgtcgtcatattccaacaaacgcttacgaataccgaagttgttttcctccaccttacgttgcgcacgttcgatagatttggtaatcatggaatgttggatcacgtcaccttcttcatgtcccaaacgatccatcacccgaatgattctctcggaactgaacaaacgcatcaaatcatcctccaatgacacgaagaactgggaagaacccggatctccctgacgtccggcacgacctctcaactgacggtcaacacgacgagaatcatgacgttccgtaccgataatggccaaacctcccgcagcacgaacctctggacttaacttgatatcggtaccacgaccggccatgttggtagcaatcgtaaccacttgcgatttaccggcctctgcaacaatatcagcctcccgttgatgcaacttcgcattcaacacgttatgcttgataccccgcaatttcaacatacggctcaacaactcggatacctcgacggaagtcgtacctaccaacaccgggcgaccttctccaaccaatcgggtaatctcctcgatcaccgcattatacttctcacgttttgtcttgtacacgtaatcattagcatcctttcggattaccggcttgtttgtcgggataaccacaacgtccaacttgtaaatatcccagaactctcccgcttccgtttctgccgtaccggtcataccggctagcttatggtacatacggaaataattctgtaaggtaatcgtggcaaatgtctgcgtggcagcctcaactttcacgttttccttcgcctcgatagcttggtgcaaaccgtctgaataacgacgtccttccatgatacgtcccgtctgctcgtccacaatcttcaccttgttatcgataaccacgtattcaacatccaattcgaacaacgtatatgccttcaacaactggttcaccgtatgtacacgctcagatttggcggcataattttgcaccatctgatcctttttctctaatttttcctcttctgtcaggttcatcttatcgatctctgccaattcagaacccacatccggcaagataaagaaattcggatcttctcctgcggccgtaatcgtatcatgtcccttatccgtcaaatcgatagagttctgtttctcatcaatcacgaaataaaggtcatctgtgatctccggcatacgacggttattctcctgcatataaatattctcggttttcaccaaggtagccttgtttccttgttcactcaagaacttgatcaatggcttatatttaggtaatcctttatatgctctcaacaacaatatagctccctgttcctcttgtttccgatcaccgctagccaacaacgctttagcctccgtgaaaatccgggcaactaactcacgctgcatacgcaccaacttctccacacggggtttgtattcgtcaaacatttgaatatctcccttcggaaccggaccggaaataatcaacggggtacgggcatcgtcaatcaacacggagtcgacctcatcgacaatcgcataatgatgcttgcgttgtaccaaatcttccgggtgaatcgccatgttatccctcaaatagtcgaaaccgaattcattattcgttccgaaagtaatatctgcttgataagccttccgtctctccggggaattcggctccgtcttgtcaatacaatcaacagacaacccgtggaacatgtaaagaggtcccatccactcggagtcacgttttgccaagtaatcattgaccgtaaccacgtgtaccccccgacctgtcaaggcattcaagaatacaggcaaggtagccaccaacgttttaccttcaccggtagccatctcggcaatcttaccttggtgtaacacggaaccacctatcaactgcacatcatagtgaaccatgtcccaggtaacctcgtttcctccggctacccaagaattgaaataaacggcatcctcaccgtcaatctccacgaaatctttcgttacagccaaatcacgatcaaaatcgttagctttcacgacaatctcgttgttctccttgaaacgtctcgccgtatctttcatcacggcaaaagctaaaggtaatatctcgtttaaaacatcttctagcttcgtgttaatctgttcttccagcttatcaatccggttataaatctcttctctttcctcgatcgaaggtttatcattctctacttttgctttcaaagaggcaatttcatcctcttctaccttcacgtgggcatgaatctttgctttcagatcagccgaaatttttctcaactcatcatgacttacccccttgatcttttcccactctgcatttactttggatgctatcggcaataattctttcaaatcacggtcagccttgttaccaaaaagactttttaatatatcgttaaatcccatagtttataattgaaaattgaaaattgaaaattgaaaatgaccaagcacaaatttcctttagtcattcaatcgtaaatctaaaatcataaatccgaaatcattccatttccccgggagcccggatgggatttgctgcaatttccggtactttccaacccggtaaaaccacagacgaataagtagtataaacttttacagcatccacggtttccgcatgattctgtttatagaaatcaccataatcgaaatcctccgtggaccttttctcggtagaaaccgtaatcaccttttcggtagaagaaactaacaaacgatagcaatctgtcctaacggatacattccccccacgcacatttatcggcagggttgccacgcatccggcgacaacatacaaggctgctatcaaatatttgttcatttccataccgccaaagataatgcttttctcctaacttttcagtttttagtttttatcttttaatttttagctcttagcttttagtttttagtttttagcttttatcttctatagcttttctccgaaagccaaatctccggcatcaccaattcccggatcgatatagcaactttctgtcagatgctcatccaatgcccccgtccaaaccgttacaggttcatctttcaaagcctccgtaagcctttcaataccttgaaggctggaaacaatagctgcaatatgcgtgtgcgcaggtcttcctccctgtttcaacaactcatgataagccaccacgatagaggcacccgtggccaacatcggatccaccagtaataactgtttcccctccaaacttggtgtataaatcgagtcgaaacgaatttcaaaatcgatatgattttccttgtattttcttcttgccgaaataaaagcactcccggaacgatcaaaatagtttaaaaagccttgatgaaaaggtaatcccgctcgcaacacagatgccaccacaacctcctcgtctgccaatctgacatcagccacgtttatcggggtctgtacttgtcgcgttgaataacgaaacgtcttgctgatctcgtaagccatcacctctcccactcgctccagattccggcgaaaacgtaacggatctttctgaatttctttatctctaagttctgctaaaaaacgattataaaccgaatcctccttattaataatatgtaccatttaatctattcttttcttaaacctttcctatcacacgcacttatcccaatcttaaatctaaaatttaaaatctaaaattagtaaatctctttttattctatttcctcatactccgcatcctcaatctctccgcctcccatcttctgttgttgttccgcctcctgcgtctccttacgcaactgattaactttataatgattaatcaaatccgttattccataaaatattgtaacagcaccgaaaaactgaataatactagtctttgcctcaaaaggatttgcaaaaacaactaatccggccaacaaaatgataaccgggtacacgtaactcaaagaagcaatatgcccgaattttctagcagaagttaacatcaccaactgaccgatacctgcaacgatcaaaataaaccctaacaggtacatcaacatattggtaaagaaatcagccatagaccacaacagaatacccaaaacaatactcccgatcccgttaaaagaggtcaatccccttgcagaacgttcatcctgatcccgcatggataccagaaaagaaataatcccggtaacacaaaatacggcaccgataatctttaccgtgtaattcaacacttctgtcggccacagcacgagtacaagacctaaaacaatcgctacgatcgattttacgacagtccttttgtaatttccggaagtataaataatctgcataacttctattttttaatttatacgaaattcgtcaacgaaagtagtgattatttttgaaaaaattaagccggacgacttgtccggcttaattttttatttaatcagttcaacacttcgcttcacaaacctattcaaagcctcacctttcagtagcccattcgctaacaatgctaagtcaatcagctgaccaacaaccttgttaccttttccgtactcctccagcaacgagctcttctgcttgttcagatcggcaatcgtcttactgtactcactcttccgatctttatccacctgaggaatttcctcgtctttcttacccttatttaactcgtccagctctgcctgtttcttttcagtctccttgatctcgaaattaatcggctccaactgggcgctcatctcttttttctcgttctccaagatcgtattcaccaacttatgatccgtgttcaccaccaaagtatactgatcgcccattgccccgtaaaatcccatacccggattcatagctgccatctctttcatacgacgcatgaactcagaacgcgtcacgatcaccggatcaccattctctcccatcgcctcaaaattaaccataaacatcccttcttccttcggcaactgggaagtaaatacggcacgcaattcctcttgttcctcgtgactcaaggcaacctctttcgtctcttccttcgggatcaacttgtcaataacatcagaatccacccgaacaaaccgatgatcggaattcttttgttccaaatggttgataaagtgtgtatccaactgtccatccatcaacagcacatcatatcccttacccttggccgtctcgatatacgtgtactgctctttcacatccgtggcatacaggaacaccaccttattatctttatccgtttggttggctttaatcaagttctcgtactcttcatacgtgaaatattttccttccgtattcttgaataagaagatgctcttggctctctcggcgaatttttcatccgtcaacattccatattggatgaaaatcttcaaatcatcccacttcttctcgtaatcttcccgtttattcgtgaaaatatcactcaaactgtcagccactttcttcgtaatatgacttgaaatcttcttcacgttacgatcgctctgtaaataagaacgagacacgttcagcggaatatccggagaatcgatcactccatgcaacaatgtcaagtattccggcacgattccttccacggaatccgtcacgtacacctgattgctatataattgaatcttgttcttctgaatctcgaacttgttatcgatcttcgggaaatacaatatacccgtcaagttaaaaggataatccacgttcaaatgaatatggaacaacggatcctgagccattgggtacaactcacgatagaatttctcgtaatcctcctccgttagatcggtcggtttacgagtccacgccggattcgtgtcattgatcacgttatcttccgtcgtatccttgtattccccgtccttccactcttttttctttccggaaataatctctatcggcaaaaacttgcaatatttggtcagcaaatcgttcaccttagaatcttccaagaaatctttctcttcctcgctgatatacatgataatatccgtacctctctcggccttttccgtctcctccaaagtgtattccggatttccctcacatgaccattttacagccttcgccccctctttataagatttagtcacgatctctacccgatcacttaccatgaacgaagaatagaaacctaacccgaaatgcccaataatggcagcggcattatccttatatttgttcataaactcctccgctccggaaaaagcgatctggttgatatacttctccacttcctcctccgtcataccgataccattatccgataccgtcagcgtccctgccgctttgtcagccttcacccttaccttcaactcaccaagttcacctttaaactccccgttcgaagccaatactttcattttctgtgaagcatccaccgcattcgaaacaatctctctcaaaaagatctcgtgatccgagtataaaaatttcttgataatcgggaacaaattccccgttgaaactccaatctttcctgttgacataactctatatttttaatttaattatacttcaaattttacgacaactaaatgacaatagttatgccaaaacctattacctgccgaattggcagtattactctttacaatttcgccatttctcccacagtattcaatattacaccccaaacgaacattcacaaaaacaaaataccccggacatttatccgaggtactatcttttcaacaaataattattcaatcacaattctgttggttgtaatacaggaagcgtcgataatttaaaatcttttacattccgagtcacgatcgcttcaatctttctattttgcaaagctgaaaaatattgaatcgcatcttcaaaatcaccaaatcccgaatcaagagatgaacgtattatttttccgttaactggaagaattcctacatatctagataattctttcaaactctctattgttttctcatgccctaaatatcgccgaattatataataaatatttgaatatgacaaagacgatatataaacacaaatctcaccacgtcccgcagcatcaaaaagatttgaagctgcttcagcaaattcacctcgatctgccaacatatcaataatgacatttgtatctatataataatgtttcatttcttcaaagatctattttccaactccttcttataatcaaaatcttccggaagattaacaattcctcttaatttagaagaaaccggtttacttttcacctccgtaccaagtagatttttcaactctttttcaacaacttccgtaatcgttctccctttagatttggcataccttttcaattgctcaaaaagacttaaatcaacttctattgttgcttttgtattcataacataaacatttttacaaatatagagaacaatcatacaaaaacaaaatttactcaaaacaaaataccccggacatttatccgaggtactatcttctcctccatgaaaaacttcgtcataaatc

SEQ ID NO: 10806 - DNA, 1684 bp, Unknown
  gut microbiota DNA sequence
atccattcagcacgctatttcacgatcttcatcaacgtcaaaaatataatcttaaaatactctttcaaacatcgattatctatatacttcatgttatatcgtatcttatccggcatgatctgctccacgtaagcccggtccggatcacgtgcctgtcccaaaatggtattttcatccgcatactcgatagaagcataatccgttatacccggagcaacagccaacactttacgctgttcaacagtatacatatccacgtactttcttacctccggccttggtcccaccaaactcatctcccctcgtaccacgttcagcaactgcggtaactcgtccagtttatactttctcaggagatacataaagctatgatcacaaaaatgggtgatagaactatcaagcccaataaagaaaagaaaacatcacaaaagcgaatcacgccaaaacctcttctacagaacaaataacagcatcaataaccgttttcaccatctcctcattcaacccgtaccacacaggtaaagaaatttcccgacaataattatcgtaagcaaccggataatcttcaatcttataccccttattcttaaatgcacttaacaaaggcaagggttgaaaatgcacgttcaccgaaacgtccttgtcaaaaattcgctgaataatctcgtcccgttgttgttccgtgattcccttcacccgcaaacagtacacgtgataagaactcttccggtcttccgtctcgtaaatcggcaattccgcccacccgtaccgggaaaaagcatcggtatattgatcgtatatacacttccgatagtgcaaagtatcgtcctcgtaacgagacaactccaccaaaccgatagaagccataatatccgtcatattccccttaaaaccggaaactaacacgtcataacgccatgccccctttttcgtcttggccaacgcatctttattttgtccatgcaaagtatatgtacacaaatacctatacacttcctcattatcaaacggctccggcaagttcaacatgatcgcaccgccttccgccgtggtcagattcttcaccgcatggaaagaaaacaccgaaacatcagccaaactccccgctttccgccccttgtattccgcccctatcgaatgagccgagtccgacaaaatcaaaatccttcccaacttcctctgttcttccgtcttcgcttgaaacaacgttttcacttcctctgtctccaccaattcaaacaactcatcatacgcacatggcatacctcccaaatcaacaggcataatcacctttgtcttattcgtgatcgccctcctcactttctccaaacacacgtcaaaatcatccgcattcacatccaccatcaccggtttcgccccacaatgcacgatcacattcgccgtggcacaatacgtgtacaccggcacaatcacctcatccccctcctgcactccaaaccaacgtagcacaacttcaagccccacagtattcgagttcacagccaacgtcgccttgtttccacaatatgctgtcaacctccgttcaaactccttcgtcttcggtcccgtcgtaatccaaccggacttcaaggtatcaacaacctcatcaatgaccttctggtcaattcttggtggtgaaaatggtatcataatcaaacttttaaatcctaaacactcaataatg

SEQ ID NO: 10807 - DNA, 8325 bp, Unknown
  gut microbiota DNA sequence
tatgaaagagcgagcagaatatgataaggatgttcaagcgttggtgaacgacttgaagaaaggtcatgaacctgcttttgactatttatttactactaggtatgaggatttgtgtcggtttgctcatgcctttgtcggttcttttgaagcggcggaagatgtcgttcaagatgtttttatcaagatatgggagaagaacataacgattagtaacagtgcttctttggatagttatttgtatgtggcggtacgaaacgggtgtgtgagttatgctcgaaagacaagatccagtgtcggtttggaaaaagtggaagatcatgaagcggaagatgttgttattgaagattggcaatttgtctgggaagcggttgagagtctaccggagcagcgtcggttggtgttgaaattagtggtattggaagatatgaaatatgcggacgtggccgaacgtttgggaatttctttgaacacggtgaagacacaaatgcggatggcttaccgggagttaaggcaaaaattcacgataaaagaacttaccttgttgttttgctatttttcaggtaatgaggtgtttattcgtaaaagataaattttagtaaaataatttgttttttgaatcacccttttttgagggtggtgcgtcctctcatgaaaagtattcataatacaatgaaatttatggatgataagatagaggaattgctggtaaaaaaagttgacggggagctttctgcaaaagaggaagaattcttgtcgttatggttggccgaggatgtggagcatgaacgggagttacaagtgtttatggcggtgcgtcaacggctatccgtgttgcgggaagagttccggccggatatttccgggcgtttacaattggtaaagagtcggagaaaaaaacgggttcatttggggctttggttgagatatgcggcaatatggatattagttgccggagttggagggtatttgttgtggcgtgatcgggagagcgtggagcgagaacacaggatgtttgcacaggttgcggtgcccggtaatgaacgggcttatttggtttgggcaaatggggagaaggtggagattaacgagatgatgagagatacgatcttgacaggaacgggtggggttatcatgcgagtggattctaaccgggtgctacattatgaaagtcaggatagtttggcaagtcggggcaatcggatgcataagttggtggtacctaatggtggtgaatatcggatagttttagaggatggttccgttgtgtggttgaattcggcttcaacattggaaattccggaatattttgaaacgggggaacgaagggtgagattgacgggggagggatattttaaagtgaaacgtgacacggaacgtccgttttacgtggaaacggaacggttgaacgtgagggtgttgggcacggaatttaatctttctgcttataaggatgatttgatgccttcggcaacattgataaacggggcggtacgagtgatagaatgtaggggagattccgtgatgttgaagcccggacaacaggctgttgtcgggaaaaaagggttagaggttcaggaggtcgatgtcgcttatatcacgtcatgggttgatgggaagtttcatttcgaggatgcccggttggaggatattgcgttgcgaattgctcgctggtatgatgtaaagatttctttccaacaggaggaattgaaagaggtgcgtttttccggggcgatgttgaagtttaggcccttgggtgatttgatcgagatgattgaggctacgagttacgtgcgttttagtgtgcaaggtgatagtattgttatttcaagaagataaaaatcgagaaagtggctaggctttctcgactttaattggtcaattgctttgtcccctagaattgagagtcagggtacaaggctatgtataaccttaaatgcaaatatatgaaaaaatcaagagcctgatctggtattgcagatatggcaaaaaaaaacgtggatgatgatgcgtttggttggtttaatttgtttgtggtgtttgttgggtgtgccgaaagtggggtacgcgcaggcgcgactggtttcgttagaagtgaaggagaccccgattaaacaggtattacgggtgttgggaagtgagtatggtaaagatttcttttatagcaacgtgcaagtggatatgaacgagcgggtgagtgtgacgttgaagaatgtgacgattggcgaggctttaaaacggatttttgcagggaaagaggtgaagtttgaagagaaagaggatttcgtgttgattttggaggttcgggaacagataaaatcgtcgcaggttcgggaagtgaatggttccgtgtgtgatgagaaaggaatgccgttgcctggggtgacaattttaattaaaggtacgagcgtgggattttccagtaatgttgacgggaagtttaaatatgctttagctatgaaattacccgtgacgctggtatttacatccatcggttatgagaagcaggaagttgtgattgaggatagcacgaaggttgtgaacgtgaagatgaagccggacgtgacggaggttgaggaagtcgttgttacgggatatgcgaccattcgtaaatctagttttacgggagcttacacggaggtgaagcgggaagaattattgaaggtttctcaaggtaacgtgattgcggctttacaggtttttgatccttcgttacgtatcatggagaataacgagatggggtctgatccgaatactttaccggagttttacgtgcgggggcgttccgggattagtggcgtctccgagttggaggtgttgcaatccgaaacgtcggaatatgcgttgacagctaacccgaatttgcctgtttttattttagacgggtatgaagtgtctgcagagaagatttatgatatggatccgaatttgattgagaatataacgatattgaaagatgcggcagcaacagcgatttacggttctcgtgcggctaacggggtgattgttatcgaatcggtggctccgactgtgggaaaattgaacgtgacgtataatttgaccgggtctataacgcagccggatttgacgtcttatagtttgatggatgcccggggaaagttagaggctgaagttgcggtaggcttgctggatgcggatgatcctctgggattggggactacttatgcttcccggttggcagattggagaatgaagaataattatataactcgcggagtggatacttattggctttctaagcctttgcggacgggggttaatcataatcatagtttgagtataaacgggggtatggaggcgatccgttttgcgttgaatttgcgttatggaatggataacggagtgatgaagaagtctttgcgagaacgtttcagtgtcgggttgaagttggattaccggatgaaatcgtggcaggtgacaaatgatgcttcttttgctcgtacggtgtccgagaattctccttatggttctttcggggattatgtaagaatgcaaccttattttgccccgtatgatttggaaaccggggagttggtaaatcgtttcccaaaagtttacgggcaaaattccggttcggtaaatccgctttacgaggcgttgatggtgaataacgagagtggaagtagttataatcaattcacgaataatttgggatttaatattacttttttagagaatttcttgttgaaaggtacgttgagtattaactataaggatacgaaaacacggaattttaaagatccggcttccgctacttttgatggcaaggatgttttggaacggggaacgttgagtgagtcacggtcagagaattttagtttggatatgagtcttttgttgagttataatcgggtgttcaaagatcataatgttaatttgagcgtggggatgaacgtgcaggattctaaaagcgagtatgagtcaacgaaatatatcgggttcccttcttccgatttgaataaacctcagtatgcgaatagattatctagtaatatacctactttttctgataatcacacgaggttgttcgggttgtttatgatggggaattattcgtataagaatatttatttggtggatgtttcaatgcgaacggatggatcttccgagtttggtagtgaccggcgtttcgcaactttttattctaccggggtgggaattaacatgcataattatagatttttagtggataaccgtgttttttctcaattacgaattcgaggaacatggggggagactggtaaagtgaattatcctccttttgcagctcgtcacacgtatacggtgcaggccggagcttggcatacgaccgggatgggggatacgctgacttatatggggaatgaggatttgtcgtgggagaagacatcaacgttgaatctggggttggatatgactctgtttaaacgttacacgcttaatttgtcgtggtatgataagattacgaatgatttgatcacggatgtatctatcgtgccgtcttcgggttttacgagttataaagataatatgggtaaggtgaggaaccggggtgttgaggttaatttgaacgtaaatgcgattcaaaagcaggattggggattgaacgtgtttttccgggcgtctcataataagaatcgaataatggagatttccgatgcgttgaaggaatataatcagaaagtggatgattattattcgaagtatcctaattataataaaccgttgttgaaatacacggaaggggcttcattgacgtcaatttatgctgttcggtcgttgggtatatctccggcgaacgggcaagaagtgtttcttgatgccaatgggaaggttacttatgattggaatgcgacgaatcaggtcgtagtgggcaatacggagcctaagttgcagggatcttttgggttcaatttccgttggaagaggtggacattgttcacggcagctttgttcgagacaggaggtgatttgtataattcaactttggtggataacgtggagtgtgccgatatatggaagagtaacgtggacaaaagggtgtacacgcaacgttggttggagccgggggatgttgccccgttgaagtcgatcaaggatcgttatcaagtgacgcgtcctacttcccgttttgttcaaaaaaatcgtctagtgaattgtaattctctttctttaggttacgagtttgatcctcacttgattaatcgaattggttttagtcggatgaaacttcagttgaatatgaatgagattgcttacacgtcttcggtaaaacgggaacgaggtttatcttacccgtttgcgagaacatttaattttaccttgaatgcaactttttaaagggatttagttatgaaaagaacatggaataaaatatgtgcagggatcatagcttgtgtcacgtgttggtcttgtaatgattggttggacgtggattccagtacaaccgtgactcaggagcagttatacgggagttacgaggggttccggacagcgataaacgggttgtattatttgattagtcaacaggatttgtacgggcgtgatttgacatggggtgcagccagcgtgttggggcagaattatgacaacaaagaggttaatgctcgttattgggatctgacaagttatacctacggtacttcgagtgcaaataaaataacagatccgatatggaagcgggcgtttaacgtgattgcaaattgtaataatttgatacagcaggtagaaacgaaggatacaacgtttttcccttacgggaaagtggaacgggatttagtgttgggagaagctttggggatgcgtgcgttgatgcattttgagatcatgaggttgtatgccccggcccccgtgcaggatgatggcaagcggtatattccttacgtgacgagttatcctcttcattttccggagaaagagactgttgattacgtgatggggaggattatcgaggatttggaagcagcaaagacatgtttggcatatcatgatacgttgtataatgtgtcagctgttaaaagtgtggaagccaggattaaagcgaatatgtcgacggtgaaaggcgggttgttttttaacgggcgcgctacgcggatgaattattttgccgcttcggctttgttagcccgggcatatttgtggaatggggataaggtgaacgctttgcggtgtgctaatgatgtttatgcctacggaccggatggtttgtccgggaagaattggttctttttcacgaaagtaaccgatatgggggaagctagtactaaaaatgatgtgtatcgtaagatgtatgaggatattttgttcacggcggtaaatcaaaccgagtatgagttgttcgaggccgatcggggaccgggtagtttttattacttgaaaaatacggatttgctttttggagaagataaggatgattgtaggttgaaagtgttgattggcggtgattatacttctttgagatggcaaagcccggatgccttgacggataaggctaaagatgtaatcgcatatcaagggcctttggctccggtgattcgcttgagcgaggtgtatcatattatgtgtgaatgtttggctgatacggatttgtcccgtgcggtatcgattcttcaagctttaagagttgcccgtgaagcgaaaattcctttgaacgtaacgagtaaaaatgagttcttggaaatcttgtataatgatattatccgggagacattgtcggagggaggtagtttttatatgcacaagcgtttgggacgggatatgtataatggggaggaagatccgattgatatgacggggcgctgggttgttcccgtaccggagagtgaaactgatatttaatgatagagtgtagagttatgaataagatatatgttattttccttgttttggtgtttttctcttgtagtgaagagaagattatgaggtataatgcaccggagaattatattcgctttacgagtacctatcgggattcggtaagggtgtcgtttgtcaattacccgacagaaaattcgtttgaggtaaagttaccggtagagattgcgggaagcgtactcgcttcggctttggattacgaggtggttgtggataaagatatgagtaccggtattgagggtactcacttttcgctggaacgagtgactttcggggccggtgttttttcagacacgttacggatgaagttgaatcgtacggcagatatgaaagaggatgagttccggattgttttgcgtttaaaagataatgggaatttcacggttattccttcggataatgattatgccattgtgcgagtaagtgataaaatgtctcaaccggattggtgggatcggggtatcgtgaatgattatttgggtacgtatagcgatgataaatatacgttatttattatcgttacgaatcaaacggacttgagtgaagcatcgccagcagagaaacgtgcttacgctttgcagtttaagtattggttggaagatcaggaaaaagctggtgtgacggaatataatgggattaaacttgcgggaattacagttccggtgagaggttaatgtttaattgtgaaaagtcatgaataaaattagttatattagtcttgcggccggggtattgatgctgaatggctgttacgaggataaagggcattatgattatactcccacgaatgggattactttagaggtgaatccgcagaataagacgtattatctgggagagcgttatttttattctcctaaagtgacatacgagcaagagggagattccgtgaatttcagttattggtgggagataatggataaaaaagaaggtgttgccgctgttgacacggcttgtgtcggtttcgatctggatttttatcctaacgcggaaaagagtgtaggggtgagaatgtgtgctatggatttgcgcacgaatgttgtgcattcttccgatgaggtgacgttgaccggacaggcggctttgagtcaaggctggttgattttgagcgagaaaagcggagagtcagctttgtcatatattcggccggaaatgacggatgataaaaagcgtttctatacggagtacccggatttgtacaagacactttacccggatgagagtttggggagtgggccgaagcggttgagacagatcatacataataatagtacggttgtggtcgtgattcaagagagtgggtcattgtatttgaacgggtcgtcttatattaaagagatgactgtagcccaggatttcgtgggagatgtacctgtcggattgaacgtgaaggatttcttttggggaaacggggtggattttttgttggatgagaatggaaatttgtattctagg

SEQ ID NO: 10808 - DNA, 1111 bp, Unknown
  gut microbiota DNA sequence
tgtagtttcctaaaattggtttactagatttgacattcaataaattgtaaaaaacattttctattctcttttctgttacaagtttacttcaaaaaaatgtaattcctgtaatagttttacttttttcttggcatccggggaattccccggatgccaagaaaacttggcgtcaatacatgaccctggcgaataactcttttttatcgcggtgtgcctggtcaggaactttcaacccgatagccatgtgtggtcttctcgtgttgtatatcccgataattctctccacttgcattctcgcctggtcgatatctctcaagaccatatcgtttaaccattcccgtttcaaaatcccgttcactctctcggcgataccgttatcgtaaggagagccatcttgtgtcacgctcacttgaataccgtgttctttcaaaatcccggtgtacagcgaggagcagtattgcccaccccgatccgagtgatgaacaagcttgtcgctaaagttggaaggcagcgtcgccaacgcccggcacaaggccttcacgggaccggacgagtccagtgtcgggtgaacttcccagcccgtgatccgccgggaataagcgtcggttaccagcgagaggtacacgaaaccggcactcgttgacaggtacgtgatgtcgctgacccatacctggttgggccgggtaactcgaaaccctttcaccaggttcgggaactggcgatgccacgcccgggaatccgtcgtgatcacccggtacttcttctgttttatcattaaatcgtgaaggtgaagcaaacgataaagccaatcccgaccgacgggcagaccgttagaccccagcatgttccacaatttattaaccccgaggttaggcatgtcacggcgaatatcctggacgatggaaagaacgtaacgctcgcgttcctcgcctccacgatcggcccggaggctcttgtaataagcctgcttgctgtagccaagggaattgcaaaggtgttccgtcacggctttacctccccgttctttctgtctctcgacaatcccgctaatagcatctcctcgtagtttttttttacatcaacgtgcaggcgttccctggctaactctagc

SEQ ID NO: 10809 - DNA, 7760 bp, Unknown
  gut microbiota DNA sequence
aagtcaattccaataggaaacctgttttctcttcccccatatacaccaatataaaagaaccgtctgccgcttccattcggcgtacctccctcaatcccaatgctttttcgtaaaaacaaatactcctatccaaatcaagtacattaaaattgaaatgatcaaatctactctttatttccattttttataaatttagaattaaaatttaaaatgtagaatgaaatgctttgtggttcaatttcacgaaacaaataccccgactttccgcatattcctgaaaagcgttcgccttatcgtatgcattatcaaaatgcatcggaacaaatgttcccacctgaaaacgatcaacgaactgctttgctcctagcatataatcttttcccaaacggggatcaactggaaacatcacgagatcgatccgacctacgtgtcgggagatcacgtcaagctcggagaaataagcattttccgcttccctaacctcctctcccgtcgattcctccttccaatgccagttattcaaatctcccgcatgaaagatcaacttcccgtccaaatgcaaaagaaaagagattcccaaatccgttgatccgaaagcttcaacttccaatatcccatctgaccatgtttctcccttatcaaaatagcaagcatcatccggccccgccaactggttttcaaggatatcttttgagaaaataaactgcacatccggacgttcttgtcgccaagtcaaaacctccgggttaaaatgatccgcatgtgaatgagaggatagtacgtacaaccgcccgggacgcttcaataactccccgtgtacaattccggtcaagtttttttcaaccgaatccctataataatctataatcaccgtaaatccctctcccaataaggcaaaaccgctatggtatatataaactaactccatcagattatatttcttctatatacgccaaaaaacaatcacaagttatctcttcttaaagatcaaatgctccataatcaacacggtaattacccccatcacgaaaccatttcccacgatcggtttgaacaaagaaggtatcaaatttaacacttcttccggggcaaacgataataacaaagcaaccattaacggtaatcccacgacgaccccactatcaaaatccgtgatcgccttctcccttaccaacatctgtaagccggcggccaattgcgtcgccatcaaatagagcaaaatcgcacccatcaccacacctggtatcgtcaccaacatacccacaacagaaggaaaaaaggcacacaaaatcaatccagccccggcaggtaacaaggtatagcgagaagcgcaccctgtggcagaaatcactcccggactcatggagtaatccacggggccaatcaccccgaacaatccagacaagacgttcgtcactcccacgatcccaacaccccgagttgtacgctgatccatgtgatcggcctgcaacatatgtccaacggcctgtattgaaccaagttcgttcactatcaaagctatataacaaaataagaatgccaaaatcgtccccgcctcaaaatccaacgggaagtttaaaacagtcgcttgttccggtattatcccggctcccgttgaaggcaacatcggaaaaccaaacaccccgtaatacaccaacacgccccccacaattccccataacaccgtggttgacttccatattccccgcaacaacttattcccaatcaccaaagccaacaccatcactagcgtgaaaaacaaattaaacaaggcatataccacgtctcccaacaccagtttcaagatcaccggtgtcagcgtgaacgcaatcaaaattaaaataaccgtaacgatacggggcgtaaacacgaattgcaactttcccaacaacccgctatatgccagcacggtcagaactagaccacccaccataatacccgtgtaaacagccggaatccccgacgacacagtagacagaatcccaatcaacaataccgatgccggtccgataatcagcggcaaccgatgtccccacagcacctgtacaatcatcgctatccccatgatcccgaacaatttttgcaaataaaatgtctgttctgccacatccgtgtaatgaagttgcgacacgataattcccataatcaccacacaaggaagggagacaatccaccactgcaacccgtacatcaacatgggtaaaatccccggcttatcattcaactcgtatttcatatccttcgaattttagtatgtaaaaatagcacttacagattcctattcaaaaaaaacgagaacatttaaaatattattatttctcattcgtctacaataatagaaagctagccaataaatttaaaacaaacaaagccatgaaacgctatcaaaaaaacaatgctcaaaaacttcgaaatattacttccttacattcttcttctgggaattctagtattacttgcaatatccgtatctttgttgcaagatttcacgaagatatatcaaattacacgacatactaaaataaacatcatgaggaattttagacaaaacagcgaggtatttcaagacatgagacgcaagtatttctacaaaaatccgtatgtttgtgagtaaagtcttaaccatttaaacaacacgacacatggacgatcagcaaaaagatcaggaagtatttcgccaaaacctgaacgagaaaggaagtttccaaactctattccaaatatacctgctatttacccaaaaaggcacacgccccgacgggaaggaggttcaaaaagtattactatccaaattcgaaaaggtggatatcgtagccaacgtgaaggattccctctccacttttgctatctggaaatacatcgtggaatacaaagataatcaacgactgcccgcacaagtattgatgtccgacttcgaaaacttcgacggaaacaatgtagacctgatgcaacgcagtcagctatgggattgcccggaaaaagacgagattctctccaattgcaaatataaaatcatgctttccgacttcatggcttccggtcttccctataaagaacgttgtgccatgttaacggaatggctggaaactaccctcgaactatttccggactgtattgccgtgtggactccctcaagcggcaaactgctaacccgtgaacaggttttaaacaacccgtgggccgctcccgcacgattccttcatttcgggatgaatatccgttttttcaacatacaaaacacaaacgacatgatggtggacacgctcggactatacgctatcggtttacccgatgtccagtaccatttccacgatctgaatccaaacgccgtagttaaccatgcctacaacgccgcagcatacattttcgacacggacgcttctatcaaggacggggaaaccattgacgggatctcggaacaaggtattgaccgcagcatacaatggaaatgccaatacgaacaatcccttatccaacccgaccgggaagtcatggacatctgtcccggacaatacgcagcaggtagaagggaataatccgaacatctatcaaaaatactcgtaaaagacgacaacaatcaaaaacaaaaaacacatgaaagtaatagcaatcaacggaagtccccatccacaggggaacaccttccatactttaaaaaccattggtgaagaattaaaaaaagaaaacatagagtttgaaatactccaaattgggagccagaatattcacgggtgcatgggatgcaatatgtgtttccggaacaaaaacgagaaatgcgtaatcacaaccgactcattcaacgaactactacaaaagatcaaagacgttgacggcattatcctaggttcacccgttcatttttccggtatcgccggaaccatgaaatgctttctcgaccgggcattctacgtttccggggctaacggcaactggttccgtcacaaggtcggtgcagcaattgttgccgttcgtcgttcaggaggttcccacacacttgacggcttgtatcattatctcacgtactctgaaatgcttattccctcatctaattactggaacatcatccacgggttgaaagccggagaggccattcaagatgcagaagggaaccaaatcatgcgagtacttgggaaaaatatggtatggctactgaaaatgagagaacaaacaaaaaatacacttgcagccccgaaaacagaaaccaaaataatgacaaactttatccggtaaacgtaaacatacgtatctctttcgcagagaaatcatactttatcatgaaagaaaataaatacaacgacgagaaatttttcaatcaatatagtcaaatgccccgttccgtggatggcctaaaaggagccggggaatggcacgtattacaaaaaatgctcccgaacttccaagggaaacgagtattggatttaggctgtggtttcgggtggcattgtcgatatgctattgaacatggcgcagttcacgtcttgggaattgatctttcacacaaaatgttagaagaagccaccaaacgaaacaactctcctcgcatcgaatacaaatgcatggcgatcgaagactttgattacacgccagagagttatgacattgtcatcagctctcttacctttcattatttggaattatttccggatatttgcgaaaaggtacaccgatgcctcactcccgggggaacctttgttttctctgtcgaacatcccgtgtttacagcttacggtaatcaagactggtactatgacgaccaaagaaacatactccactggccggtagaccgctatttctcggaaggaaaacgagaggccaatttcttgggcgaaaacgtgaccaaattccacaaaacactaactacctatgtaaatggacttatccaaaacggtttcgaaattaccggattcgtggaaccagaaccggataaaactcttctggattccattccgggtatgcgtgacgagctacgacgtcccatgatgttaatcatcgccgctatcaagaaataataaacttaataacgatacacaacataataatgcctatctcccgatcccgctattgataatatgaacaaaccgatagcgagtaaaataactacgccaataaaaaaaacggaagaagcaatgagcgaaaccgatcccaaaagaaataaaatagagacaacagaggctctccagaaatgccggattataaagtagttcatcacaatctgcacgccctgagccaccaagaatccacaaattaaatacccacccatgtccacatcagccaagtaaaaaataatcgccaaaatgaccgcaacgacataggaataaacacccacgctcaaattatacccagattcataacaaacctcacgaataacttgaagatttaatagaagttgatttaacaagacaaaaccatacagaaaaaagttgacaaccgtccaaagccaaccgacctcatcaggaaagcagaaccacggtaagccattgtaaccgaagaaaaaaataagttccataacaccgattgctgcaagtccgagactccccacaatccattttatctccagagaatcacgaaacatccatcgaaccagcaaagtaaaacataacgtcaatagaatcagtaaaggcaaataactaatcggtccctgtttaaacaatccccataatccactaaaaaagtcttctgcagattgttgtttcgttcccctaagcggcataatatactttttactgacataggcctgttttccatcaaactccacttgtgcccatgtaccctccattttcaacacgtggaccgtatctttagaagctaattttccaatcacgtcaaactcggttcccgcaccggaacgaacataaagattaccacgtgaaaccacccggtaatcttgggcatccacaactaatgaaaaaaatatacagagtaataaaaaacaatatttcataatgatcccccaatttattcactaaacgccaaataaatatttacaaatatatgaattttaacgaaatctcgtgttttgctaacgtaatttatcacaaacatcaggagggatgcatgaaacagaatgaataaaaaaacaggttcatgttttgaacctgtctcaacacaaaaaacacctaattctaatacaaatacaacttacgaagtttctccacgtccacccccaactgctgcactaaaaacttatccattccgccataattctcgtctatcgtggttaatgccatttcgatatactctttttgcacggaactaatataatacatacattctgccatcttattatccccgtaaagagccttcatcgcctccatggtcacacctgtcaactcgtttgtcagcatatagtcttcaattatcgtttcccgctcaacacccaaagctgccaaaaacaaggctgccgcaaatccggcccgatcctttccagccgtgcaatggaacatcaacggggtcctgtccgtctccatcaacatttcgaaaaaagatttatattctgcctgaaagctgataacaaactcccggttcccggccaccagatattgtttagccccctccacatcccctcttctgataacatccgcaacatcaatggaagacaaatttccgggttcgatcggataattaatacaattcacagttgtcgtgggaaccttatccggttctgccttttgttcgctacttgaacggaaatcgatcacagtctttaaggggatcgttgccaaatacgctaaatcatcttccgtgaggctgttacattttcctgaacggaacactaatctccacttcacccggcgtccatctttcgttttataacctcccagatcccggaaattagactgtcccaccatcggcaattgtcttaatcccaaggccgttctagctccaccggcccattccaagcaatagagctgatattttcccgtgttcaattccgtcgttcccttcgtatttccttgtaacaaaggttcatcaaaaagaatagaattactattttccccgccatacactttccactccccctctttcaatatctcgatattggtctttttagactctttatcggcttttattgtcgcataagaacttatatccgtccccgaatacaaactcgtatcaattgaatcatcctccgaacaggccaccactccaatcaacatggcagaaacaaaacaccacttactcattcttaataaatactctttcataatcttttttcttttcatttgacgccacaaagaaaagcttgtaatattaccgaacgatgacattcttgtgaaagaacgattacaactatttatcctcattcccttgtattataccccagaataacgtaattttaccatatgatcatcagtgcaagcagaagaacagacatcccttcattctactcaacatggttttttaaccgtgtccgggagaaacacgttcttgtcccgaaccccttcaacccgaaacaaatcagccgggtcaaactaacaccggacgtggtggactgtattgtattttggaccaaaaatccggctccgatgctcgataaacttaaccatctaaaagatttcaaatattactttcaattcacacttaacgcttacgggaaagaaattgcaaccaatctaccctctttcggacaaagaatagacaccttcaaacgcctctcagacctcattggtaaagagagggttatctggcgttatgacccgatcttgacaaacgaaacctataacactgattttcacaaaactactttcttcaaaattgct

SEQ ID NO: 10810 - DNA, 20792 bp, Unknown
  gut microbiota DNA sequence
acgaacagagggtaaatttaattctgacattggtttactaagtttactgtaaacttttttcaggacaatacattatggttgctctaccctttccctgtatcatgaacatagcatgtacatagtaactacataacatgaatactgacgggtgtacatgctccgttcttgttatgtaggcatttcgttgttgtctgcgggcagggatagggcagggattaacaggaggtaggccttccccgtgtaaggggaatttgtaacaggtatacccatgggtacggtaaacttgtatataggttcttaaataaattttattttttgaactactcgttttatttcttctcctgtctttcatatataactgatggaatagttatatatgaaaatttgaaattttatttataaagtgttcttctgtagtttaataagtgtattaaccttaaaacataaagttatgaaaaaaagtattttgttattgtgcattgtatgcatggggtatgtaatgaatgcagcagaattaaaacttcaattttttgataaaagttggaggccggttctttttgtgaaatgcgaagtgatacatatggtaacaggtgtgaccgtgaggttttttgatttgggagggtataatgtaactacgatttcaggattaactgaaggtcaaagctatatggtgagatatttgcaatacggttatgctgatgattggctagaatcaataattagaatttctagtccgagtacaaaggtatcattaatttttccgactgatggtattatcgtgactccgaatttgttggatacggattgtcatcaaattagagcagatgatagtacaaatgatattttagtgttgataagagataaaatttttactggtattttaaatgaggagcgattttattctaaaatagcgtaatgtatttttacagaagaacattttttattttagagaatatgggaataatgaaaataatagcacggtacgaatggcgacttctgggacgaagtcagattttttggtttgttgggtgtatttcattcattagtgtgattttgttgcactttttttttcagagtaatttcgtgtttgaaagtccttggcctttggtcggtttgccttgtgctgtaccttttttatgcgcttattttttaaattttgctcagcttttttttgtcttattcgtgacaggaaatttttggtatgatgatcggagggtggattccacgagtgtattactggttcggccagaaggaaatggggaatatgtgttgggaaagttgctcggaactttggggcgagtcgtgtgttttgatgggattgttctattaatggctattttgattcatgtttttgctagttcggcaccttttgatttatattattattttttttatctgtttattttgttattgccatcgttattttttttgttagggatggtattttttatcaagagcttgatcagaatacaagggattgctttgattttgttgattggtattttttcaattcttttttatctatcgggaaaagaattgtggatattcgattttatggggcattatattcccaatgtattttcggaagtgacgggagggcgtgagcaaggtttctttctagttcagcgtttgtatatttttttggttggtttgagtttgtgtacgttatctgttgcaaatatggaacgtttgccaaactggaattattgtcaccgaaagatgtatgttgccggaggaattttcggaggactagctttgttggccgtaatcggtgttttttgttcttttcatgagaatattaaaacccgttctttttatagtgcttgtcaggagaagtacgagaagactccagaggttcgtgtcgtgagtcatgatattgaattaagacgtgcaggtgattcgttatatatgaaaagtcatttggtgttggtgaatgaaggaaaatatccttgttcgacatttactttttatttgaatcccggtttgagagtcgattcgttgtgggaaggttgtcaacaggttgctttcttgcgagaaggacagattctttcgatagatcgaagattatgtgcaggggatagtgtatctcttcagttggagtatagtgggaagatagacgaacggatatgttatctggatgtggcagatgatgtttatagttcttttaaggtgtttccggggggacttccgtataggttcgcccgatgttacgcatatgttggagatgattttatgttgctgacacccgagagtatttggtatccggtgacttctcctccggtggtaacgtcacgggatgttgttatgagggggatgtattttacacggtatacgttgcgggtcgtgggagagaaagatcgggtggtcatttctcaaggtaagtgtttgcgggaaaaggattcccgattatttgatgcgggacatgctttgcctgccttgtcggtttgcatgggaaactacgagcgcaagtatttgaaggatgctgggactctttatgaaatctattgttttaaaggccatgattttttttccgctcatttcaagggaaagaaagctgtgcgggaaatgattgattttcaaaaatataataatcttggtttacggggaggtgaattgcctctggagcgattggcattggtcgagacaccgttttctttttatgcatacagtcggttgggccagctcgggagtgaatatgtccaacctgaaattctcttttatccggaatggggcgttgagttagaatattttaatatagagaacatgaagaggagagataaaaatgaaccgtggtatgatgaaacggagtgtgaaatgaatgtattgaatacgttggtcggtcttggtttagtttgcgatataagaggtgaacgtgttcataatatgattttaagtcaaatgaattataaatataatacacgagagtttgttgctaataagcgtagttgtcttcctttgttttttacgtatgtgaattttatcaagagtgattcttttcctgcgtttaatactgttttgtatatgataaggggagataataacgaggacgttgaatcaggagtatttgagcaaggtgggtattccccagccgtttcttatttatcggaaaatagcttgtcggaagctattcaagatagtctgttgagttatgatgtattatttgaagttttgcgtttgaagtctcgtgaattgaaagagtatattctggctcatgtagcccaagatgaatttatagacttttttgaagatttttttagaaagactcgttaccagaatgtcgattacgaggtgtttaactatgaattaaaaaacaggtttgggattgatttgggaaattatgtgcgaaaatggtatcatacaaaagaaattcctttattttctgtaaatgagattggcgtggagtctgatatcgagaatggagtattttacctgaatggcaaggtttggaaccgttcgaatgtggatggcgtgattaccgtgtattttcgtgttggtcgagctggaaatttttttaatgaaattcggaggttggttgtgccgggaggtacgtgtgagcgaatccgattcgcatattcccatgagttggaggaggtgaatggctcgtgcaaagtggttgtcgcgacaaatttttctttgaatgttccgaagatttacgagtggaaagcgaaagttgaggatattggaacgacgagagatacgactatcggtttgttcaagcttgaagattcctgtagagctgtgaatatgtatgaatatgtcgtggataaccgtgatctgggatttcgtttgtatgagaagggcatgaaaccttttgctttgagggttttccggggggaaaaggattatcttggtttgctatcgggagaaatcgtgtcgagttggcagtctgttgcgtttaaagagttctatggggatgctttgcgtgatgctcactatcgcacggctaccggaaatggagcttgtgcggaatggaacgtgtttttgccggaggcggggtgctatgaagttttcgtgtataatgtaccggaatttgctcgtcaggcgatgatctttgcggagatgggaagtaattttttgcagcgttacgtgatttatcatgagaagggaatgtctgattttgaattgctctcgggtgaaaaagcaaatgggtgggtatccgtaggtaaatattatttcccagcaggggatgcaaaagttgtactttcagataagggaggtttcccggggcagtatatttttgccgatgcgatgaaatgggttcgggtttccggagatttatgaatgtaggtttttggaaaattttttcttgtttttcttatttgagagccacccgttttttagaggaacctgtcttatgaatgaaaagataaaataatgaacgagaatatagatgatatattgataaagcgacttgccggagaggtgttatcccgggaagaaaaagcgtgtttcgatgagtggattggagaacaggatcatgaggcgtactacgtggagctgataaagattcgttcgggcatcatcgcttctcgagttaaggagagaatcgataaggaaaaggcgtggaataaagttcgtcccgtacgtaaaatatctcgaatgcggatactgctgaaatacgtggctattatgatcttaccgttgagtctcggattcttccttctcacccgagaaaataaaccggaaaaagtagtttacgctgaagcgcccgtgcaaccgggtaaaaagcaagccgtgttaaccttatcttccgggcagcaagtaatgcttgcggacacggttgttcgtgtgaacgagaaagggatggtgatttcgaatcttccggataaagaattggtttataaaatcatgaatgataccatgaaaacagagactgtttataacatggtcacggttcctcgtgggggtgagtataagctggtgttggctgatggtacaatcgtttggttaaactctgatagccacattcgttatccggtaacattttcaggtgatactcgacaggtcgaattagagggggaagcgtatttcgaggtggctaaagataaggagaagcctttcatcgtgcgaatgaacgagtataacgtgcgagtgactgggactcaatttaacgtgcggaattactcgaatgaaaatttggcaacgacgctagttgaagggagagtgcagatagagagaaaagggagggtggacagattgcgaccgggacaacaagctattttggaaaataatgaaatacggatacggacggtgaatgtgaatgaacaagtggcttggaggcatggggcgtttggtttcacgcagtgtcgtttggaaaatatcatggaagaacttgcccgttggtatgatgttgatgtgttttacatgaatcaacaagtaaaaaattatcatttctcagcctggtttaaacgaagttcttcgataaacgaggtgatcaatatactagaaaaaacaaagaaaataagtttagatcttaaaggacgaattctcacggtaaaagatataagcagaaattaaagataaaacaggaagcttgcgccaacatgcttcctgtctgaaaactcctcgccaaaggaattttaatgttaaacttgaaaaacaaagttatgaattttttatgtagaaacctaatctggattatgattaaaatcaagctggtatttctggtattgattttgggcttttctagtttaaatgcgaaagtgtggtcgcagcaagatcgaattgatctggtgtttgagaacatgaatatggttcagctttttgaacagattcagcaaaggaccaacctgaaattcgtgtttaaccatgaagatgtccaaaagtataccgttagtggaaaagtacattacaagaccgtttcggaaattctcgatcttgttttcgtggacaaacctttgcgatatgaaattacaagtgatcatgtcgtgatcttttacgccgagcaacaagatgacgagaagaaagtagccgggattaaagtgaaaggtacggttacggacgaggaaggtattccgctaccgggcgtcacggtaatgattaagtggacaaccataggaacggcaacggatatcgatggaaagtttaatttggaagtacctcaggcggacacaacgaaattgattttcactttcgtggggatgcagaattatgagttgagattatctaagaaaaagacggagtataatatcgtgatgaagtctgatacgaaggctctggatgatgttgtcgttaccggtatattcacgaagaaaaaaaatagttttactggagcagtaaaaagtatgacggtagaagagattaaggcaatatctccgactaatattgttagtgcgatttctatgttaactccaggattgagacttattgaaaataatcaggcaggatctaatccgaatcgtttgccggaagttgttattcgtggaacttcttcgttatccacggaggcggatcaatcagcaaatcagccgttgattattcttgatggagtggagatctctatgcgagatttgtatgatattgatgttaatgatattgaacgtgtggatgttttgaaagatgcctcggcaacagccatgtatggagaacgagctgccaatggagttattgtaattgaacgtaaacgggtcttgaatgatcaattgcggttaacttataatttggaaggttctttagatgtgcctgatttgaagtcatacgattatttgaatgccgaagataaattggaatttgaacgtttggcgggattgtataatttcgagacaatgcagggatttgaggagtataatcgaaagaaaatattgattgctaaagggatggatacggattggatgtcacagccgttgcgttccggttttataataaataattcgataggggttagcggacgcggtagtggcatgacttatcggatgaatgctaatgtgagaaacgtgaggggtgttatgaaaaaagattatcgtaacacggttggattagcgatgtatctttcttatcatgttgataataaagttacagtttcttttcaatctcaatattctagtgtaaaatggaaggaaagtccttttggtaatttttccgattacgtgatcatgaatccttatgatgcgccttatgatgaatatggaaaaattattaaaacgctctcttgggatatggcaaatccattgtttgaggcgcaatgcgggaattataataaggggaattctcattctttcacgaatacgttatctttccgttgggacgtggtgcctggtttttttatcaacggttcgggaacaattctttcttctaatgaagcaaaagaaggtttcatatcaccggaatctaatgattttatcggtgttgtccgggaggagcgaggatcacttgatatgacaaagactaaaacattggagtatacggggagtttgaattttaattatagtaaaagtttcggagataatactttgttgactttgaatgctggtggggaggttaataaaagggaagatattgaagatggttatcaggctatcgggttttataagcctaatttgaatgctcctaattttgcagccaaatatccagaggcttctcgtccttctgccagagaagatatcagtactcgtttaggggtttatggcggattgaattttatcatgaggaataaatatttcgtggatggttcgttccgacgttccggttcgtcaaagtttggagagaataataaatatgctcctttttggtcggtaggtgccggttggaatattcataatgaatggtttatgaaacgtttcggttgggtgaatacgtttcggttaagatattcttacggggttaccggtgaggttaaattcgctccctatcaagcggtgacaacttatttttatcatggcgataattattacctgcatgggatgggaactttacctaaaactatggggaatgaagatttaacatggcagtccacgggcatgcataatcttggtttgaatctgagtatgtggaacgggcgtttggatttgaccttggatgcctatatcaagacaacggaagatatgctgattgatatgagtgttcctccttccgtcggagagagtaccgtaatgaataacttgggacgtatgaggaataaagggattgagtttgatgtgaccgggcttattgttaatacgaaaaattggcgtttcagtcttaaagtgaatggggctcataacacgaataagattttggcaattagtaatgccttgttaaagtataataacgagatgagtacggataaatcggtcgcacctaaagtgttgtatcaggagggagagtcggaaacggcaatttacgctgttcgttcggcaggtattaatccggcgacgggagaagaggtttttatcaagaaaaatggtgcgtatactttggtgtatgattcaaacgataaggtggttgtaggggatgaaactcctgtattggaaggagctatactgccaatgctttcttataaaggttggtcgttgaatttgagtatgatgtaccgctttggaggccaggtatataatcttacccgtgcgataaatgtggaaaatgtgaatcctcgacataatgtggatcgtcgtgcttttgacgagcgttggaaaaaggtaaatgatattccgccttatttggatatcgcaaatgctgattctcgcacctcgattcatacaagtcgttttgtagaagatgataatacattggaggtaaagacaataaccgtggcatatgagtttaatccggaattgctaaaatccattgggtttaaacggttgcgcgtgagtgtcgggatgaacgatcctttccgtttgtcgacgattaaatatgaacgtggaacgagttacccgtttagccgtggatttgtgttctccattagtcccactttttaatgtaacagagatatgaaaaagataaaatatttgatacttgttctgttcggtttttgttcctgcgatagttttttggaggttaatccgacgggagagatcgtgaatgataagttgtttgaaacggccgaaggttttgaagaggctctttacgggagttattcttttctcgcgagagaaccgttatatggtcaaaacttgagttattatattatggatattgccggtcaatatttttataatgattggagttctcattggagtcgtcatttatgcacgtatgattataaacacatggatcttcgtccaaaattagatacggtatggacgaccatgtataaggggatttcatacgtgaataatattttgggcaatttatcgaaaaaagattcaacgacttttcgtttgtatgatttatataaaggggaggctttggggttacgtgctttcatgcattttgaacttttacgattatatgcggaaagttatttaaaagctccgaatatgcgggggattccttattatgagaaatattcttatgaagttgctccttttgaaacggtaaaagatgcctatgagaaagttattcgggattttaaagaagccgaacgcttgttgacgaagcacggggagtattttgatcgaaaagatgaactggcaggaggatttgttttagatcgagtgatacacatgaatttgtatgctgttcaagctttattagcaagagtttattgggagatgggggatttggaaaaagcaaaagattatgcattgagcgtgattaattgtggcttctttaaactggaagagaaaaccgatgttgaagatatcatgaatggagttatctcgaacaaggagacaatatggggaatttattcagaggaatttccaacttttactcgacgtaccatgtatgcgtcgggcggagattacagtttgaatgttaaaagtggttatgaggatatttataatgaagataaagaagggttcgattatagacaggataagtggtttcaggttcttggtgattacgaagctaccggtttaagatgtatgaagattgttgaccgttataaagtaaaattagcaagcaggcctgttgctaaattaagcgggttgaacatgatcagattacccgagttacattatatagttgcagaatattatttgcgtgtagatgatcaggataatgcaaccaaatactttgatcccgtgttacggtcaaggggattgaatggttttgcaggtcgtgaaggtatgaagcttaatttgaagcatataaataatgaacgtcgtaaagaacttgtttgtgaaggacagtggtttttcatgatgaagcattatgaaatgacggcctatgataacataactgatcagactttccaaccttcgtcggcaatttacgtgtggccgattccggatagtgaatttgagtatagagattaatttggttgattatgagaaaatatttattgtatatcgttatcttatggtgttcttgcacgttattttcgtgtacgaatgatgattaccaggtatataatgccgaacaggtaaataagatgtattttgatagagatacttttactttcgtttatggtcctcgggaagataaggagtgtgatttggaaatcccgattagtttgatcgggttggctaacctggagcgggatgcagaatttaaggtaagcattgatacccgtaattctaccgcaaagttaggagtccattttaatatggatgagattcaatattttaagaaagattcagtgagggggacaataaaaattgattttattcgttctgctttaattcgggatatgcaatataaattgtatttacatcttgaagcgaatgatgagtatgttccaacgaataaaacgatgtgtaccgtacttttcggtgatattactttggcacaacccaaatggtggatgccggatagattgggtacttatacacaagagaaatttgtactcttctttaaatattttagggagacagaggatattgttccggcattgtattcggctatcgtgaataactggggagaatatctcgatgatgagagttattggcgtttcccgtggttgttgacgacttacacgtacgtgggttattttaaacagtatgtctataccccgatgtacgagtactttttagaaacaggagatgaacgttacagattaccgaaccctttaacgacagattatgaataaaataaagtatattgtcggcatgttaatcatgctgtacgtgatgcaggcttgctatgatgacaactcatctttggcggatcaacctattattgaagtaggtataaatagtggaacaagagattcaatagatatttattttaatgatactttgaagatcaatcccgaattggagattagtcgttcgacggaattgacttatcaatggagtatgggtgtttttaaagcagattccaccacggtgtataaggaaatatcaacggaaaaagatttgaagtatattgtcagagaattaggacatttccacttgagacaggttgtaacaagcgaggatggaagtacgatcagatattatcacgtgtttgtgaattctccttttgaagagggttttacgattttgggacgccgtcctgacgggaaagggagtctcgcatttatgaagaccttgactaaaaacgaagaggcttcggggatgcgcccggagtttattcagaatgcttttgtttttgcaaatgagggtaaagaactttatctcgatcctgtagattgtgataaagtagagcagagtttgtacatcttgcatggagaagggcaaaaattggtacaaatagatgctaaaacctttaaggtacttatggaatatgactttaggtattacgatgcaaattttattccgacacgtttgatgtgttacgatggtcgattcagtcgggaattttatgttccctcaaaaaatgggggtgtggcacaagtgcaaaccgtggaacagtatatatttccttatcctgatctacccaaggaaaagggtattatatatacagatgcaaatgatcgtccgagttatttttctagttgtagtaaagtgtatatcgggtctacaccgggaaaagaaaggaatgtggtatgttttagcggggcgaatgcagatcgggaaataacgatgcgtaattgttatgattactttgagaatcgttacgtgatgcatatctttcagaatgaagagacggatggtaataacgtttacgtgattaataaagacgggggacaattgaaggtaacggggatacaccgaatgatgtataattttaacgagggaacagctccttgggtgttatttgaacgcgtgctagatcgaccggaaattattactgaagctacacgttttctggtgaacgattattatacatgtgtgtttttttctcataaaaatgaagtttacaaatggttttatactcagttgaacttacctgcaactccttttataacgttgcctgaaggggaggagattcgttgtttgaatcattaccaaagaaattgcggagatgaggattatcaagattattccgtgcagaaagaggtttatgtcgcttcttataacccgaatagagcgggggaatataaaggatcattatatgtttataatgcggatacgggagagcttgtgaataaatacgaggggatttctcacgaacctgttgcgatgttttacaagattaaatgataaacttccaaattatgaaaaaacagaatatactatatttcatgataattagcatgttgttgacttggatgttttcagcatgtagagattatacatttgagaatataccagacccggttgttcccgaagatttgaccccgggattaaaacttacaacggatgttgtgcttgttgatgcaacggcagccccccgaggttttgaattacgtgcgattggtgggaaatggacaatagagccggaaaaacaagaatcttggttaaaaaagttggaaccgacctccggggatgaaggtaatgctgttattggaataacattagagcgaaatgatgggatggaagagcgttcggtaaaattaattatccgacaagagcaaacgggggtgatcgacacggttttagtacgtcaatttactcatgaatcaaaatatacacgagaaacggatagtttgtctttgattgtgttgtatgaggaattgaacgtggagaactggagaaatccgtggaatctgaaacaaccgattaccggatggagcgggcttacttttgacgaagtaaacggagagcaacgagtggtaggaattacttttaatgattggcagatgcaaggagaacttccgaacgaaatcggaaatttaagagaattgaaacgtataaaaatgtcagggaatagccttaccggtagagtgcctaacgggcttgtaaatctgcgtaaattggaaactttggatatttctttttcggagaatgtgagttggttcttacctgaaaatatgtctgatttgaagtctttaaaagagtttaaagttggaggccttaatattcatctaacctcttttaatcgtctttataaagtggaaactttagaagcgatatctattacttcgtctactattcaaggtaaattgccggatgggatttcaagtttgacaaaactgaaaaacttaaatcttggagggacaaggataacaagtttaccttcggatattacaactctatcggaattggtggttttgaatataggtagatgctccaaattgacatctttgcctgaaaatattggagatttgtctcaattggaacaacttgatatgaataattcgggtgtggaaattttaccggaaggatttggacgattaactggactaaaatcattaaatatttcctattgcggtgcattgaaaacattgtctcaggatttcggaaatttgagaaatatgacgtcatttaatatggtttcttgtgcggctctggaaagtttgccggaaagttttggtgatttgattcagttgaccactctatctcttagtcgttgtgaatctttagttagtttaccagagagtattggtaaacttaccggtttgacttctttggatttgtctaattgtaaatcattacaaactttaccatcctctattagtaaattgagtaatatcaaggaattatctatgagttcttgtgcgtctctttcctctttgcctgagaccgtggctgatatgaaatggttgaaaaaaattgtactaacaaatacttccctgacgtctcttcctgcctttttcagtcaaatgacttcattggaggaacttgatattactggtccttaccaaggtgggggaatgcagggagatgctgcaactttatttgccgggatgactggattgaagaaattgagtgcggactataatagtttttccggtgaccttgcttggataaagaatttgcccaatttagaagttttgaaaatgaataaaaaccaactttcagggaacattgattttactaattttggtagtaaactcacagagatttctttagctgagaatttattgacaggaacattaaaaggcattggtaatttgactgcggtaaaaaaattggatttaaataaaaatcaactttcgggggcgttgccatccgaaatgggagcatgtaccgtgatgacaaatttgaatttgaaagataataatttgacgggaacaattccgattgaagtaactcaaatgatgcagcttacttggggtggtttagggctttccggtaatcaaatgtcgggagagattccttcagaagtgctttcgtggagtaaatggagtagtcttagtcctacttggaatatttatccgcaacaagaggggtatggatttacgaatattccgtagtttgacaatttgttgttagtgtgttgttttatttaagaagaaggcttttacaaccttcttcttaaattataaataaagtatcggcatgaaaataatagttattggattattcttgattattttgtttggatgtaaacaagcttctgtgcagttcatgggggagatcgagaaacaatggaagagcgatagtgttgaagttgtgctgtgtggtgcccggcgtggagaacgtttgttcgtagctcctattcgtgaggatggaacatttcttttatccggaaatatctcatctaataaacttgtgtttattaatttcccgaaggattacatgcgaattcctgtttatgtggagaagaatcattacattcttgttgagtcggaggataagtattacgcactttcggagaagccatcgttacagaatcaatatgtggaatttcagaaagaactggatgtgttgaatcgggattacgaagtggtgtgtcaagggtatgatacaattacagatattcatcggaaagcggcacgttccgaactgttagacaaaaagtttacgaagaaaaacgagcttgtaatagagggcatccggaaatttgccgggacggaaatagcgcaaaatctgatatatgaaattcttttttattgcgaggtggattttagattctttactcgggcaattgaagctttaggggatagtattcctaatagtggaatgaaaacaaaaatttttgacacatataatagaataaaagcaaaacagttgatcgggcaggctcctgattttgaattacccgatgtgaaaggacggaaagttaacttgactgattttcgaggaaaacatgtgcttttagacttttgggcgtcttggtgtgctccctgtaggaaaaaaaataaggaattgaatcaacaatatccggaattgcagaaaatgagcttggaagttatttctatttcgttggacaataaaagagagttttggttacaggccttaaaggaagatcaggttcaatggatacaggtaatagatgaaagcggattcgaacagagtcgtgtacgtgctgcatataaagtggagcaagttcccacggtctacctgattggaccggatggaaatattcttctgaagaatcctgaattacaagaaatctatgaaatcataaaacaaaagggggcatgagaacggtgtattgtattgtaagtatattactgttattacatatcgagggatgggcgcaacgggaagccattattctgaagaatgtaaatatcgtggatgtcgtggaaggaagtattcacaaggggcaggatgttgtgatgaaaggaggaatcatacaagcgattggcaaagatgtcgggacaggtatcgcgggagaggtgaaggatttggcgggaatgtacgtgatgccgggattgattgatgctcacgtgcatatcgcgaatgatccgaaagagacgcaggacgatcgagccaaacacttgaaatatttcttgcgtcatgggattacttctatccgggatgcggcgggtgatgcccgtgtgttacgggaattgaaagagggggttcagcggaggaagtacgaggggccggatatatattatgccgcttttatggcgggacctgcttattttgaggggaatgaccgggagaaaagtatggtggaaggttggccggaaccttatgctccttggatgcaatgtatccgtccggattctgatttggatcaagtcatgaaagaagcaaaagagtggggatgtacgggagtgaagatttatggcgggtttgatcgggaagcgttgttacctatcgtccgaaaagccaaggaacacggcctacaggtatggggacatgccactttgtttcccgctaaaccgtgggatgtggcggatgccggggtacaggtgatctctcatgcctatatgttggaatgggaaggggtatccgaggagttaagcggtaatatctttgaaaattacgagaaattttacgataagatcgatcatgagaagatgtccgtcgaacgttttttgcaggctgtaaaacagaaagggcttatttttgatcccactctatttttgtgtatggagaataagatggaatgggcggcccgattcgtgaaacgagcgaatcaaatcggggtaaagatttgtgcgggtaccgattatattaatgatttgaatcgtcctttcccttttctgtttgacgaacttgacctttacgtggagaaatgcggattttatccgatggaagctatatttacggtgaccaaggtcgcggctgaggctttaggtattggtgataaggttggaactgtcgaggtcggaaaacaggcagacttgttgatacttcccgagaatccgtatgatgacatcaaggcgttacggaagattcagatgattataaagcaggggcgaatattataatgagatattcttgtgtatttacttaatttaagtcttgtaattatgagaaataaaatttgttttttgatttattgttgtatctatttttaatgcgtgattgtatagtttttcttatggtccgttaaatagttctaatatcataaattgatatatgtgtcatataaaatagggaaatgaagtgaagattggtggataataattgtttattctgagtctcgaaacacccacaaaatatgtagaaatgaagaatatagtattagtaatgtatctttttttccttgcttcctgtgcctgttattatgaggatgtgcgtcgggaaggagaagtgttgaatcccacgtcttatgtttatgattttcctgagatggaagtgagactagtattggactcttgttttgctttatccacatcgcaatttccttttgatgctagggaaaatatcagatagggttaaaatctctttcgcatatttccggggaattgtttcaagaaccacctattttgtatttccgtaagagagacgagaagattttccctgtttcaatgaacttgaaatcatacgtgttaaaaaatcgtaaagggcatttcctagatgcgtatgcagagtatgtgttaagaattgattctgttgcattaaaaaaaaacaagagtaagtgttttattgcataaaaattacgtgagtataggaaggaaattgggactaaatcctatttcgttgggtataatggtagatcgtaacaaagatgtgccctcttgtacgattgaagagtacgagatattgaaatatataggtaataaattgggacaagaaggaatgccaccgattcattatcctaaggcgttaacgaaagaagagatattggaacattttcacgacggctcttctttaagtttccctttcacggagaaggatatttacgggtggtagtataagatgggttccctttgccgtttaataaagagaactatcatgttttggcgtggaatcttcataaaatatgtaagttctccgaaaacttatattcggagaacttcttccttctaaataaataacatctgtattttttattttttccctttacctctttttttcgatcggggggcggcatcaccccgccttcctcgtcggagtttgcgttccgggcgttggcggttgcctctggttttagaagaaaccacctttgccggggcggcggttgtggtgctttcacttcccacgagagcgaaatccagttggcgggcaaccagattggcctttgccactttcacgagtacctgatcacccagttggtagactttccggtgatgacggcccacgatgcagtagttttcttcgtcgaattcgtaataatccccctccagttcattaatagaaacaagtccttcgcatttggtgtcattcagttccacgtagaaaccccattgcgtcacgccggagatcgttcccatgaagttctcgcctagcttgtcgctcatgaactcgacttgcttatacttgatggaggctctttctgcgttagaggcgatctgttccatgtcggagcaatgtttgcacatctcttcatacttatcggcattggccgagcgtccaccgtcgagatagcgttgcagcaagcggtgggtcatcacgtccggataccgacggatcggtgacgtgaagtgcgaataatagtcgaaagccaacccgtagtgtcccacgttcaccgtcgagtagacggcttttgccatggtacggatagccagagtttcgatcatattctgttccgggcggtcctgcacgtcttccatcaatttgttcatggaagaggatatttgtcggggcgtactcgttcgtagacggtaaccgaatttggcgataaagcggctgaaatcttccagcttttcggtattcggttgctcgtgaatacgatatacaaatgttttggctttttggttttccttgactttcccgattttttccgctacttttttgttggctagaagcatgaattcctcgatcaacttgttggcctccttcgagcgtttgaagtacacgcccgtgggtttccccttctcatcaatatcaaagcgaacctcgatccggtcgaaagcgatggcgccattctggaaacgggcggcccgtagtttctgggccagattgttaagggttaatatctcttctttgtagtcgccctcgccgccctcgatcatggcttgtgcttcctcgtaagtgaaacggcggtttgacttgatgatcgttcgtccgaaccattgattgaccacctcggctttgtcattcaactcgaaaactgccgagaaacaaagtttttcctcgtcgggacgtagcgaacataacccattggacaggtgttccggtaacatcgggatcgtacgatccacgagatacacggatgtggcgcgggtgtaggcttccttgtccagcaccgagtccggggtcacgtagaaactgacatccgcgatatgtacgccgacctcgtaatgcccgtttttcaacttttggagcgagagggcatcgtcgaagtccttggcatccttcgggtcgatcgtgaatgtcgtgatttcccggaaatctctgcggttcttgatttcctctgccgggatggcatcttttatctttttagcagctttttctacgtttgtcgggaattgtacgggcagttcgtattccgccatgattgcgttcatttccgtgtcgttgtctcccggcgttccgagaacttccagcactttccccaccgggttcttctggttctccggccactcggtaatcttgacgatggctttttccccgtccttggcaccgttcaagtctgccaaggggataaatatatcgtaaggtaattgtttgcccgtgggaacgagaaaggcgtattgtttggagcattgtatgatgcccacgaatgtttctttcttgcgttcgaggatttccaccacttccccttcggggcgtcttttggaacttcgggcatagagtaacacttttaccttatcgccgtttaaggcgtgattcagaccgacttgcggaatgaaaacatcttctttgcagtcgtccgagatcaagtaggcagtaccttttgctgttaggtcgatgattccggtaacgtaaatggtgtttatcttgaatttaaaaaaaccggttgattcttctgtgagcatattgtcatttttcatctcgtagagaaccgtcatgatcaattgtttggcattcatgttcttgatgcctaatctttgagctagttgcttgtaattgaagctttgatcggggttaccggaaaatatatcgtataataatcggtgtaattctttcttaccgatgtctctcttgctttttttttctttctttggcataatctaaatcgtaaaatatcgggtgtgggcgctaaaagaacgcttgcccttcttaaatgaagttactaatgtactgttttattttcgtatttttatatataaagtttcaaaatctccgtttttctttccggtgagattttgggacgacttaaatggcttgtagggaaagatgttttgattctctttcgggtaatcatttaagatgttgttaattgtatggtttttaagtggttattctcaccgtttttaatggtgaaatatggta

SEQ ID NO: 10811 - DNA, 9392 bp, Unknown
  gut microbiota DNA sequence
tgacaattttgtcttgagattattaaaaacaaagaaaggaataaagggatatgctttcgtgaatgatagtttatcattgatttattcaggttttaactgatttgtttaacggtaaaatgtattgccatgaaaaagtttattgattagcgagtatcaaaaaatcgaggggaacatttattgttctcctcggtaatagcaataggacagttttttcttgaatctacaaacaatgaaacggtttacgaacttatggatgctaccgggtcaaagcggtgaaagtgtttgctcaaagagggaacggtagtttcctctcgctagggaacgggagaaggtctttcttttagcgtttcggaaacggggacgtacacgatagaggctggtttgcaggattatttcgtgctgatgacgggtagtgtgacggtggaccgtgacgagggcatccattatacctccacggagcctcacgtggtggagactatctaccccatatccattttaaagatggatcagcattgaatatagacggttcttggaagcatggaagtaaaatattaacaaacaaggaaatagaatttttgaaatgttatgaatggatattaccggattaataaacagagatgtttgcaaaagttagagtcttggtcaaaatttatgatccaaggacaacgctggaagttatatgatgacatacatgtagatgaagtaagtaaagtgtttcaagcacggaatcggtggtttcatggaggtctatttttgcttgattgtttatcaaagaaattagaccatgcatacgattgctttttgggaatacctttgcttgaggcagggtgtaaaacagatttgaatgacttgaatattgattacattaaaaaaaatttgcatgatatgacccctccttcattatatgtatttcccaaagagggtgttgaacatgatgagtggcttggagaatggatttttttggataaattaagttcttcaaggaagtggaacgtgtattttagtgaacgatacgagtatgacgagtttgtaagaaatgttttttttctacccaaatagaggctacgtgtgaaggagccttatactaagaaaaattgatttagttttgtaaattaacatggttggagtaaatagttgtagaacttgctccagccttttttacaagtatatttaatatcatggtattttttttgtaaatttggagaatgttctttgaaaaattgtttttgaaaagattcacatagtcgttgattacttcttgacggatcacctgggtagcgttcgggtaaacgtggatgccgacggtatggattactggagcacgagtgacccggttcaaatagcggcgttcttgaaagctttttcttctagtggaggggattactttcattcttttgaacccacgacttggactcattttaccgatctggaatttttatcgggtttgacttacgacgatgaacgtaaaatattttcttacgaatacggggatgttatcaacggcgaggcaacgcgagtagttcgtcgtttgctgggttatgacatgctattattggacaatacttttattgatattcgcactcgtcacggtaaggattattatcattggtgggaacgcgcctcgggggcaatagagcaagattacacgatagatgcaatgtatattcctgttgggaaagggataggtgtattatacgggaaaaagttgactagactttataattaacttggttggtgcagacacatgtcacgttgtctgtaccaaccgaaatttgtttatgaaaatcccacgaggattaatttttaatatatttgagaatgttctttcaagaattgttttaagataggttcaaatagtggtgaaaaagaggaggattacttgcaattagcggcgaaccggttcaagtataatggtaaggaggagcaggtgacggggaatttggagtggttggattacggggcgaggatgtatgatagcgggctcgggagatggttttcgggggatccattgcaggaacgttattatcctttatcgtcttacagtttttccagtataaagaatccaatataacgtttagtttgcatagtcatccttgggggaggatgaaacacagaaagcttcaggtttttataaaaatggatatttgggagatatggccacgatcgctagaaggtataatgaatttaagacaattggtaagagatatccggaagattttcctcggcattatatatatcacaaggaaagtcagaatttgtacaattacacaccttggaatcctagtatattaattataaaagttgattctgggaaaacgttgaaaaataagataaaaaaaatagtaaaatgagaaaatacgtattttacatgttattcacgacattgtgttgtttcgcttgtaaacggcattcaggtcttgatgaaaataatcgaggatcagaagcgtttgcttttgtattaagagatagaatagaggattttatttcttatgtagactcaatttctccttataaaaataagaatgaatttttttatgttttttttgaagaagaaaatgacaaaatgtttgtgtttgtgggaacagatttcttttatcgaaaaaacaaaattaaaggttatgctttcgtgaatggaagacttattgtgtataatggtaatgatagcgatcgaaagcaatatctcgtggatacaactaagttaatccaatttgtagatacaattccagggttttggagtgatgatactgatatccacatggattacgaagtgttaaggcgagagttcgtgatacatggtaaggatagtttaaccttgacgaatctcggatattaatatgttttgttgagagtgtcttattcggaaaattgactctcaattagtgtgttattctaaaaaagatttactctaaagttactttagatattaacttgaaatgtaaaaattatcgaggaggaaaaaatgaagaacctcctcgatttttattttgtgacgtgcttggtgataagtagtttttttgtagatttaaagaatgttttttgaaaaggatcaaattgaataaattggcgaggatatttttggccgattgggagcatcagcgtatacacgatatggaataaaaattggtcgtgtatatttggtgatggaattattatttatcaaatttatcaggcttactccttaggggctgatacccaaatgtacctgaaataagtaccaaataataccccttattcagagctcattcgaggatcaaacgttgctcatccatgctcatatggagaagctctgaataatcttcgagtgattgacgaaaaaggggtagtttctcgagagtatctccatttctcttgggttgaaataaattgatttcaatccctcgttttgatatattttaacaaaaaatagatacaaatttgctacaaattctcctaaaattattgtatagatttagaccctgactttataacgagaaagtgtggggtgtgtttataaagatcagccgaagaatatattttttagaattgtatttttttaaacttctgattgcaatatgaaaacaattcaaaaattatcgaaacagaaaaggcgtgatctggaaagtaaatcttttgctgctttttctttgccggaattactggtggtgttggtgattatcggctgtttttgtcccgctgtcttttatgatccgttcgggttatgaagagtgggtgagttaataccttcacccgggagtaggaacataaattgaaacaattggaaaatctgctggaacccgttcttttcatggggataggcgggcttgttattgatgtacttgccgatgtgtaggcttggaggtgtcatcggctaacagtaattcgtgttaaactttaaaatgaaatgcttatggggaaggatgtagtcagtgtctcgtgaaaatcactaattggaattcacgggaagaagtaaatactccaagaggaattccttttctaaggaagacgctttaattattcaagtactaatgacaaattgaaaagaatatgaaaattacaagtctttttattctgtttgtaatgttgactactatgagttttggtcaatcagaactaacaccaccttcgtcgcccgaatcacagggattgttacggagtttaaatataaaagtaaacaaggggacggggactgctggggttagtattcccttgtacacgatagctgccgcagaaaatgtgaatatcccgatagtgttgtcatatacttgttccgggattaaagtacaggacttggcttcttgggtgggcttaggctggaatctctcggtcgggggaaaaattactcgtgttatcgtggataatgatgatttggtcaatggttattgtaggggatctgggatactggcgaataatttttcctcgtggtggggtaccacgaatttattgagagaaagagtggaccattgtacctccaagtctagttgtaccggatgcgttacttttgatggtgaacccgatttgtattattacgagattcccggtaggacgggtatgtttacgatagatcaggatgggaaagcctggacgataccttataccccggttaacatcgttttggataatgatctaaatttcacgattacggatgaattgggagtaaagtatatttttaatttgaaagaatcgacagaagtaacccggtatagcgaggtaaaacataattccgtgaatagtattacaagaagtcatatttcaacatggcacttgacaaagataaaacctctttcgggaaacgaagtctcttttgattatcttcgtggtggtgaaattagttattccaattataattattatcgtaaaaacaatgaccctataattgataaatcaatacaatacaggtcgtctccctattatttgcagtatattacttggggaaatggaaaacttagtttcacatcgcaagccggaggtcatgaacttcctaatggccgacaattgaatgaaataacaattgtttcaaacctggaatatctgaaatcgatcaaatttctgtattcttattttcaatcgacttctgggtataagcgtctaaaattgatcgaggtggatgaatcaaattcaacaagtaaattgatgctgggtaaattcgagtacaacacgtcacgaaacttaccagccagggatagtaaagattttgaccattggggatattataatgggaaatcgaataccacgtttttccccacggaaggagcggatagatctccatctttcgctcacacgacagcaaatattttaactagggtttataataatcttggtgggtacgtggattacgagtacgaaaataataagttgattaatggctctatcgtgggtggggttcgggttaaaaatatcaaaagatacgatggcgccggtaattgccttaccacgaattattcctatgctaatggttccggggtgataatctatagtaataatgattatacggataattggaataccggggggaaattttgttacctccatgatgataaaaatacgagtgtttattactctacggttaccgaaactttaagtaacggttcaaagatcgtttctagttacacggatttgatggatggacccgacgaaccctctatgcgccatattaatcgaatagaaagcgaaggaataagtaatgacgctcccacggtgttccctaactcgtcgaggttctggaggagagggttattaaaagaagaaatacaatacagttctacgaggcaggaagtgaagagggtgcaatataaatatgaattcaagaaacatgttcggaaagagattaaaggatactatgttcatgaatataatatgccaaccggggcgttgttgtctaacttgattgtttatagttggttgtcagaacctatatatgttgactcggtgagaataacaggggttgatattcccacgacagtcacgaagtatacgtatgatccgacttattatttgcctgtagaggaaaaagtggtttacgataggggggatacgtatcgtgtaaagacgaaatacccgtttagctttcaagctcaaggtaatctttcgggaatcgtggaaagtaacacgttagatgcgttacttcaagccagagtgctggcaaagcctattgagagaataaagatcaagaatgataaagttatcgagggaaaattactcttgtataaattagtctcgaatgataagaatgaaagattgccggttttggcaaagagtaaaactcttgcatccgtgccgattgatacaactgatttctccatgtcgggaatcaactcttccaagaatttttatcacgataatcgttatactcttgtggattattatgatcattacgatggaagattaaacctgacaagttttcataaagatcaaggttcggcagaatccatgatatacggttataatttttctttacccgtggctatggtgaaaaatgcagtgtatcatccgagaagtacaacccgggaaaatcaggtattttataccagttttgaagatgaaacaagtgcgacaatacttaaaacggctaaaacgggaaataaggtttactctcaaagttacacgatcaatctttcgaactttaaaccgggatcgtatattttatcttactggaaaaagtccggtgaaaagtgggaactcgtggagcaggaactgacggtagcgtcttccaccgcgagccacacgattaatagttcatcgtacccgatagatgaagttcggataatgccccggaatgccatgatgacaacatacacgtgtattcccggagtcgggttaacctcagaaatggatacgaatggtaatacgatgtattacgagtatgatgtgttcggacgtttgttgcgagttcttgatgatgatcggaaagtggtcaaaggatacgagtactttattaaaccattttgaattgtggctactggaaataattattgtacaagttttaaatgaacaaaggtatggaatactatagatatataataaaacttttaaggtgcatttctctcgcatcaatattgtgttttctgatagttttcgcggaggctcaaattgtcgtgcctgtttcggaatttggaagtaacgtttttgaggtgagcgatgccggtggatattgtgaagttgattttaaaacatatggaaaatcgaacggtgagttgatgaaggtgttgaaagatttcgtgaattacgaattggaagaaagtgaaataacatggatcttggtgttgaatttagtacttgatgattataatgtagagggagattattactcgggaacacttgtttttggtgtcaggcctaatccgacttatgaagcacgacaaattctattagataatgggagtgaagatggtgcattaattattcaatccaagaaagtcgatccggttacgctctttaacgttacctcggattgtgaacctttcagtgcatttcccgggcgtaaaacacaagtaacgttgagcggttctcaggtaggagtgtcttattatatagataatgacacgatacaaggtaccggatttcccataacattcgagaaagtatttacggaaggggtttattacgtgagagccaagaagaaaggttatggagagagaacgatgaacgggaatataaatatatcttatttcccatttttaaaagcaggtttatgtacgaaacaaaatgatttggagggaattctccctccgataggtcctataagaccgggatgtggcttttatgtggagaaagtgtcttttattgatttaatgagtaaggatcaaaaaagacaattggacaagatgatacaagaaatcaacatgggtaagtctacttgttgtccgggattcaaaattcgaagagtcaacaatgcaattcacttgatgtctggcccaaatattaaaggagtggaatgggagagcgaagtgtttctttccttggataatggaacaggaggaaaacaatatcgcatttgggctctaatggagcctaccgtttatcctattgaacgttatcagttgttgaaaggtgatatgtatggagatcgttattcgttaaaattagatggagcccagctaagtgtagtatatagactttttcgggatagtgtttttgtaacggagcgaattggtactcttgagccagtggaatttgaggatctttcaggaggtgggacatatcacgtggaagctcattattgggatacaatcataccgatgaacgggagtctttatgtggataagaatgtggggggtgctaattacgtgaaagagagcgtgtatgttaatgaagaaaaccctgtttcgacgtatgtttattatgatggtttagggcgggaaattcagcttcggcaagaagataattctgtaggtggctatgatatcatacaatctattgtttgtgatagtaccggacgtgtttccaagagttatttgccttttagcgtgcgggagaatcaagggtatcggaaatttgccctctctgaacaagatgaatactacacgaataagttcggggtaaatcattacgcttattctgagacgaagtataataaccgtcccgaagatcaaatcgtggagcaaagtttttacggggaaaagcttaaaatgggtagcggacataccgtgaaaaccaatgtacgacaatatacaaccggggataatgtaaaaaaatacgtgcttgatggatcttctgttaagctggagggaaattactcgtaccgtgaacttatcgtgaaacaagtaactgatgccgaaaacgtgaagtacacggaatattacgatttccaggggaatttgatttgtaaatctcaggatgaggtaaaaacatattatgtttatgatgatttaaaccgtcaacgttatatcatatctcctttgcaagatgccgagtttacctccgggacaaaaacattggaacagctatcgaagttatgttattacacggagtacaacgagctgaacaaaccgtataaattgtatgtaccgggagcgggttgtacgatttatctttacgataagcgaggacgggccgttttggtgcaggatgcaagaatgcgagccgagggtaaatggttatttaccaagtatgacgagatggatcgcccggtgatcacgggaacatgttccggcacggagtccgctcacaagacaggcttggcgggacagttcgttttcggagaagcgcgaggaaccgtccttcacggttacacgaataacacctaccccgtcgtggcggacgagaacgcttgcctgacaatcacctattatgatgattacgcgtgggccggagccagtgatatgtcatattccccgtcggaatcgctgggagcggagaaatccgagcgggtgaaaggtttggtcacgggagttaaaaacaaggtgttgggaatcacc

SEQ ID NO: 10812 - DNA, 846 bp, Unknown
  gut microbiota DNA sequence
ttacccctcgggagtggagatcacgtctaaccttcacaatttcagcggtgacgtgacccggatcaaggtgaagcagacgatcgggagcgttgtcaacgagtataaccggtatttggagtatgacaatcttggacgtttaactcgtgtaaaacaacaagtgacgggcgataacgctaacgggctcgtaacgctatcgagttacgagtacgacgacctgggtcgggtttcccgtaaaatgcttcataacgacgtggacacgacaacctacacgtatgacatcgtcgggcggcaagttgcagcccgttcaagaaatttctcgtacgaggtgggattcgagcatgtcgagaccgggttgtcgggtaaggttactccccgttacaacggtaacgtgagtcacatcaagtggggaaacggtagtaatgtcaccgacttgtatagttataattacgattcttcaagccagttaaccggggcgtatctttacaagaagtcgggtacgacctggaatgcccattcgggcttcgcggagaaagacatcacgtacgatctgaacggtaacctgacatcactaactcgcacgagttcaagtggtgtcgcctcgtcattgtcttacacgtatgatggtaaccaggtaagcaagataaataacgggccatcgtacgcttatgataccgggggaaacatgaccgttgacggtcttcgaggagcgagtatcagctataatatcttgaacttaccggaagaagtgtgtctaggtaacgaaaaagtttcttatatttacacttcggctggcgagaagctggcgacacgggtggggagttctttgacttattatcgcggtcccct

SEQ ID NO: 10813 - DNA, 145 bp, Unknown
  gut microbiota DNA sequence
tatcctccccgttaggatcgatgtacaacaccgggttattagcgcaataaccgtaagggctcacgaattccagcttcgggtcaacgttaaaccaacgaccgagcgtgggatcataaaagcgggaaccgaaatcgtaaagccccag

SEQ ID NO: 10814 - DNA, 24863 bp, Unknown
  gut microbiota DNA sequence
atgtggcatctgccgaggctatctgctgcgtagaacacatcgcaggagtacacacggaacccatcgactataccaacatccccggatgtacctacacgacaccggaagttgcatctgtcggtttgaacgaggcaaaagcactggaagccggttatgaaatcaaaatcggtaaattcccattcacggcatcaggtaaagcgagtgcagccggggcaaacgaaggattcatcaaattaatcttcaatgctgccgacaacaccctgctgggagctcacatggtaggaatgaatgtgaccgaaatgatcgccgagatggtacttgcccgcaaagtaaaagcgaccgctcatgacatcatcaaaacggttcacccgcacccgacaatgagcgaggccgtgatggaagctgccgccgccgcttacgatgaagtaatccatatctaattggaaatggagaattgaaaattcaaaatgagaatataaaatgaaaatcacactactcacaagctctttattattcatcggagcgtcattatgcgctcaaacgatcggtgaaaaagaactgaatgacatcaaggggagcttccagaaagacgcttccacgaaagccattcagaacgtgttgaccaatgacaagaatatccgggataatgctcttaaccgggaaattcaaggaaaaatagaccactatttcaaatatcgggtaaaagtacagggtatcacggatcagcaaagctctggacgttgctggatgtttacctcaatgaacgtgttacgcccgagtattatcgagaaatataacctcacgggattcgatttctctcacaactacctttacttctgggatatgttcgagaaatctaatcttttcctggaaaacatgattgccacggccaacaagccgatggatgaccgggacgtaactttcatgttccaagctcccgtgggtgatggtggtgtatggaacctctattataacctgggagaaaaatacggtgttgtacccaaggaagtcatgccggaaaccgctcactcgaacaacacgagtgccatgggatcattgatcaacgagcgtctccgcaagggtggctacaccatccgggaaatggccgctcaaggcaaaaagatcaaagaactacgtgcagagaaagtttctattctgaaagacatttaccgaatcttggctctttgcctaggcgaaccaccaaccacattcacttggagatacaaggatagaaacggggaaatcaaggaactggcaaattacactccccaacaattctacaaggagatcacgccagccgattacagcccgaaaaattacatcatgatcatgaacgacccgacccgggaatattataaagtatatgatattcagaactaccggaacaccgtcgaggggatcaactgggtatatctgaacctgccgaacgaggacatcaaagaagctgccattgcttccatcaaaggcaacgaggccatgtatacctccagcgacgtgggcaaatatttcaaccgggaaaccggaattcttgacccggaaatgtacgactacaattcattgatgggtgtagacttctccatggacaagaaaacccgtattctgacccgtcaaagcggttccgctcatgccatgtcattggttgccgtggatgttgacgcaaacggcaaacccacgaaatgggaattcgaaaacagctgggggccgcaagccggacacaacggttacctcaccttcaccgacaaatggtttgacgaatacatcttccgggtagttattcacaaaaaatacttgggagaaaaagcattgaaagcattagatcaaaaaccgatcttgctgccgatgtgggactatatgttctaaaagaaattcaaacaataagcataacgcccggagaaatctccgggcgttacttttatttcatcagtttccgcccatccatatccgccaacactctcatttgctggatggcaatccggttcaatttcaacaaacgctcttgttgatccataccttcctggatgaaaacggcattcaagttttccatgttcgaaaggcagatcaattcattgatcgtggcataatcccgaatattacccttcaaatccggatgcgcctcccgccattcgaaagctgtcatcccgaacatggccacattcaacacgtcagcctcattggcatacacttgagaaacccgtgtcggagaaagttcttccgggatcaaattctgcttaatcgcatccgtgtggatatgatagttgatttttgaaagttcccgtttggccgaccaaccgagttgagcttgctcctgttctttcagacgctggaattccttgatcaagtataattcaaattccacggaaacccaactggcaaatttaaacgcaatatccctttgggcgtacgtacctcctcccgctccatttttcgtgataataccaatagcacccgttgtttccacccaacgagacggactcatcgtgaaagcattgtttcccgcctcgttcaaaagggggtcgaattcgacccctttaaaattgagattattcaatttctcccacagaccaagatattccaaagtattctttaccctcatccaattcttcaccacatctttaggttcaactgggttcttctgacgagcaatatccgtgatacagatgtagtctattccattttcctgtaatgtccggatcattgtgtcccgaacctgtataaccgccttctttaccatttatctagtttttcaattttcaagttacccattacattttaaacacaccgagtcagaagtgtccttcccatctgccgcacgggcaaaaacataaacaaccagcccctccatttctgcctcttccgggaaatccatgctctcattccaatcctccccacgcattcctaatcgcatcactttacaggaatgtgtcgattcgtgaagaagtacaccataaatctcgtcatccaagaaacaatctatagcttccacggccattcttcggtgcgagaaatgcaccttccggttccctgactccacctcgcaagcaactaccgggctgacaagcgcacccgccgccacgcgaagtttcgagtaatcaataatcccccggtattcctggatagctttcttatagcggactatcggtttcatgggattaaccttttcaaccgtcaccgccgttgtcacgttcgcactcgtgaacccgttaaagcctttcgggtattggtttcccggaaatcccaatcgaatcgcccgagccatccatcctcttctactcaccacgacagcaaaagccgcagcttgttgcttttgcggctccgtgctaggtttacgagaaatactcgctcccttacaataattcttaccgttagcccgcacataggcaaccacgtttccgaattttccccgcacctgaccaatagagtttacaaattccgccataatccttttatttaattaagacccgcaatatacgacaatcaattcaaaaataaagctaattagcataaaatttgaaatgaaaattcatcttcgttttttgaggaataccgaattaatatctttatgaaccttatagataccttatagaaacattatatgaaccttatatataataaggtttataaagtgtagatattgtttattcaaaatattattactactattgtaccggtattcattaattattcatttttaaatcagtattgacatggacataacctctcctctatttttagccttacttgcaaacggcccggttaaagccgacgggtatacttattttttgtacggagggaaagcccggaaatgcaaatccagccggggccccagaaagtccagaacagagggagagaaacaaaccacggaccgattcacggaagcccgcaaaatgtggaaaatttacaaacgggctatcggggacttgccaatatggcgaatcgcagcccgagagagagggttttccaagagcgactctttattccattcaaccaatggaggatgcctactcccgggcaaaggagtatgggcattcaaaactttccgtttttccatgggaaccctagaagctcccgtcatcaccaattcagaacgtaacgggtggacggtcaccttgaactgggaaaacggtatcgattgcccgaaagcaagcgcctcggatcaagtgttcgtgggatatttctacgacacgctacgacgttcaccctgtctacttcgtgacatacccgcccgcaggggcgacgaaagcgtaactatagaaatcccctccggggaccaaccggaagggacaccactacatctttatttattttttggagacagcgaactcgcccgattttcacccagcgagtacacccaagtataaaatctaccgagagaacaacagttcccggtatttcggcaacggccagatctcgtcgtccacgagcaattccagcttatccacgtgataacggatcttctccagataaggacggactttttccgtgtattcctcggcccgcaccacttcatcggcaatcgcattggcctgcttgcgagcttccgtcatatcggacaccatcgtctgtatctcccggatatgataggaaatcgtgcggatagcctcgatttgcacgtcggccacggactcgtagtccggcaggatattcttcaaagcggtcacattcgtcaacagcgtgttctgataggtgatcgccgtcgggataatatgattcaacacgagatcccccaaaacacgggattcaatctgcaacttcttcaaataaatttcattcttgatctcgaaacgcgcttctagctcccgttcactcaatatcccgttgtccacgaacaatcgcttggccttctccgagcaataagcctttaaagccgggatacaatccacctccgtggacaatccccgacgggcagcctcttccctccattccttgctgtaaccgttcccctcgaaacgtacgggtttggactcgatgatgtatttacgcaatatctggaaaattgcctcatctttcttaacgcctttctcgattaaagcatccgtttcctttttaaaagcgatcaactgctcggcaacagcggcatttaacgcaatcatcggtcctccacaattggctgacgaccccactgcacgaaattcaaaacgatttccggtaaacgcgaaaggagacgtacgatttcggtccgtgttatccagcatgatctccggaattttacccacgttcaacttcaactcggtcttctcgtccgggctcatcttccgatcgctcaccttctccaccaactcatcaagcattcccgacaagtaattccccaaaaacaccgacatgattaccggaggagcctcgtctcctcccagtcgggcctcgtttccttgagagacgatcgatgctttcagtaaatcaccatgttcatacacggccttaattgtcgataccagaaagatcaagaactgcatattcgacttcggattcttacccggagacaataggttcactcccgtgttcgtcaacaacgaccagttattgtgtttacccgaaccgttcacccccttgtaaggtttctcgtgcaacaacacccggaaattatgacgacgtgccacttttttcatggtggacatcaacaactggttatgatcgacggccagattcgcctcttcgaaaatcggggcacactcgaattgattcggggccacctcgttatgacgggttttgatcggaattcccagacaatgacactcgtattccagctcctccatgaaagccgtaacccgtgccgggatagaaccgaaatattgatcctccagttgttgatccttcgcggaagaatggcccatgagcgtacgaccacacaatttcagatcgggacgggcattatacaaagcctcatccaccagaaaatattcctgttcccatcccaacgtggcaatcactcgctgcacgtctttatcgaaatactggcaaatatccactgcagcccgatcaatcattgccaatgactttagcataggagtcttgaaatcaagcgcttctcccgtgtaggccacgaataccgtgggaatacacaacgtgcggttattaataaaagccggggaagccgggtcccaggccgtgtaaccgcgagcctcgaacgtgttgcgaatccccccgttcgggaaactggatgcatcaggttcttgctggacaagtagtcgcccgtcaaatgattcgatcacgtcaccatccggcaacaaatcaataaaagaatcatgtttctccgccgtggcaccattcaagggatgaaaccaatgcgtgtagtgggtaactccccgttcaacagcccaagccttcatcgcggcagccacttgatcagccaaccctcgatcgatagccaatccttcagacattgccttttccagctttttataggcttcgatggaaagatagtgacgcattttatccattgaaaacacgttttctccaaacacgacagaacacctgggacgttccccgcactccacgggtttacgacgggcaatctcttgtaaagctaagaatctaaattttgccataaatttgtatttttaaagtaagccctatattttcaggggtcaaatatataaaatattgtttattttcaatatacacccctatatttttaatacaaacccttcaaaaaaaactcaatttaacaagacacacccccataaaacatacccacgattatttatattcaaaacatgattgcttcgaaggaagatgaaggttccaccttttggttcatcttgccgtatgttccactgaaataaattttattacctttggggaataaagaaaacgattaatcatgaagaaaattgccgccattcacgacctgtctggctacggaagagcttcattaaccgtggccatccccatacttacacacatgggattccaggtttgcccccttcccactgccatactatccgcccatagcgaatacaaggatttccgctcgctggatctgaccgattacatggaaagtttcatctctcactggaaagagttacaactccaatttgacgccatttacacgggctacttggcctccgtgaaacagatgagcatcgttagtgatttcttcgcacatttcaagaatgaccaaaatttcattctcgtcgatcccgtactgggagaccacggggaattatattccagcatgacacccgacatggtggaaggaatgcggaaactctgttcccaagccaaggtgatcaccccgaacttgacggaagcagcctttctgctcgggtacaacccgcaacaagagatctccgtgaaaaccgcaatacaatggtgcaaacagttgagcgaactcggtccggaacacgtgattatcacctccgctcccgggagtaacgccaaaaacgtggccaccctcgcttataaccgcttggatcaccggacctggcgagtattatgtgactacatcccggcctcatatcccggcacgggcgacgcttttgccagcgtaatcaccgggtgtatgctcaacggggacagcctccctgaagccctcgaccgagccgtacactttatcaacatgggaattaaagctaccttcggctacactcataatccccttgacggcatgaaccaggaaaaagtgcttcactatctgaatgaaccactcccttattacaagtatgaactcgtagaaaattgaaaataatatttaaaattattacatgattaaagctattattatcgatctggacggaaccacacttcctcgcaacgggcaccagataagcgaggaaaaccgggttgctctggaagaggcgggacaacaaggcgtgattcgcatcctagccacgggacgttcagtgttctctctcaacaacacgctacccgaaggccttccagtggattacatggtattttcctccggggccggcatcatgcactgggatgacaaagagattcttctcacccgggaattatcggccgaagaaacacgagacattgctacccatctctggaaatacgatataaattttaccatacagcaaagaattcccgacaaccatcatttttattaccggaatatctcctctcttcacgaagatttccgacgtcgtatcgaaaattatcccggtttggggactcccatctcttcaatcgacgagatacagggcggggccactcaatttcttgttatcctagacgcacaacaactccaacttcacggtgatattcaacaaaaattatcaacttattccgtgatccgttccacgtcccccatcgacaaccaagcaatctggaccgaaattttcgctcccgaggtcaataaaggtacatcttgccaattgttgctaaatcaattaaacctgcgttacgaagagtgtgccgggctaggaaacgactacaacgacatcgattttctcaaccgctgcggccatccctttgttgtctccaacgccccggaatccttacgggagcaatttgacacgatgcccgccgacgaagataacggactggctgcattcgtacggcactcattaaacttgtaaagttccacgacagccaagcccattacccgtgatatctatttgaatacataaagaatcatcacagggttcttttccgcttctacctgccggaaaagttgctccactttcttcgtcaacaccactccttcctttttcattttatccctcatggctaacaattcctccggagtatatacagccaccaacttctcgccgtactcaccccataaatcatccggataaatcatatcccctctcatcgccacatttttaggcatataaaaagctttctccattttcttgttatagatcaacttacctgcttcataagtgatgataaaccaattcttcgtttcatatatttcatctttcgagaaatatcctttttctttttccaaacgtgccacacaagtgagataatctttctgtcccgggtcaaaattatccggcacggaacgatgtaccttggtcacgaaacgaggttgcaatttatgcccgtcatattcaaaaatcgtatcacacaacggggtcacaaaagaaatccgcccatcataaatcgttatcgggtgccgggaaaaatcaaccactcccatcgggaaacggacgtaatgaggacgcaaggtgtcaaatttcgtgaactttttatccgaaataaaataacagagtttgctcttactacacgtgatataccccaaataacgatctttttccaagggatacaccccccgcacataatgcatatattcctcacatgcaccatcttccttaaaatcgccttcaaaatcataggtcacgtatcgtttcctcaaaaaaccatcatacaccccaatctcccgttccaacggatccacgcgaacccaaccgaccattccatactgttccttgcctcctccttgactaccgatttgccgcaaaaactttccggaaatatcaaacaataaaatattctcccattgatctcgtattcccctaaccacaaccaaatcatcgtaaacggccaagctctggatttccacggcattccgagcatccatcttcaaaggtacggcttcccacgacttgataaaacgattccactctttcgcatcgttcaattcaatcacattgtgtttatctaaaataaccggttgattttgggcatacacactacctgcccacaaaaccagaaacaggaaaaaataaattctcatctctttacatttcatttgttcaatactttttcaattcgcgaactcaacatggcgtacaatttccggacggccccgtcctcgtgttgcccggccaacgctttcaaccgttcaccaagctcctgtaacttccatttcacgacaggaacggaagcatcagccacactctccaacaaagtgtttacacacaccacctgcatatccatccgggaaaaagacacttcactatctgctttaaaatcacagaacaacctggagaataaatccttaaaaaacatatccgccgtgtagatgttctccaagcatatttgttccatatccagcatacgtttcataaccttcggggccaataatttttgaaataccgctgtcatttgccggatgtaaatggcctttatatcccaagaacatcccttggccaaaggggaaaccaatcctttatcacccgcgaacaagtactctcccaataacgccatcgcttcccgctgctcctctatcgacaagggggtatttcctctcttttctccaaaccaggaaactatctgcaataaatattcaccgtatttatcaatcagttgccgattggcctccatgatcgccctaccggaatcatattgtttgtcagaataaacaatgctccccaaagacgtattcaaccggagtaaattattcaaagcgtatcccaacgttttcaacggttccgaagacaaatctcccgctctaacctctatcccttgtgatacgggaaacatgtatcccgctgaatatccctgaaacgtcttccataaagcctcacgatccatataagcattcttgctcgcggggaactcacgatacccccactcgattgccaaatagtcatactcaccaagtcgaggcataagttccttgaccgttaccttgtctgatttttgaacggcataattatacgggttattatccataatggaggccgtgtaaccacgcgccttcaaccaagtcacatttttcacctcttccgcggtataagcgacgcttcccgccaagttttcttttaatcccaacacgctccccacagcccgcgtcatcttgctccgcaaaatttctcccgccacgtcaggatgaaacacgtctttccggatacgctcgtcaacggtcccgcattccagtagataccgccacaactccttgggtaaaaaaccgtgtccgatattgacccgacaagacaggatttctcccgttttaggatgaaacgtgtagcctgttcggatgccggcctcgcttaaatcataggcgattacagcccgctgttcttccaacacggtttccgaatcagccattttcacccgtaaggcattcttaaatccggctttttcaaaagcggcattccacgccaatacaccctctttaatatacggcacgaattcggaagggcaacaagtatcgatataaaacacaagcggatgggaaggattcactaatttcccctttcgatactctccccggctgccttccgttatcccaagattccatttccgaataatcgaatccttctctgcccggtaaggattctgggaataatccaagaacgaaatcacgtgatagccgaaacgcctgtcaacaaaacgttccctcatctcccgttccggcagtaacgttacaacacaaccgatttccaacggtaaaaaaccccggggaggaatcacgttatctaacaatcgttcgggagagaacccgtacattcgatgtatcgtaaaacttaccccatccgggaattcatgcacaccggtaattctcgcccgggaaacatcctgatccctgacttgcggggcggccactttaaaccagtcatctccggttttcaacatttcagtaacatctattatatacccctttccacctgcagaatacgccaccacgggataaacaatatctaccggttgcttattcgatttacacaacgcctcgtataattcgttatttttatttgcaacccgctcagaaaacaatcgacgttgtacataaatcgaatgaccatccactttctgcaaatacacgacccccatgctttccaatggccgggccaccatatcgaatcctttattcacctgagcccggatctccaattcccgacccaataaatgttccggtatctccatatatacctttgcagaatcgcggtaaacaggaaaaataccggatattttttccatcttcccatgaaaaaaatcctcaaaagccaatggctgtttcccggtattttgaccgacaccttttcctaccgtccaacaacagattaccaggcatagcaaacacaacctatatcttattttcatactcaatcattaattttgtaaagattcgatactttctaataataaggcaacccgccttttctcttttccctccaagcctgccatataattccgtccctcttccaaaatcttccccatctcttccattcccttcaccaatacttgagaaggaacgtattccgttttttccaatagagccttcaactctttcacgtaagcagactgaatgacataacaggcatccgaaacagcagtattttcccgccactcccgaaatatccaacgatgcaattcacctaaatattcatccacggtatagacttcacccggcatatattcttccacgcgcgctatcgttgccaacttcccgactaacctctccatcgtggtttgataaaaacgattcatcaatgtccgcgtatcctccccgagactttctcccaaatcctcccgatacaaccaatcgcaaggtgccaacacgtactgcccgagaaacgtcataaccctcgacatataatcacggctgaccggtttataaaatctcgtcgtattcccctcacatttcaatatcccgccaatatccagcaacacatgatccacgaacaaggaatattgctgaagcatcccgcgaaaacgggacttcacgatatgatacgactgacgatccgtaaacttccacacgtcagccatgttcatcaatcgcttcaagttttctattcccaaagaattgaactcaacatgatcatttcccaaatcttccgactgagccctgatatccacgcccccctcaaaacgtttggaagaatcacgcgactcctgtttcacccattcgttccattcctctcccgtccgatccggtaaataacgatacccccaatctatggcaaaacagtcgtattccccaatccgggcaacccgatttctcaaaggaatacgatcccattccctagccacataattgaatcgcatgtaatccataatggaagatcccattccatgtttatccagaaaagcattatcccgaagttgctccacggaatagagactgctacctataaaattatgctccaatcccaaagtatgccctatttcgtgagaaacgaccatcttcacaatttccccaagcaggctatcgggcatgaccgtttcccgggcaagtttatcgttcgcaccacattgggcaaaataccattgttgcaccagatcccaaacgctactgaatattccgacatgactggtcatgatctccccggatctggggtcaactgtcgatggcccataagcattcctcaccggagacgctttccacgaaataaaagaataacgggtatcatattccgaaaaatcaggattttcctccggagtcggggccaactctccgcgaatcgcatttttaaacccgatccgttcaaacgccttctgccaagcgttcaccgcttctataaaatagggcacccaacgggacggtgttttacgatccacgtaaaaaacaatcggcttctcgggttccaccaattctccccgtgaatacgcctccaagtcccgagggaccaacctccaccgtttcacacaagagacctgggacaaggcaaaacgactttttgaaaaatcagtttttgaaaaactaaaatatcccacgtcacgattcttctgccgcctttccaacggctgacggggcaaaagggccaagcaaacaccgatttcccaacttgtcgtgtacctatcgccggatccgtttccccctcccacgggatattcctccacggaaaaactcctgctggaacgaatcaagatattctcgggaaatccctttatttcgccaatacgattctttttactctcaaccatacccattttcaattcaaaaccgaacggactcaaattgaacaagggattattcatcaacaaccgggaaacctccaccaataccgaagaagaagtctttgcctgcacgggtaacacctcgtttaacatgaaatctccccgttgtcgggcaacatgatgaatacctcctttccccgggtccactcccaccctatcacacagaggcacctgcaataacacctcgtcaccctcttttcgaaagcaaacaatcatcggcccgaaaaaatccccggaatacccgtaacgtcgatcttcatcccttttcttcaccgcagccgattccaatatcgttgtcgttacaaacatatcgcacccgagcagagaatcaggtatttcccaaaagatttgttccccttgacgataagtggtaaacataccgggaataacctttaaggaatcctccgacggacgagaatcaaaaaaagcatcgatctcctgttgggctatcgaatgaaaacatagcccaatactaaataacagtataaattctatttttttccacatacaacatttacttttccatcacatcccatgattttattcttcgaaatagaccggatcagaatacaacgatgcccgggtagacaccccgtcttctgccgtaatcatctggaacaaggtataaaacaaacgccatccttttcgccgatgttctttataatccaacacattggaggcaccgaaagaggccgtcacctccatggtatcaactttaattcccagttcgttaatctttgtaaagtccgcgcccgcgggacgattcatttgcgtgagagccacggaatgccacacacgatcccccttttctaatcgctgctctatttcaatatccccggaaagaagtaccgttgaacccgtcactccggcttgaatactgacattctcattattcattccccgggaacattctacaaggtattcatgtgccttcccgtccgcgatcaattcaaccactttctcttccatcgccgttccacgtcgatcggcccaatgccgaaccactaacgtcacgctctcccccggcttacaatctacaacagttgccgtgaaacgaatggtaaatttacctccgtcacgcgaagcatcaaagaccggagacatcaagaccggtgtccaatcttggggtaacgatgcatcaggtttaaacacaagccctttggcggaaacttgtcccatacgcatataccatccctgccccgtcatataatcatgaacgaacgcatttattcctaacgacttacaagcatttccagacagtgtagtatcccctttaagtgtagtttccaagacgttttgaactccatcttgctctacagtccgttccacccccacgtacgcgataacggaacgcgccacggaattatcccgcgcttcccagctgaccacaaaactccgtttttcccgatctatttgataaggcgggaaagttttcaaccgaggtaaatccatcgtgtatccctgagctttggaaaacaatggtagcacggtacacacgaaaagaatatataatattttattcatacacgataaatctattgatacaagaagatgttccaagagtctgaatccaagctcttggaacactcttttcctgtatctggaaatcaataaaacaatacgttttaattcaccttcacactatatccgaagtcaacgatcttgccgaatcccttgtactcaagaatttcgctatccggatcaacctctgcagccgtggtcagtttcatctctagaattcccccctcatttccaccataatccaatgaagcacccaaacaatacgggaaatcattccatatccatggagattcccaatcattcggatcctcgctataccccgtgttgtaaagcgaattcttaaacttcaacccggttattctcacgttgggatccttgtactcgtagagtaacgagattttcggtaccgtacggttaaaatctactttataaattttattgcctccggcaaaaaacacggctttaccgtaaagataacaagttgttacactcacctcattcacactcatccctccgggaagatcaaatgtatactcaccggcacatatagcctccttagcttcttcaccaaaaccggctgcattcaagtcatacacgtgaatcttccgatcggaagtcgagaaaaaggttgccagtaccccgtacgatccatcaacatcataatacatattcatattaatcatctccttgtcatctccaatattatccggatcgaacacattcttaacccgaggattttctccgattctcgcaagctttctcaccgttttgcttggtttaaaatagtcttcaactccatattttcgaaagtactggttatacatatacccttccataaaatcattataaataccggttttcaagaaacggtaattttgctcatcataaagaataaaacctatacttctcaagggagctaccctcgtaattttgaattcagaagcatcagcatcattttcccatttaagcggataatatacagcgtaaccgtcagcgttcgccatgtacaacttcccgttatcagataatatctctcccaacaccggttcataagtataagttgccaaccactccggaacaaaattttcatcatgttgtacctttttgatatgtaacatctcacgataagtccatacctgttcaaacgaaatggcatccatcaaatacacatcttgatccgttccgacaaataccaccggtttttgcttattaacaatagctccctgtgaagacccgtacatccaatccgttaacaggtatttgggagtaccaccaataggcaaatcttttcccacatccaatttgtaggcatcgggaataaccaccccgccacttccttcgccatctacagcccccagcacgcatttaccttcattatactgaaggacaaaccaactacggctatagggaacaataggtttcacggtcgtttgcttataccactcgctcccatcttcccggtgatcctgcacccgcaaacgaacggacaaagaattcacatccgccggctgaaacaacaattcacatactttttcctccccgcaaggaatccactcgctcaatcccacattattcttcttctctttttcccacatatatgtcaatcgagcctcactctcctccaaagtttgagacaatttgggttctatcttcacagagacagcctcctttttatccaaccgcacgctcacgattgtaggcaaatctataatcaactcattaatatcctgatagtcatacgaacctttatcatcataacaaccggacaacaaaagccaaccaaccaggcaaaaaactgctatatttataaatcgtttcatggcaatcatttttattctactttcttaaatatgatctcatttcccttgtcatccaacaaaggcggattattctttttatattcctcgtaagcatcatatatctctttccgggtctcccttccctccgaaatatcatctatcgtggctttaaaatgatccatcataaaaaagtatttcgcatcggaatattcaccccattgatattcattccaattatttctccggatcacgtaataaacctctagcggcaacacctctttgtcttcccgccccggatcaaactgatgcaaagggttgtccagatcgaaacaaacgtctgcccgataagctttcgttgtcgttaaattctccggtcgtgaaacgttcatcgtaaaaatctgataaatggagtccttcgggaacacgtacgaatcggcaaaagagacattggccttcaaagaataggaatcattcggtcttactgtcatgcaaaagtttttatcctccgtgagatgatatccttgtaaattcaccctcaacgcccactctttctccacatttcctttcacgtaatcggaatctctgaaataaacagataaatttccataatacagattcaggcggggcgtttcatcgtacacgtctatatcattctcctcgcaccccatgtaaataaagcccaacacaaataacaataaaaaaaatctatattttttcatctctgtcaaatttaattgttatttccaaaaattatctcgttgtccggtaacggccattgatagaagtcagccatattttccttgacacaataagggaatgtcctataattatggcgtttatagaagtagaataattgtccctctgaaaaaaattccttccggtattccctcatgagttcattaatacgtttcgtatgagacggatcatactcgggccgcgtatccaaccgatcatacgcatcatccgcgatcacgccatcctcgtaagcgattcctcttgcccacatcaccgtgtttaatgcctccacactcttttccttatccgtttcgcactccgctatgatataatacatttcaggcaaacgaatcaatggcaatacatctttcccggcatatttggaataattggatgtatacttagactgatcatatttcaagcaaagtttatactttttatctccatccccgctcacattcttaaaagcgtgagtatttgcccgaatatcgtaagttcccctacttccggtttcaaattgttcatcaaaattctcttttgtccgcaagatataataagtctcggaaagttgcccctcgggaatccgcgtcttatatttaccttcctcttccaacaacttatccaactcgtaaacattcaaaccgaaaacgtgctcgccaaacaataccggattggaattatcttcatacaagtcgaaatagccgctttccaccacctcacgggcataggtcaaagccttggccttactttcggcatctcctttatacaaatacactcgtgccaacatggctctcacggcataaacattcatccgcatttgccgtgaactctcgaaagcattgtactccttgtcatacgtgttgggaatctcaaaactcttgttatctgaaacttccagcaaagaatctgcttcatgcaaatctttcaacacatacgttacaacctgctcagccggtaatacaggagttgctttctgatcaaacgataccctgtaagggatggccttccccgtcggattctcactgtacacgggaccgaagagcctcaacaaatcaaaatgcaagaaagctcgcaaccccaaggcttctcctttcatcaactcgtaatattttcctgttttaatcacagggcgattcttgtcgatatacttcaaaaaattattaatatttccaattatattatacatcgacccgtaaatattatccttcacggataaccatgttttgttgtaatcatatatatctttccacgaatgcaggttaggataaaaatcataatttcccgaaaccatttccaggtaaccatacgtcaaattttcggcatacaaatttgtttgccccattttcaaataaaaacccgtcaggacatccttgaaacccgcctcactttcgaacaggtcgtcacccgaaatagacgttttgggttgcacatccagccaaccggaacaagccgttaaaccgatcacaactcctaataacaatatatatatattctttttcatatctcaagattttaattagaacgcaacatttagagagaacgaaaaacgccgtgcaaacgggtaatcagttccccgctcttgcttcacggaagaaagataaaacagatcctccatgttgaaagcaaacttcacggaactcaatccccaacgttccaagaatttcgtattcgtccgatccatacgatagcttaaagcaatagaagtcatctggaaagtattttcatccatgacgaaacgtgaagttgccttggttccggctccgtcaattcccgtattcattcctttaaacttcgccgtatcacccactttcatccaacgcaagtccaacacccgcttatcggcattacgcatcaaatcagcattctccactttatctaccaacgtctgattgtaaacctgtccaccaaatttatacgccatactcacgtccactccaaatcccttgtaagcaaaagaagaattgatatttccttgccatttcggttctgtcgtaccacaaggaaccaaatccaccacatcgtattctccggtaatcttgccatttctcttcaataaaatctcttcccctgtcatcggatcaattcctaatgacttaacagcccagatacggttaatagattctccttcttcataatgcgggagcggactatccccctgttcattataattttcctcgttcatatgacgcaatgcctcggagatcttcttcaacttgtccgtattgtgagagccgttgactgaaatcgtccaataggctgattttgccgtgttttgataaggaataaaagcaaaattcaactcaacacctttattttctaaagtacccatattttccggataggaaccaaaacccaacgaaggagccaacgtcacctgggttagcgagttcttggtcaatttctggaaatactccgcacgagcagtaattcgtccgttcaaaagtcccatttccaatccgatattccaagtatcagtctgttgccatttcaatttttcgttcggcatcgctacaagttccaccccggttccatcggaagcaagatagggataaagcaaggcgttataactatacaactctcttgactggtaaggagcaaaaccttgcgtaccggtaaccccgtaagaagctcttaatacaaattctgaaataaaatccactcgcgacataaagttctcctttttcacatcccaacgaacccccgcggcccagaaaggagcaaaacggttatctttaccgaactgggaagaaccgtctaaacggatactgaaatcgactgaatacttgtaagcataagaatacccgaaacttccggcccaaccgatcaggcgcgatgtattctcggaaccggtcatcttttcatcgtattgcttaccgaataaaatttcatccatattctcattcgggaatccggttacatgagccccataattttcatctttactctcctgtactgacattcgggcattggctgtaacataatgtacttcacccaacaacttattataactcgctgtcaagtcaagtgaatactgaaaattttcccgttgcgtacgccggaaatcaccccgttttgcaggatccgcaattccctcgaaagcagtatgctgggcgggtctgaaaacatccgttttaccattccctttggaaagagaaaaagaacctatcaaacgcaaatcactgttaggattgtattccacgctaaacaaatttctaatggaaaaatttgttgccctgttctttgtattcaaagtagcattatacatcgggttagcataatccgttgtacgaccgcccgtgtaagtaaatatcacgaaattatccaaacgttttaaaatttcaccgttttcaccgtaaggccgtaaataaggattcaacttggtgtattcgctaaaactaccccaaggcgactcgtctcccacggaattatcaaccgtgatgctattctttaacaacactttattaaagcggtattgcaaatccaaagatccggtcatcacatccctcttgctccctttcatcacacccggcgtatggttatacccgacatacaaacgataacgcaatgcccggtcaccaccttccaaagttacggtatgacgctgttgtacggcagtacgcaacggcttatccaaccaataagtatccacgcctctcttcacctctctcaatttatcctgataattttgcaagacatcaatactgccgccccccttgtacattccggccaacacctccgctctcaatttttcctccgcgttcatcaagttataatctgacaaatcaggaatctcaacgcgaaagtttcccccataagttacccacaatcggccttctttcggcactttagactcaatgacaatcaccccgtttgcagcacgagaaccatagattgccgtggcagcagcatccttcaacaaggtaattgattccacccgatccggatccatatcaaccatcgtctgcaaatcaatttcaaaaccatccatgatcagcaacggtttattgggataagtatcgtattccccttgcaatgtcaccatctcagccgaagccccggcattactgcccccgggcaaggtggcctgtccccgcatacgtaaatcgggcaaccgattgggattcgacccgttcaacacgtcctccataatcctaaaagaaggatctatagcggccaaagccttcgcgatattcgttgtgctgattttctttaaatcttcccctttcacggaaacagccgatcctgtaaacccctcttttctccggttaaacataccggttaccacgacttcggacaactcctcttcattttcttccatcacgacggtcaacggtttcatctctttttccaatttttttatcgcgatctctttatctttcatcccaacgaaagaaaaaaccaacacaacactatccatttgaggcacctcaagggaaaattttccatctttatctgttgccaccccgacgctcgttcccttcagcaaaaccgtaacaccgggtaagggctctttctttttatcctgtaccaaaccggttattttaaacgactctttcttcacatcccgcataatctgttccgcacgtttttggatcaccacgacatctccttgaatgcaatatcccaaagccgtgttctccaagcatttgtctagtacttgtttcacatcactcgttgtaatgtccaacgttactttccccacttgatttacatcatgctcgttataaacaaacgtgtaccccatcttttgtttaacctctttaaaaacagatttcaatgtcacattcgtaacttttatcgtggcacgttgtcctaaagtagccgccgaaacggataaaaacgacatcaacaaaaaagcagttgtcaatttcataatcaataaaattttaggtcggacctgccgaaacagtccctcttcgttgttttttttcatacctttgtttcaatttaaattataccaatgtgctgccaggcactttaacatgtcgaacgttgccagacgttcgacatttttattatttcacaaaaacattatttccttcaatttcaatccgtatcgatctagtttgctctatcaaatgaagcacctctttaaaactttcatgccgaggcatatccacggagaaacgtttttctcgtactgacgaattttcaaaaaatacattcacattataccaacgagccaactcgttcaaaatatcttccaaacgttcattctcaaaaaggaagtagccctgtttccatgcaatataaggagtaacatccacttcccgtaccaccatcccttcaccattcttcccttttacagcctgctctcccgcctttaatacgacttttgctcccttatcccgaatcaatacacgcccgtttaccaaggtcgttgccgaaggtaaattcgaataagcccggacattaaattccgtccccagcacttcaacctcgtacaacccctcaacctcaacccggaaaggagaaagagaatctttggcaacttgaaaatatagctccccgctagcgaatactttacgttcttttcctgaaaaagtcgacgggaaacgtagtttcgactctgcatttaaccaaacgatcgaattatccggcaataccacctgatactccccacccctcggggttctgatttcattataatccactttttgtaagcgtaccgaatcttgagtcaaaaataatacgccattctcatttctcaatatattcccgccctctcccaaaaacagattattactatctttacttaattctacaatttttccaccagtaagaaccaactccgcaaataccctacccggctcaacaccccgtatgacaaccataggagaattttcttcatttctttccataaacatccaagttccaagcaatacgatccctagcaatgatgccgcgattccccaatatttccagaaaaactttctccttccatgaagctttcgttccactacattccaacttttttcccaatcgtactcatccaaacgttccatcttcaccaatattctctgcttatttattaacctggaaaaaagttttttatttctatcgtctttcaaccattcatccaattccctttgctctccttcggtcaattctccttgaagatattttaaaatcagtgtttctatattaatttgatcaaacatattatacatttttgtatatagaacgaccgtatcgtcttcaagtgttatttaaaaatatttaaaattcacttcttccccataaataattatattttttggttttaactctacaaaatcatacttttgttttctgttaagcgttacgattatttaatacacacattatttcgatttgtcagataataatttcataataaagttacattccagtgatgaaaggatattcaaggagatattcaaaaaatattatctccctgtcaggtcattcgcgtggcgctttgtaaaggacaacgatattgccgaggatatcgtacaagattgttttttaaacgtatgggaaaaaagacttacattcaatgtcattaccgagataagaagttacctgtacacgagtacccgcaacgcctgcctagactatctaaaacatgaacaaataaaacaaaagcacgcaatccatctattgacaacggcatcccaagaggaagaacaggaatatattctggaagaagaagtcgatgccttaatccatcaggcgatcggaactctcccccgacaagcacaaaaaatggttattatgacattgaacggggactcgaacctcgaaattgctcaaaaattaaatgtcaccgtaaacacagtcaaatctacaaaattaaaagcatatcagattttacgtaaacgcctccgcaatgtacaatggcttttagtgttactcacttaaactataattcaagtatacgttatattttatgatatataaacctaatttctttatcatcac

SEQ ID NO: 10815 - DNA, 18928 bp, Unknown
  gut microbiota DNA sequence
tgttgatgacccaacaaaggtactaatttgaaagcaaatcacaactgtgccgaaatgtcagatttttaaggtttacctgttgatgacccaacaaaggtactaatttgaaagcaaatcacaaccgtgcggctcccgcttcgtttgttggtgctcttgttgatgactcaacaaagctacccagtttcactcgtgagtccaattacagaatcgaggatttaggtatggatatccgtaaattatatacaaacccatttgtcttgttgtcgtaaatttgtcaatagaagtttaacagtaaaagatcacaaattatgaataaatttctcttattttcagtattcagtattttaacgtttaatgttatggcacaagaaaagatcgtacagacggctgggcgtaatcaactcggagagtttgctcctaaatttgccgaactcaatgatgatgtcctttttggtgaagtttggagtcgcaccgacaaacttggtctgcgtgaccgtagtttagtaacgattacttcccttattagtcagggaattacggataattcgcttgtttttcatcttcagtcggcgaaaaagaacggaattacccgtacggaaatcgctgaaattatcacccatataggtttttatgccggttggccgaaagcgtgggcggcatttaatttggcaaagggggtgtgggcggaagacacgaccggtaatgatgctaaggcagctttccaacgtgaaatgattttccctattggcgagccgaatacggcatatgcgaagtattttattggtaatagttatctcgcaccggtttctcgtgagcaagttgcgatttccaatgttacttttgaaccgcgttgccgcaataattggcatatccatcgtgcaacgaaaggtggcggacaaatgcttatcggtgttgccggacgtggttggtatcaggaggaaggtaagactcccgtggagattttgcccggtacggtcatccatattccggccaacgtgaaacattggcatggggcagccgctgatagttggttcgctcatttggccttcgaggttcccggagagaaaacctccaacgagtggctcgaaccggttacggatgaagagtacaataaactagaacaggctaaatgatgattattttccctgatcctgctattttttagtacgttctttatatatttggaaaaaatgaacgaagaggtcctaaaaaatacaaatatatgattacagatattcgtttgagaagccagcagttggtgaacccggcttttgatgatcccaaggagcttgtggcatggatgggtgcattgcagggacaggagtatagtatggcgaagtgggctgtgggcttgcggttgaagaaaccggacattcggaaggtggaggcagctttggagaagggggagatattgaggactcacgtgttgcgtccgacttggcatctggtggtggcggaggatattcggtggatgttgaagttgtcagtcaggcgggtgaaactggcgtatgattcgtattggaagaatcacggaatatcggaggaattatatatcaagggccatgatgtgatcgtaagagttttggaagggaatagatatttaactcggcaggagattggtgaggaattgaatcgggcgggagttatcgtgggggatgatttggtgaaatattttttagggagagcggaagttgatggtgttgtttgtaatggagtagataaagggagtaaacggacttacgctttactggatgaacgggttccccctatgaaggagttgcataaggaagaggctttggcgaagttggcaataaaatatttcaggagtcattcccctgctagtttacaggattttatctggtggtcagggttgtctataacagaagcgaagcaggcggttgggttgattgattcagaactgatcacggaaagaatgggggagacggattggttaatccataattcatgtgcaaggaatgtacgggcgaagcaagtggtacatttgttaccttcgtatgacgagtatctcatcagttataaagatcgttcgatggtgttggcaccggagtattacaggaaagcttttaatacctttggtattttctatccggtgattctgtataatgggaaaattgtcgggaattggaataagtctgctaaaaagaaacaattcgggatagaatcttcattctttataccgggcatcgaggtggatgagggagagttggataaggcaaaagaaaggtttagagtgtttagtagcgggaggaatgactgatgccggatcagtcgagatgtcgatacggatgtgtgaacaggagcaacaggagagaagcgggaaattcgtcccgtaaggtttttaggcctgtcgtgatgtgagttttcactgtattcaccgaaatatttaattcttcggcaatttctttatactttttacattcgataaaactgagtttcatcacttgcgagcaacgttcggggaggagttcgatgcgggctaggatgcgttctaataattcttctcgggcgggatcatccgataacgtgtaagtcggatcgtctgcaagatgttgacgcacgtggttgttctgaatctttttatgttccagatagttcaacgcccggttgcgggtgaggttaaacagatagggaaacatggggcgagtgaaatcaatggagtcccagtgataccacaaactaaggaacacgtcatgtacaatgtctttggaggcatccaagtcatttactaaactcatggcatggaaacatagggcacgatagtgttgcttgaataattgttcaaacactaggctacactgtttattatcttgcacacgttccataatccaactttggttgttcgcaaagttaggaaaagtgaaattaaaaacaaaatagccctcgatacgtattcctgtttttttaattaattttggcgttcaaagataagattatggaatggttgactagtttattaacagaacattcagtgattcaagctgtaatagtggtttcgctggtatctgctgtggggttggctttagggaaaatcagtatgtggggcgtgtcgctaggagtaactttcgtgtttttcgtgggcatcgtggcagggcatttcggattgtcgatcgatccgcagatgttgaattacgcggagagtttcgggttgattatcttcgtgtatgccttgggggtacaggtgggacctggttttttctcttccttgggaaaaggtggattgaaattgaacatgttagccatgttggtggttttgttggggatcgtgatgactttgggatttcattggaccacgggggtatctttgccggatatggtgggaattctgagtggtgcagtgacaaatacgcctgcattgggagcggctcagcaaactttgaaacagttgaatgatcccgctattcagcaatcggatttggctttggggtgtgccgtggcttacccgttgggagtggtgggtgtgattcttgccgttattttggtgcgtaaacttttcgcatccagtatatttttcaagaaaagcgatgaagatagtcacaagaagacggtagtcataggttttcttgtgagtaatcccggtgtgttcggtaagaccatccaagagatcgcccggcaatcgtcgaagaagttcgtggtttcccggttgtggagggatgagaaggtgattattccggcatccgatacgatggtgaaagagggggactgtttgctgatgattacgacagaaggagatgtagaggcattgaccatgttgattgggaagcgggatacgagggattggaataaggaagatattgactgggacgctattgatagtcagttggtatcccaccggatcgtgattacccggtcggagattaacgggaagcgattaggggcgttgcgattgagaaatcaatatgggataaatataacccgcatttatcgggcaggtatcgtgttgttgcctacgccggacctgaccttgcagttgggtgatcggttgacggtggtcggggaggaatcggctattgcaaaggtggagaacgtggtggggaatgccgtgaaggatttggacgagcctaatttggtggccgtttttatcgggatggtattgggattgttgttgggatcgattcctttgacgattccgggcattagttttccggtaaagttaggtttggccgggggacctattgtgatggggattctcgtgggggctttcggtccccggattcacatggtgacttacacgacaatcagtgccaacttgatgttacgggcgctggggctttccatgtatttagcttgtttgggattggatgcgggaactcatttcttcgaaaccgtgttccgtccggaaggggcattgtgggttggattgggatttgccattacggtgattccggtgatccttgtagcggctgtgtccattaaatggatgaagattgatttcggttcggtggccgggatgttgtgtgggagtatgtcgaacccgatggcattgaattatgtgaatagcacggtggatagtgacacaccttcggtggcttacgcaacagtttacccgttgacgatgttcgtgagggtcattatggcacaggtgattttaatgctatttttgtaagtaaggaggtcaaatactcgtaattcgtcaatagtatacaatcatttcttgtgaaaacgttaaagtagaatatgttgctggtataggatttgatgcaacttaagtgttgttcatggtaaggttgtaactaaatgttacgatattccgtaaacatatattcaaacaatgtgaaatgtcaggaaaagaaattcatacgaaagagactttccaagttttgggcatgagttgtgctgtttgcgctttgaatgtggaaacaacactcggtgctcaagagggagtttacgaggcaaaggtaaattttgccggttcaaccgttttagtggattataatccgcgggtgattacacccgtggaacttcaaaaggccgtggagtctgccggttacgagctggtggtagaaaacacggaagatacggatcaagcggatcgtttacagcgggaagagtttctcgtgttaaaacgaaagacgatcggggctattgttttggcggtacccgtgttcgtgatcggtatgttttttatgcatatgccttatggtaattggattatgctggcttttaccattccggtgatggcatttttcggacgggacttttttgttcatgcctatatgcagttgaaacacggacgtgcgaatatggacacgttggtggctgtcagtacgggcgtggcgtttttgttcagtctgttcaacacgatttggccggaatactggacgagtcggggattggaggctcacgtgtactatgaggcggcggctgtgatcattgctttgattttgttggggcgtttgctggaggcaaaggctaagttcagtacctcgaccgcgataaagaaattgatggggttacaacccaaaacggtgactaaaattcttgccgacggcagcgaagaggaggtgcttatccgtgaggtagtggtcggagatgtgctggtcgtgaaaccgggagaaaagattccggtggatggagaagtgacggaaggatcttcttttgtcgacgagagcatgattaccggggagtcgatacccgtggagaaggtgaaaggacaacccgtgtatgccggaacgataaacgagaagggaagtttccgcttccgtgccgataaggtggggggagaaaccgtgttggccaatattatccgaatggtgcaggaggcacagggaagtaaagctcccgtgcagaaactggtggaccgtattgccggaatttttgttccggtagtgatggggatcgcggtgatcacgtttatcgtgtggatgctgataggcggagaccttgcttttactcatgctttgctgacgtccatcacggtgctggttattgcctgcccgtgtgcgctgggattggcgacgccgacagcgatcatggtcgggatcggtaaaggggcggaacataatatactgatcaaggatgcggagagtttggaactgatgtaccgggtgaatgcgatcgtgctggataagacgggaacgatcaccgagggaaaacctgtcgtgacggatattcactggactccgggggcggaagacgagcgttaccaatccatccttttggagatcgaacggcgttcggaacatccgctggcagatgccgtggtgcagaagtttaaggagagggtcgtgaatgaaatattagtttcggatttcgaaaatcagaccggtaaaggggtgacggcaaaagtcggggataaggtatatcttgtcggtaaccgggctttgttggaagtgaatcatgttgttttagacgatgataacgagaaacttgccgtccggtgggaaggagacggtaaaacggttgtcttttttgccggagagggccgggtgttggcattggttgccgttgccgataagatcaaggagagttctcgtcaggcggttgcgacgctgcatgaaaaaggaattgatgtttatatgctgaccggggataatgccttgacggctcgtgccgtggcagatcaggtgggcattcgtcattttaaggccgaagtgatgccgggtgagaaggctaattttgtggaggctttacagcacgaagggaaagtggtggcaatggtgggtgacgggatcaatgattcgcaggcattggctcaggccgacgtgagtattgccatggggaaagggtcggatattgccgtggacgtggcaaaggtgacattgattacttccgatctgaacgtgattccccgtgctatcgtgctttcgcgtcagacagtgcgggcgattcgacaaaatttgttctgggcgtttatttataatataattggtattcctttagcggcaggggtgttgtacgggatcaacggttttttactcaacccgatgattgcggctgccgcgatggctttcagttcggtgtccgtggtgactaatagtttgagaattaaatggaagaaattgtagctattatataaaccaataaaagaaagcaacatggaaaaaaagtttagatttaagacaacgttgaaatgcagtggctgcgtatcgaaagtcactccgtttttgaatagtttgagagacgtgacggaatggagcgtggatttgcaacatccggacaaggtgctgacggttatgttgaagaccggagacacgcactcggtgaagaaggcgttcgagaacgcggggtataaagttgaagagttcagatagacgatgttagttattttatcaccggccaagaccatggatatgtccgtggtggaacaggagtttccgggtactaccccggagtacgcggaagaagcggaatatctggcagggcaaatgcgccgcttttccgagtcccagttagagaaaatattgaagatcagttctaagctggctgcggagaattacgaacgttatcagaggttcggttcactttcgaatcctcgcaaacaggctttgtttgcttataacgggagtgtcttcaaagctatagatccgaattctttttctttagaggacttgaagtatgcccaagatcgtgttcggattatctcaacactttatggtttggtgcgtccattggatttgattcaggcctaccggattgcgtttgccgtgaagttagatggggcgaacctgtacgattattgggttccgaagctgacaactccattattggaagatgtgcgtaaggttggagggattatggtgaatttggccagtatggatattcagggagcgttgaagatggacgagttgaggaaacaggtaagggtgattacaccggaatttcaagaatggcgggatggtaaatacgaaacggttcgtacttatgccaagattgcacgggggacgatgacgagatatgtcgtaatgaaccgtgttgaggaacccgaggagttgaaggctttcaactgggatgggtacacgtttaatgctgacctttcggatgaggaacattatttctttacccgaataaagaagtaaaacagaaagagttgcgggtacatatttcatgttgcctcccagtctgcaactttttctaaaatatttggtcaggaaagaaacaaaaaaggctttttgtaggtatatctaaccgtaataattaatctgatttaactatgaaagaacgagagatagaaccgggaacacctgaaatcaataaaaagtattccattgtagttgatagaaaagggccttacttggtgtatggtcatccgcttttaaagcaacagtttatcgtgcagaatgacgagggaagttcctggtcataccgggatggggttgagtacgatatgaatgatgaacccacggctttatgtcgctgtggggcttctgccaataaaccgtattgcgacggggcgcacttgaacacgaattgggacccctcgttaacggcagataatattcctttattgaaagatgccgatgtggttgacgggcccacgcttgagttgacggacaacgagaaatattgtgcttttgctcgtttttgtgatgcttacgggaaggtttggaatctcgtggaggagtccgatgatccggaggctagggagttgacaatccgggaagctaattattgtccggcaggtcgtttaaaggcttgggataaggataaaggggaatttattgaaaataaactggaaccatcgttagtgctgttagaagacccacaggagcgttgtagcggtcccttgttcgtacggggtgggattccgattgacgacacggagggcgtgaggtacgaacttcgtaaccgggttacgctatgccgttgcggagcgtcatcgaacaaacctttctgtgacgggacacacgtgagtattcgttttcgggacggtttgccggggccgcatggtgggataaagtaaaatggtatgaatctgtaaattaactcatcgggagaatgttatactcgatataactatgaccatgttataaagcaggtagcatgtacttataagattataaatacctaatatcttattacaatattttgcatttataataggagcggaataggaagagaatgggagcggaatgggagcggctcgcaatatggtagaaatttgatgcaagatcagtaacgttattttacattatttgggattttgcttttcccgaattaacctcgttttccgaactaaatatgcgagtgtctatgaaaaggtattttacgccggatttgatttttttctattgttattaacatttattgtttgttggcatgatatttgttgattattcgtgtaatcaataaaattgtaggatggatgcatttcatatttttttggccgtgatgaccggaatggcagttattgtttttgtagccctgtacttcgtgaaagcgggttatggtatgtttttcgatgccaagtgggggcgaccaataaataaccggatcggctgggtattgatggaggctcctgtttttatcgcgatggcacttttctggtatttttcggatagggggtatgagttggtgccgttgatcttctttatttttttcgagatacattattttcagcgtgcgtttattttcccgttactactgaaaggtaaggggagaatgccgatgggaatcatgttgatgggaatcacgtttaacgtgttgaatgcgtgtatgcaggggggatggatattttattttgccccgtcggatctctacaccccggaatggttgacatctccgcagtttattatcggaacggtattgttttttgccgggatgttcacgaatatacagtcggatcacatcattcgtcatttgcggcgtcccggtgacacggggcattatttgcccaagggagggatgtttcgttacgtgacttcggcgaattattttggcgagattgttgaatggatcggctttgccattctcacgtggtcactttccggtgccgttttcgctatttggacgttcgctaatttagtaccgagagctaatacaatttatcacaaatatttagggatgttcggggacgaggtgaaaaaacgtcgtctgaaacgagtgattccttttatatattaagcatatgacacgagaatccaagttattcacgccattaacaatcggaccgctgaccttgcgtaatcgaaccatacgggcagcggcatttgagggtatgtgtccggggaatgcaccttcggaaatgttacatgattatcatctttcggtggcccgaggggggatagggatgacgacgatcgcttacgcggctattgttcgtagtggtttatcgtttccccatcaattatggttgaggccggagattcttccggcattacggcagctcacggatgatatacatgccacgggtgcggctgcatccatccagatcgggcattgcggaaatatgtcgcataagggtatctgtggttgcacgcctatatcagcttcaagtggttttaatatatactcaccgacgttggtgcgaggaatgaagaaagaggagatcgtggagatggcaaaggcattcggacgggccgtgaatatggctcgggaagcgggttttgatgccgtggaggttcatgccggacacgggtatctgatcagtcagttcctttctccttacacgaatcaccgaaaggatgagttcgggggatcgctggagaataggatgcggtttatgcgtatggcgatggcagaagtgatggcggcggcgggggacgatatggccgtgttggtgaagatgaatacccgggatggattccggggagggatggaggtgccagaatgtatagaggtggccaaggcactagaagaggctggggctcatgccttgattctgagtggcggttttgttagccgggccccgatgtacgtgatgaggggggctatgcctatccgtagtctgacgtattatatgcaacaattttggttaccgataggcgttcggattgccggacatatgatgattccgacggtgccatttaaagaagcttatttttttgaagatgcgttgaaattccgggaagcggtaaagttacctctcgtgtacgtggggggattggtttcccgggaaaagattgatatggtgttggatgccggatttgacggggtgtcgatggctcgtgccttgttgaatgaaccggatttcgtgaaccggatggcgagggaggagaatgcccggaatgcttgcgaacacgcaaattattgtattgcccgtatgtattctcgggagatggcctgtcacaagcatattccggatttgcccaagaagttattgaaggaattggaatcgacttccaagaaaaattgaaataggatttatggacataattgatcagcctagtgttcgtccggtggccatcgtcacgggagccagttcgggaatcggtttggagtatgcccgggagttgtgttcccggggatatgatgtcgtgatggtcagtaacgaggaagagcgtcttacgcaatgtgccgaggagttttcgcaaacgtacggggtgcagacgtggcctctttatatggatttatcactacctgatgcagcggaacatttgcatggtttctgcgtggcattagggttacaagtggaggtgttggtgaataatgccggtatttttcgatacgagcatgtggtgaatctttccgttggggttgtgcgaaccatgctgatgttgcatatgaatacggttgtattgctttgtcgttattttggcgaggatatgagaaaacggggaaaagggtatattctcaatatgtcttccatgtcggcttggttttcttatccggacatttcgttatacgcttccacgaagtgttttttgaagagtttttcccgtgctttccgtttggagatgcttgattacggggtgaacgttaccacggtttgcccgggagcaatcgctaccgatttatataatttacctcttcatttgcaacggttggccgtgcgaatcggtgtgatgatgaaaccgaccacgcttgcccggcgtgcaattaacgggatgttccgtcatcgagctcaaatgatacccggggtaattaattatttctttatcggctttatgttcttttggccttacggagtagtgaggtgggtgatgaggaaagtgaaaagggcaattgaaaattgaaaaactacccccaccggctccgtgcagttggaatctaaaatttaaaatttaaaatctaaaatctgaaatgaacaagggtttgtttatcatcactggggccaatgggggcatgggaaaggcgatcacgaaggcgatagccgggacgggtgttcccgtggttatggcttgtcggaatgttgaacgggcggcaggagtgagggatgaaattgtgcgggagacgggaaacggtcgggtggagttgcatcagttagatttggcgtcggttgcttccatccgttcttttgttgacgggttgaatggacgggaggttagcgtgctagtgaataatgcggggatcatgtgtcgggatttcacgacaaccggggacgggttagagatgaccgtgggggtgaattacgtggggacttggttgttgacgaattggttacttccgaatatgggaagaggcggaaaggctcgggttattaacacatcgtcggttacttgtaagatgggggaagtcggagatcacttctttaaattggatccagaacattatcgtcgttttaaggcttatcccgattcaaaattggcgatactgatgttcactacagaactggcccggcggctacaggggcgtgcgattaccgtgaatgccgttgatccgggcgtggtgaacacggggatgattaccatgcataaatggtatgaccccttagcggatatattttttcgtccgtttattaaatctccggaacggggggcgatgacggctatacttttggcaacttccgatcgatacgtgaatgtatcgggaggttttttcaggaataaacgtcaggtggggttacctaaaacggctcttgatgtggaggcttgtcggaagttgtggtttcagacggagcaattggtggccggactggtcggctcaaaattgaaaaagggagaaaattagggtgaaatagaagcttttaattttcagctttcttatctttgtaggcaaagaaattaatattatgcgattagaggaaagatatgataaggtactggcatggtttcgggaacgtatgccggtagccaacacggaattacagtataatgatcccttccagttgttggtagctgtaattttatcggcacagtgtactgataaacgggtgaatatggtgactcccgctttgttcgagcaatttccggatgcggagtctatgtctaaggcaagcgtggaggagattttcgagttgattaagtctatctcttacccaaataataaatccaagcatctgtctgcgatggcaaaaaagctgatggaagatttcaatggaatagttccggatgatttcgagttattgcagacgttacccggggtgggacggaagacggccaatgttatggaggcggtggctttcaaacgtccggccatgcctgttgacacgcacgttttccgggtagctgatcgtattggtttggtaacgggtgccaagaccccgttggaaacggaaaaacaactcgtggcgcatattcctgccgagtggctgtccacggctcaccattggttgatattgcatggaagatatgtttgcgtagcaagaaagccgaagtgtgaagagtgtgggattgccgagtggtgcagatataatcaaaaaaagctgtcttgacgagagacagctttttcactatttactactaaccctaaaattggaactacttcgagcatccattttcttgcaataaacccgtttttattacttagtgtgaattcgtttattagatgtaggttttttgaaaaggttgcgtgaaaaaataaaaaaaattagaggtggtatgcaatcttaaaattttagattttttctcacaatataccagtgtagcgtgttctccccctgtgtaagggggagttagtgggggtagttcctcttaatccaactgtgaattacttctataactgcttctgtattgctagtcacttcttcgttttcaaaacgtaatatattaatacttgcaatctttttcaagtacatctcccgttccaaattatgtccctgcacgataacatcttcgtgtacatttccatccagttcaatgcccaaccgaaggacaggacaataaaagtctaggatatagggaccgaccccatgttgtctttggaatttataattacttatttgtttttctttaagatactgtcacaagagcttttctgcaggggtagcgttagtgcgtaattcctgtcgaagaggttttgtgtgtttgggattcttttggggaggaatgggcatagcctattttgtttttatattttcagctaccccctctagctcccccttacacagggggagaacacgctacactggtattttgtggtgtttgataattctcgcccctgtgtgagaaagagctggaggagatagttggttatttttattttaatcctttacgttttagtaatggatcaatagaaggttcttgacctctgaatttttggtaaagggtcatggcatcttcggagcctcctttagaaagaatgttctcccggaatgcttttgctttttcgggattgaagatgtttccggtttctttaaatgcctcgaaagcatcggcatccagtacttcggcccacgtgtaagcgtaatagccggaagaataacctccggcaaatatgtgctggaagtaaggactgcgatagcgtactgtaatctctggtataaggccgattttttccaacgtggctttttcgaattcgttcgggttgacgggatcggtcgtgttacgcgtatggtaagccatatccagtagggcggctgccatgaattcggttgtgacgaatccttggttgaaatgtccgctattttttagtttgtcgataagctcttgcgggataggttctcccgttttgtaatggcgggcgtaaactttcagcacttcgggatcagcggcccagttctccataatttgggacgggagttccacgaaatccctgggaacagaagttcctgatactttattatatgtacattgtgacaatagaccgtgaagtgcatggccgaattcatggaaaagggtttgtgcctcgtcaaagctcaataatgctggaacatcccccgtgggtttggtgaagttgcacacgttcgtgatgattggggttacttttttacctagtgcggattgcttgcgataagcgttcatccatgctcctgaacgtttgctttctctcgggtggaagtccatgtatagaatcccgatgtggtctccgttcgcttcttttacctcgaatgctaaagcgtccgggtggggaacggggaggtcggtacgttgcgtgaacgtgattccgtataatttattggccgtgtagaaagcaccttctctgacattttccaacgggaagtattgacggagttcattctcgtccagcccgtatttgtttttctttactttttccgcgtaataacgccagtcccaaggttgtaatttaaagtttttaccttccttttgaatcatgtcttgaagttctttcgcttcttttttagctatcgggagagcggcattccagatttggttacacaggttgtacacgttctccggagttttggccatgttattgtcgagaataaatgccgcgtgggtatcgtaaccgagcaactgggctttttgcactcgcagggaagtgatcttggatataatttctttgttatcgaactcgttgtcgttgttacaacggttgatataagctttgtaaattttttctcttagatcccggttgtcagcgtattgcaagaatgggatcatgcttggattgtgaagggtgaatacccatttcccttctaaaccggcattttgggctgcggttgctgccgtggcaatcacgttctcgggaaggccggataaatctttttcgttatcgatgatcagtttgaaacgattggtttcattcaacaagttttcgccgaattgcaggctgagcatggataactcgctattcaatttcttgaacgtttccttgtcttcgggagagaggtttgctccacctcgaacgaagccttggtaatatttatcgagtacggttaattgttccggggtcagattttctttctctttattattatataccgttttgattcgttcgaaaagtttgtcatttaagttgatcgcatcccagtgagcggtaagttttggggtaatctctttggcaatagctttgatcgaatcgttcgtgtttgctccttgttggttgccgaacacggaagctactttgttcagtaattcgccggaagtttcgagagcgtcgatcgtgtttttaaatgtcggtgcatccggattgttgatgatcgcgtcgatttctgcttggtgttgcttcatcccttcctcgtaagccgggagataatgttgatttttaatcaagtggaaagggggaacctcgtgaggggtttcatacgtgttgaaaaatggattttcattcttcacttgccctgattggcaggattgcagcgctagtcctacgcaacaaactaagtaagtgacttttttcattttgaattttattatttggttttagaatgtgacaaatataattaagtcgggcagaatatacaaataaatgattttctccttatttttgtgtccttcaaaaatggataagattgatatgagtatacaagagaatgttgcgacttttgtcacgaagttacctaaggtgattttgttgtgtgttgtcatttacctgatttcgttgaatttcaagatggccaacgaggtcccgaagaatcaagaggtgaaagctgaagtttcgaatattgttcctctggatgcggtgaagaaatattttccgacttgtacgagtgttgagaaagtaaatgaagtgcattatgtcgttaaagctggtggggaggaggtcggtaaattacttgttacgaccccgattgcggacgatctgattggttatgccgggaatgtacctttgtttttggctgtttccgaggaggatgtgattttaggacttaccctattagataatagcgagtcgcccgggtttttaaggcgtttggagaaaaagaatctgttctcggcatgggatggtaagacgttggaggaggcagcgctgctgaacgtggaagcagtgagtggagccacaatgtcgagtgatgctatccggggaagcgtgaaaagggtgctggagtttcacttggaacgtgatgggggaggttttgaagtggattgggtgaaattgttgcaacacgctttggggggaatcgtggttttgttggcgttagctagcatgttctggggaagtcggatgaagcgctggcgttacgtgttgcaggtttcttccgtgttgattttaggcttttggtccgggtatttcgtttctttagagttgttgtttaactggttgttgaacggggtaccctggggggcacgtgttttgttgcccgtgatcgccgtgctggctttggcctgtcctttgttcctaaataaggcttattattgtgcgtatttatgtccttttggggcagcacaggagttggtagggaaagttcgtaagaaaaaaatagccccaaagggagtgtggaagaatatatttaaatatactcgtgtgatctattttatggtgattctcgctctgttgttgtggggaatcccgttagaattggcatcgttggaaccctttccggcatttttattgaccgctgcaacggggtgggtgattgctttggctgtcatatttttactcttatccgtattttttgcccgtccttggtgtaactatttttgtcctaccggggcgttgctggatattttgagaaaggccgatacaaaggcgggttcggagagaagaaaaaaagtgatccgagaatttattgccttggcaatattcctcgtgatattatattttatattgaggtaaaaaaaacttgaaacttttttaccgaaacatttgattgtttgaataaaaagtgcgtaatttgcatcctgtttggaaagcgtttataaaaatattgagagatgtcaagaatttgtcaaataactggaaagaaagcgatggttggtaaccatgtttctcactccaaaagaagagtgaagagaacattcgagatcaacctgtttaagaggaatttttattggccagaagaagatagatggatccgtttgaatgtatctgcagccggattgcgcctgatcaacaagaaaggtattagtgcttgtttgaaagaagctactgccaatggtttaattaagaacgtataaagtaagaagagatggcaaagaagagcaaaggaaacagaatacaggtgattttggagtgtacggaacacaaagaatccggaatgccgggtacgtctcgttatatcactaccaaaaacagaaagaacacccccgagagaatggagttgcgtaaatacaacccaattctgagaagagtaactttacacagagaaataaaataattaagctatggcaaagaaagttgttgcaacacttaaaacagcagatggtaggggatttgcaaaaatcatcaaaatggtgaagtctccgaaaaccggtgcctatacttttaaggaacaaatggttcctaacgatcaggtgaaagaagccgtgaaaaagtaagatttaaaatcttcatataagaaagagcgtcgtgaggcgctctttttttgttcttcggaaactaccccctctaactcccccttgcacagggggaggatatgctacgttgagatattgtgatgtttggtaatcagctctcccccttgcacagggggaggacatgctacgttgagatattgtaatgtttggtaatcagctctccccctgtgtaaggg

SEQ ID NO: 10816 - DNA, 156 bp, Unknown
  gut microbiota DNA sequence
gtgttgttgagcccggcggtttaccttcaaaagttctcgccgaagctctacaagaaagaggatgacaagcgttttgacacctcttccacgttggataacgacgtgaacctgggactggggggagatttggccttgcgttaccgggccggcaagcat

SEQ ID NO: 10817 - DNA, 145 bp, Unknown
  gut microbiota DNA sequence
tccacgttggataacgacgtgaacctgggactggggggagatttggccttgcgttaccgggccggcaagcatgtcgatttacaactgaaatccggtgtggcctggatagcgaacaacaactttgacggtgtggccacttgctgca

SEQ ID NO: 10818 - DNA, 5443 bp, Unknown
  gut microbiota DNA sequence
ttctccttcattaccacctgtattggtttttccgactcaataaagacagtctttgtttccatcccaagaaaagaaaaaatcaacgcactgtttttagcaacctttagctgaaaatttcccttattatctgtcgctgttcccgtcacagttcccttgatcaacacggatactcccggaatcggctccccattctcatccttaaccaccccttgagctacaagcgactcatcctttttcacctccttaatcgtgatcagatttccctcgattttgtaaaccagattcgtttctttaaaaatttcatccaatacctgcgaaggagtagccttcttcatatccaaagttattttcttcttgcaggcatcaataacggcagtggaatacaccaagcgataattatacttcttcaacacctccaagacctccttcacgctggcatccttcacgttaatgtttattttaccttcttcattctgagcgtgaagaggcaaactcaaacacaagataaaaagacataacaatccttgaaggggaatttttttgacatgacttccccaggaatcaaacatttttttcatacatttgcgaattagaatttaacacttatgccattttaggcatgggatgcagcgagtgttggtagcactcgctttccttatttatatacagttactacttttccactaattttaaatttagcattaccaacatcagaaatcacatccaaaatcttaccgacctcggcatatttatccactcgaacaaaaaacttctcctgctttacatccgcattctcgtagaataccgtaaagccataccattccgccaattgatccagaattttctccaattccacgtcccggaaaaagaacatattatccttccagcaaataatttcttctacatccacctcggtcaccgtgatcacgttcatcacgttacccacaactgcatgttgattgggttttaacacaacttccgcatccttccttttcacttgcacgctacccttcaccaaagtcgttgccacctttttatccggcaggcacttcacgttaaactccgtccctagcacttgtatatctccattctcagtgtgtacgataaaagggtgtttttcatctctcgccacttccaaataaatttcgcccttgctcaaaaacacttcacggctatcaccaacaaaatctacgggaaacctcaattgggtctcttcattaaaccaaacttttgttccgtcagccaacatcacgtgatactctccacccttcggaaccaccacggtattatactcaaccaccacgttattctctgaagaatctttcttcgaataaacaagctcatttccatttgtgatggcattcgaggtaacctcttttttaccctccactctctgaagttgcaggatagaaccgtcttccagaaccagcatggcctgtttacgaaccggaacaggtaatttttcttcgacttgattttgcaccactatttccggctttattacatttccttgacttatgaagatataggcagcaatagccacgggtaaaatcagaatggcagcgtaacgcatcatctttatcatccggctcggctttttccttacctccatgatccgatcgtgaacctcccggctggtgatcatctttttcatttgcctgtatgcctcatcatcaatatgcaactcggcacgcaactctcgtaacctcccggcatcctcttccgacaagcaatcaaagatatccttcgtgattaatttatgtagttccttcatcatccttttgtcttatatccatgttacacatgaacaacaaaaatgtatgaaagaaagttcacatttaacttacattaacaatcgcatgatatacaaatatcatctacccagtgaatgtgtgaaccaaaaacgagaaccctttcccggctccgaattcaccccgatgcggcctcccacctgttccacgatactcttgcaaatagataatcctaaacctgtgccatgagcaaaactattcaatttcacaaaacggtcaaaaatctgtttctgtttttcttcttcgatacccacacccgtatctgtcacagatatctcgacctccccatccctcaacatatatcccacggttattttcccggaaggtgtaaacttgaaagcattattcacaaaattggaaataacctgccgtaaccgattcttatcgctgtacacccaacattccgacaaattgggagctatacacaaatcaaccccgactggaaccttcacccggagtgaagtcacgacatcctcgcacaactggcgcacgtccacccgatcatacacgaattcaaaagtccccgcctcgattttcgataaatccagaatatccgaaattaactgcaacaacaactcgttattctcctccacgataccaatatattgcgcacgctcactttcctcttgggcataagccaataaattggaaaaacctacaatcgcattcaacggagtccgaatctcatgactcatattcgccaaaaacgccgactttaaacgatccgattcctccgccttatccttcgctttgatcaacttcgcctcggtctccttcaattctataatatcataattaatacaaatcatctcgatcattccttcctgcgggcgataatccctcaccaacacgttcacccgcgtccacgtgtaatgcccatcagcccgtcggattcgcatatcattccgtaaatgtgtccgcttcccggcaattacatctgacaaaaaggcaagcatcatagcccgatcctccgggtgaaaatgcgagtgtacaccgataatctgcggtagaggcgtcccgatttcttctcccacattcttataccaactatccagaccgtacccgttacgagtcaaggcgttaaaatgcgcgtacccgacttgagcataatcccccaccaacgtgaaaaaatccttgaactcctgaatctggttatacgcctccgtggcttccgtccggtccagactgatcaacaaataattgatcaaattattttgtgcatcatacaacgtcgtcacctttgtcagtaaattcaacctccccgtcttcttagaaacatagagaccattcaatttcgaaaaatcatacaccagagaaaaactcacatcctctcttctcttcatcctttccctcatctcctccggtataagatgattttcaaacatattaattcccaaaacatcctctttcctaaccaacccgaacatctcaagatctttatcattcaaatcgacaagatacccgtctttatcatacaactctatcccgaccgggatattctgatatatattacgcagcaaacgttcactccggtccaacgcctcgtgggctgagaaggtatcggtcatatccgaaaacatcaatacgacttcatccttgcaaggagaatacatcacggcatggaaatatttatttttctcttccagatgataatttatatcccgtacaaccccgcttcgcatcacccgttccagatcaggcagccgttccacaaaatgcggatcaactttactagcatatttcccggtccaactattccctctcgtgttgtaaagaatctgagccatcgtgttcgaatccatgaaataataatccttcacgtgtccttcctcatcataaaacaatttcatccgcacataccccaccggcatatgtttaaacaaatctgccaagaactttttctcttcctgtgccttatcctccgacttccggagttccatgcaaatactgataatattcaccatcgaggcaaaccactggtaatcctcatttttccacacgtgaggcttatccaaaatgtcgataccggcatacccggacacgccgtcttttgaaaacatcgggataacaataagtgatttcaccccttgctccgtcaaacgccttttttcctcgcttgcctcttccggtaactcgtccaaactggcaaaaataatcggggacgcatttccggccaactgtttcgtccaccagggaatattactcatcgggaacttctccatgtaattctttttcttaaaagacttgtaatttcccgcctcgtaacgacacgtctgcgtgcgattttcccaatcgtactctataatataggtacacccctccggataatgctgcataatatcacccaaaatcttattgataacactgctcatatccccggaacgaagcaatgaaagcaacgagcgagagatactattctgctgggcaaacaaattgttcacacgttccatcgccgtttcctccgtatccatattctccgggacatcaagacactccatgaaaccacaggttttcatattcccctcggcatccacctccttggaacacaatttcactcgtacccacacgatttttcctctcacctcgatcgggtaaatctggtcatatatattctgggtttttccaaaacgaaattcgttcaccgttcgcaaacgataatcctcccggatcaacttacgaaaatcaacaaaactgattatcccatcttcgcccaagtctaacaattctcgaagaaaatcagaacagacatactgttttttagagaaatcagcttcccaccaacccattcgtgccttattcaataaatcttgaacacgtccactattgaaccgaccattattatccacgaccttacaaatttgattatattcaacgcctaatcccacaaaaatagtaaaatatccttcactccggcccccctttcaaaataaaacaggatattaaatctcgtttttcaatgcctctcgtattttagcgtaagcctctttcttgtaatgccgcacggtattatactccatgccaatttgttcagcgatttctttcgtgtcatatccttgtaaggctaattctaaaatacaacgctcttttcgcggtaagcgaccgatcagttcgtacatataatcatgagtatccacgacaacaaactcggtcatcagctcgggggataaatccatgtataccggacgagaattacgaataaaattcagacacaaatttttcaccgtggaataaagataggaacgctgttccgattcatttcgttcttccacgatcttgttataaccgttcacaaaagcctgatgtactatatcctctgcctcatcaggacaatagcgagcagcataaacacgcaattcatgcctcaacttgcaatatagtcgagcaataatcttctctttctcttccgtcataaatgccgatccctacgaaatcccccgttttctcacataatttcaaaacaggattaaaccttcgtttaataatcctcaaaaatagtaataatagcacacaattaccaaaattgatgtattttttattcttccctcaaaatcaaaaacatacatcaaggatttttctttagagtaacgtccctgacgaaaacagaaatcaatattattaaacgaaccattaat

SEQ ID NO: 10819 - DNA, 41937 bp, Unknown
  gut microbiota DNA sequence
ctttatcttgagtattatagcgtgcatggtatgttgatcgatacggtttttattttcaattacgataatagtggtgaggtagctaaagatactggatgggtgttgatggattacgaaaaattttatctgaatggagataaattggatacgacatctcccgaacagggtgattccacgtttacttatgcctttggaggaccggtactttatcgttatgacacgataaagaaatatgattatgtggcggaagcgtttcggcatattagtgttggaagtatgggaggagaaatgattgtaccctctattttagccggagataagaataattacgggaagccgttacattataagttaaaggcacataagcttattaacgatgtgaaagtgaatgaatatgggttgattcgaagttatctagtagacattatgggcgtggagaatgcttttgttgactttcctacgcgagaaatttcatctattggagagcgggatacagttacttatacagctattttggagaaaggaacgggcgatcgagatattcaagtaggggattctgttttgttggaaatggattatggcttgctggatgatgtgggattacagaatcgggtgttgagaagtatgggacgtgattctatttatttcttgtttaatgagacttggcagaaaaattatccaacagggttggtgaaaggattacagcatttacaagctggagattctgcacatattattgtaccttatggaatggcttatggtgcggtaggtacaacccgggaaataactttccgagatcgtactaaacttaaacaatatttaattcctccatactcaacgttatggtattgggtacggattcgtaaagtggtttcacctaaaacggaagaagaatagtttgaaaaataacagctaaatagaaacggaaaatgaaaagtaattattgggtaatgctgctttgccttttggcaagcggattcatcgggtgttccgatgatgatggcgacaactggaagaaaacatttgaggatgagcaggctaggattaaagacttcgtgtatagtaaggattccgatccgaagattttcaagtatcattatacttatctgaaagaagacatcgaggattatgcttacttgtttaattatcagaaagaagggaagaaagcaacgtatggcgatttcgtttggattaattacacgcaaaagagtttgacggggagtattattgattcatcagatccgagtgttgccgtcggtgccggagtttcaccctattatactttaggtggaccgatattgatgcaaatgaatacagatgcggaaaaatatatcgatccgttatctgatattttaatgaatattccggaaggaacaacgggaagttcgattgtttcaagtatcatgagtttgtcttctgctttagtttatcgagattataccgtggaaagtattgtggaagaggataatctgttggactatgagaaaagtatgattgggcggtattttgcagataacaacttagacgtttttaaagaagttcctttgcacgagggaaagaccgatacggttgctttgatagctaaaacgaaagaaaatgcgagcggagtttttgttcaagcgacggatagtgtcaccgtatgggcggaaggtagaattctggatgaactcaacccgtcgttgcgtcagtttttgaaaatggatagcgatgatgtcgtgacgtggtatttaccggatatgataaaaggaatttctttaactttacctgaacttaaagttggagaagaagctacaattcttttttcatcgggaatgggatacggttatagaggatcacgtaattatgatgggacttatgttgttccggcttattcaactttgttgtttaaggtgaaaattgttgatacaaaggaaaatcctaaaaaagacaaataattcgttattatgaatattgatttggaaaacactttggcgcttgcggtggaatgggcaaaagaggttggggaagtacaacgatcttacttcagaagcggtcatttggaacttgaaacaaagtcaacggtgcatgatgtcgtgacgaaagtggacaaactaagtgaatccatgttgatcgagcgcatcggcaagtgttttcctaatcatagcgtgttgggggaagagagtggggaacatgatgctcatagcgattatctgtgggtggtggatcctttggacgggacaaataattatagtcagggattaccagtgttttgcgtgtctatcgggttgcaataccggggagagacgttattgggagtagtgtacgctccctacttgaacgagttgtacacggctatccgggggaaaggggcttttctgaacaatgtcccgattcacgtttccggcaagacggaactcgatcgttccgtgctggccacgggtttcccttacgacaagggaatacaccccgtgaataatatcgataatctaagtcgtattctgccccatttgcgaggaatccggcgtatgggttctgctgcttacgatctttgcggggtcgcagctgggtttctggacggatattgggaattaggtctgaagctctgggacgtgtgtgccggagttcttatcgtgcaggaggcgggggggcatgtcgaacccttccgggaggaccggggtattgccattctggccggaaatgctggaatcgtggagaaaatgaaagagtatataagttaaagggggctggaaagtccctttaattttagtctttaaaatttattctacattactttacctcgaaagttctatcttggctctcatatttttgattttctctcttcggatgagggaaagtagttgccttagattgcctcgtttgacggcgacgaaagaatgatggtctttaacttcgattttgccgatgtcttcttttttcaagttccctttttggcagaggaaaccgacgatgtccattttgttgaccttgtcttttttccctttgccgatgtagagggtggaccagaatggttctgccggggcggggtatttaccgacggggtggtaggtttccgggatttcggttaggtaatccgggcgggcttcatctctgtcgagtaggagaaaagcggtaccggaggcattcatccgggcagttcgaccgttgcgatgggtgaaggattccggcttttcggggaggtggtagtggatgatgtattttatctccgggatgtccagaccgcgggaggcgaggtctgtcgagatgaaaatgtacgtacttccattgcggaatttacacagcactcgctcgcgttcttcctgttccattcccccgtggaaatactcgttattgacgcctttatcccacaggtaattactcacttcttccgcccgttcccgatagttacaaaaaatcagggtaggaccttcctctagatcacgcagtagcttgtagagcgtgtcgagtttgttgtaaccttcggtgtacacgcttttgagtgttaacttgatcggagaggctccttcaagaaaatccaacacgagaggggcccgtagacccgtgaattccggtatctcgatggccgatgttgcagaggttaagatgcgcttttgtaggtgtggcaagtgcgagaagatggttcccatatcttcttgaaatccgaattccaatgccttgtcaaactcatcgagaatgatggtggagatagagtccgtgtcaattgtcccccgggtgatgtgatcgagtatgcgtcctggtgtcccgatgatcagcgtgggcgtgtatgccagactgcgactctccactttgatatcatgtcccccgtaacaacataccactttgaaaccgcttttcagggaacggaatacttgctctatctgcaaggccagttctctcgatggtgttaggatgatggcctgtgctttcgtgttattagggtcaagattttccaataagggtaataggaaggctagggttttacctgatccggtgggagagagcaggatgatgtgatcggtttcccgatgagctttcaacgaggtttcttgcatctcgtttaacgaggatattccaagggcttgaagggaagaaaacatggtaatttagtgattttagattttaaattttagattagcctccttctggcttcccctttccaagggggaggatacgctgcattgaaacattgtagtgctccttgcgttcgtttctccccctgtgtaagggggagttagagggggtagtttttcattctacattttacatttaagtatctagtgatttataatcacctaatcggaaatcactaaatcacttaatcgatgggattactgaattatcaggctatttagttttttcatgatcttggggcgagagaacacgactttagcttgtcggtaaccttcgtccacgattttttcgatgttattgaggtcgaacatgctgtatcggctgatgtgtttcggcacgataacgatatcacataagcgggtgtcgatgttcatgtttgacagaatacccatgtggaaggagcgttcggccaagtggaccatgcttttgatgtgattacagggctccagcgggtcgatatgtacgccgataactgtctcgcataactccctgatcgggcgcacgggtagattcataaataccccgccgtccgagtactggtggtgattgatggtgacgggtacgaacacgatcggtatagaacaggatgctaacacgcaggggactacttttcccgtgctgaaatgcgtgggtatgcccaagttcatgttggtggcggtgaccactaacggtatttgtagttcctcgaatgtttcaacatgaatgaactcggataaccttttttccattccggtcatggtcatgattccggttttagagactaaaggtcgtgcgaagtcgagcagttttctatcttgaaagaatttaagcccctcctctgccgagtgaccggatgcaaatataagcccagctatagctcctgcgctggttcccgaaatgatgttcggtttaattcccagctcttgcattgccttgtagacgcctagatgggcgaatcctctggctccccctccacttagtgccaaacctagtttgtatggccttctctgttgattgttttccatgtggttagtgtgtgatagactaaaaaaggggcttatgcccctttttttattttactgtagccatgtgagcgattaactcgagaactttgttggagtacccccactcgttgtcataccaagaaacgagtttcacgaagttagagtttaatgcgataccagctttagcatcgaagattgaagtgcgagcgtcacccaagaagtcagaagaaacaacttcttcttccgtatagccaagaatgcctttcaattcattctcagaagcctctctcatggcagctttgatctcttcgtaagttgcagctttttccagacggcaagtcaagtcaaccacagacacgtccaatgtaggaactcggaatgacataccggttaatttgccgttcaattccgggatcactttacccacagctttagcagctccggtggatgacgggatgatgttaccagcagcggcacgtccacctctccagtctttcatagaaggaccgtctacagttttttgggtagcggtggttgcgtgtacggtagtcatcaaaccttcaacaataccgaatttgtcatgcattactttagccagcggggctaagcagttcgtggtacatgatgcgttagatacgatagtttgtcctgcgtaggttttgtggtttacacccatcacgaacatcggggtatcatcttttgacggggcggacatcacgactcttttggccccggctttcaagtgtgcttctgctttttcttttgttaagaaaagtccggttgactcaactacatattctgcacctacctcgttccatttcagatcttccgggtttctctctgctgtaacacggatagcgtgtccgtttacaacgagttttccatctttagcctcaacggttccgttgaaacgaccgtgcatggtgtcatatttcaacatgtaaaccatgtagtcgacatcgataaggtcatttattccaacgatttcaatatcgtctcttgtcattgcagctctaaaaaccagacggccgatacgtccgaatccgttgataccaactttaatctttgacatttgtttttttattatttggttaataatgatgttaactctctcgtttaatgtcgtaaactcacacaaaagtatggataaaaaaatgaaaaacaaagaacttttagattagttatacgcgaacgttttttttcttaaaaaagtttgcgcaaacgttttaaatatttatctttgcccagcaattgaaggaaatgttttttgcttttataagtgtagtaaatttattgttagtgtgttaaaagaggccaacaggcctctttttttatttagggcattgatcttttaattgagtattaaattccttttatttgtttgatgattaaaactcttttggtagcaggagataccttgtagcgatcgtctatgcgatggccgaccacccaaatgatgtccttgccagattgtaagagaaggcagtcttttttctgcttggcgctgaatttcaagtctgtaaaaaagtcgctcaatttctttttgctgcgtttcattccgagagggcagaaccagtcacccatggaccagtggcgtaatacgaggggataaatgatcttgtcaaggtcaaaacaccctgtgttaagatcacggggaacgataaaagagtcattgatgtcttgttcttcgagctggaagatgctgtcatcgatgtggtattctccactatctgccaaaagagtgcgtttgtcttctttttctaaaatattgaatagccgccagtagatcctgcctttcgtaagtaagtattcttcagcctcgaattgttttccgggaatggcgtcgctgctttcaagaatatcctcgatttgtgtagcgttaaaaccatatggccgtaggatctcgaacaggagcgtgtaaggggctggggctgccagtgtcttttgtatgtctataagggtttctccattttcctcgctaatcacttcttctttcagacgatcgatgccgtaacggtagatttgctccacttccttgagggtgttacagttttcccgtaccgtgttgaggaacgagggattgatgtccttacacacggggatgatcatgtggcgtattttatttcgcacgtagtcgagcgagttgttggtggaatcggttcgataccccagttggttttgctcaatgtaagcgatgatctcctcccgggaacgggacaggagtgggcgcagaatgcgatctttgacgggacgaataccagtgagccccttaatgccggttccgcgacatatattaataaagagagtctcggcaaggtcgttggcatggtgtcccacgacgatgtagtccattttcttcttcttgcgcatttcttcgaaccagtcgtagcgtagttcccgtgcggccatctctatgctgatgccttttttcttggcgtattcttgggtgtcaaagcgtttcacgctcatggggataccgtaggtttcacagaaccgtttcacgaattgttcatccatgtttgattctttgccccgtagattaaaattacaatgcaaggcgtgtatgcgcaggttcaagtacttaaatgcgtggagtaaagtaattgaatcggcccccccgctaacggcgatgataaatcccgctttctcgtcaatctcgtgttccttgaggaactgttttatcgtgtccaacataacctagttcttttatgaatagcctaaattagcgatttttcttgaaagaagaagggaaattaagaataaaaatgcggattttattttaccagaagcgttgcttcccattttgaattgtgaatatgcgctcttccttacctgccgtgtgattgcgtaaccagtagacagcgtttgaaggaatattttcaaactcaatagaatatcctgtggcaattttacaaccaagggattgccaaccgttgaggtcgaaatagaaaagttcatactcgttaccggggtatataccattagcatcgttacggggtaaataaatcatttctgatatacagacaggatggccgaaatccacgatgagttggtgggatactctgccgtgggaaagtgggtcattgtcgaaaagattggcgagacgagcacccttgccttcgggatctatgattgttccggttagatcccggccccggttgtctttaaatttccattcggcaagttccacgatttttgagtgattaaatcgccagtaacggtattttttcgtggtgtcaaccgggacgatgacggggtacatgttgggattgcgggtgacgtcgtggatgtgtgtagcattccgaaacgttgggtcgttcgaagcttggaagatagccccgataagagcgttgccgtggtacactttgttgtggtgcaatgggtatttacgggtgagaatgagagtttgtcgtcgtgtcgtatcaggacgtagtttgacggttattccgttggcttgcagaataaaaggatatgtcaagttacgttggtattccttttcgaagtagaccggaaaatatatgatgtcgggacccatggaatgaaagcagaatttgtcttgttgcaccttgctccagtcgacaatccgaagttcccggccgttgaatatggcgagataggcgtgacgagtttgtacggggacggaggctgtaatagtgacatccgaggtgtgtaggtatttatcggtgacatcccggttgaagggatcggtgaagaacgggggaatatattcatcctcttcagggatggggattggattggccgagtacgtgcggcgatatactttcggggcatttttcatctcaatttgtccggagagaatgtctttgtttttggtatcaatgataacggtccattcgtggaaaccgttcatgtcggcccagcagggtacgtggtctatggccgcgggaatacccgccatgcgatatgccagtagttggagttggctggagaagacgcattctttggtcgagatggggattcccactagattatcatttccataatcgaggcctaaggcatgaccgtagacgatctgtgccatattgtagggggaatgtttttggttgtcaaagtacaggcttgcctcttgtagacgattttttagccgtaaatcaatggaatctcgccagtagtcgagggactcgttgccaattcggtagggtaataggtattcgagaaaatcatcgaaagtgaggttttcgagccaaggactggtggtccataaccggaaggcttgatcaatttggtggatgaggtagtcggctttcacttgttcgatatccggtttcgcccggagttgttggcgggaacggggataacggagaggttgcatgagaatgacttttttcatcaagtaaggtgttcccgtgctatcgatgacctgttggagttgttggaggtagggaccgtcgagagagtagtggcccggcatgttctcgataagaaaaatggctgcttcccgtttaaggctgtcatcggaatagtgtttcagtactttttggagttccggcttgttgtccccggcaagtttcagggcttgttcgagctgggagttagcttcccggcaggaatgcaggagagtgaataaaaacagataaaaaataaggcgcacggtctatttttgtttgctggttaatattataatgcaaatgtatttaatttattcaagaatgattattaaaattattttttatctttgtctagaaccaaataaagaaaaggtcatgaaaagggtatttgtttttgtcgtttccttgttggtactgggaagtttagcaagagttaacgctcaggaaaaggagacgctggtaaaggttggggatgatgttcccgaatttgttgtggagatgtttgatgggcaaaagatcaatattaaagatttaaaggggaagatagtattaattaatttctgggctacgtggtgtcctccttgtcaagaggagttgaaacgggtgcagaaggagattattgatcgctttaaagggaaagatttcgtgttcttggctatttctcgcgaagagagtaaggagcaggtgaagaagtttcgagaaagaaatggatacacgttccctatgggacttgatccggaacgtaagatttattcgaagtttgccacggcaaccattcctcgaaattttatcattgataagaagggaaagatcgtggagattgaggtcggttatactaaggaggcttttgcaaagatgattgaaaaactggagagattgctgaagtaggaattttgattgatgatttttaatggctctcgtactaacttataataataaattgttagtacgagagtttttcttgttacgtagaagtgtaagtgggtggggcttgattaaatgctttaaggaaagattggaattcttttgagaggaagtggcatattattcgttaaatgtaatatctttgtctttgaatataaataaaggatcgtttattgcgcctctctaaatagtgctattttaacatttttatttatatctgcaaagtacaactatgtataaatcaatcttatacatcaaaagtcatctttgtaaataataaatgcaataaacgatcgttttttgttatcaaggatgcaaaaaatagagaagataaatatacgaaaacagggggtgtttgatagctattttcggcgttattatcaaacactttgttactttgcatttaattatctgaaagagcaagatgaggcggaagacgtggtacaagaggtgtttatgaagcttttgaattgggatgaaagttttgataacgaggaacatttgaaacattatctttataaggctgtccgtaatagttgtttgaaccaaataaaaatgacggggattcgtgctgatatattggaatctattcaaaagaataccccggaagacgagaacaattttttcgtaaatgtggtgcgagcagaggtctatcaagagatcatgggagcaattcaagacttacctacagaatgtggaaggatttttaaattagcttatgtggaaggttttagtaatgatgaaattgccacccaactttcaattagtgtaaataccgtgaaggctcaaaagaataaggcgaaaattcaattgcgggaaaagttaaaagggttgtatccagtgttgttattttttgtataaaagaaatcgtcttttgcgtaatccttttttgtgatagataaaatttctaaaaaataaagtttaggaaaaagaattatttcttttagtatacatgtatatataaaaagggaaattccgaatcgtggaacccatccaaaagtttagtttatatgagtacttgacgaggaaggattccgtgtttgacaagtatgcaaacgtgaaacggtttgtgaaattggacgggtgatcttggcttacgttaattgaaaataacgcttatggtctggtatatcgaagtgttgttgcgcataccggagggggagagggaaaatcatgggtagagtggcgcacgaacttggagcgggtgggaaagtacgagttgtttgtgcatattcccaggttttctgctatgaatataatgtataaaagtaatttgttatcacaatgggggacacaagcatatacgattgtgttaccggaagctagacatgaaatttcaatcgacacttctgattgcgggtggatttctttgggtgagtatgagagtacctccggagagtgtgttgtcatgttacatgatacgggagattcgaatcatattattattggggatgcggtaaaatggatgtacgtgggagagtgatgatggataaaaatgtataatttaaaattattggtgttgattctatgtgtagagagacgatttgtcaattataattagcttttagtatgagtactgatacgtgataatcactaattaatgatgttgaaaaatagatcaactcaaaataaatgtagtgagattttatgaaaaaagttgagttttgcgtaatcctttttttaaagttatttgtaataggggaaattttacaagagagatgaagaatccatttgaatttgcaaaagagttattgcggtatacccgaggggaattttctaaggaagaggagaaaggaatagagcaggtgttgttggaagtgaagggaatgaatacgttggtggaggagctaaaggataaggaccgaatcgagtatgaaatgcatattattgcgaagtttaatacggaaaaggctttaagtaaactgaaaaatagaaaacaggtaaaaagaagaggaatattatcttggattgcggcagcgtctgttgtggtaattgcaggagtttctgcttggatattgttaagccaagaaccggatgtagacaatttgtccgtaacagaaaaatttgaaccgggtaaggctattgtgacattagagatggcatccggattaaaatatcgtttggatacattatcttctgttgttcgtaataatcgggtaaatgttgcttttgataataatgatggagtactgaaaataaaagagcaagattctttagcagatggtgctacaaaagaaattgggtataacacggtcaatgtaccatatggaggaacgtatacggtggaattgtgtgatggaacgaaggtatacttgaattcgggaactacattggaatttccttctcggtttgacggaaaagttcgtagtgtaattttgaaaggagaggcatattttgatgtagctcgaaatgtaagtaaaccgtttgtcgtggaggtggatgaaatgaaagtgaaggtgttgggtacatcttttaacgtgaaatcgtatgttgatgaaccaggggtttacacgacattagtagagggtagtgtcgctattcttcgggatgggcaaccggagaagaagatcaaaccgggagaacaagcttattataataagggtgtcggaaccttgagtattgctgaagttgatgtcaaggaattcacgtcttggaaggatggggtgttttatttcaaagacattgctttagaagaaattttgagaatagtctcaagatggtacgatctggaagtattttacatgaatcagggagcgaagagtgtgatatacagtggtaaattgccaatgtattcttcagtagaggatgtgttgcggaagttcgagatatctggagatgtacgttttgaactgaaaggtagaactttaactgtttttgataaataaaaacgggattgggcaatcccgttttgtatacccgctcgttgggcgacgagcagaataaatgtttaatttaattgaattacaaatctatgaaaaaaaattgggatttgttgctgaatttttggcaatatcggaaatctaaattctttttgcgcatgaaaatctcgatgattttattattggtgggggtgatgcacctttccgctaatacgttttcgcaaacgaaagtgtcgttgaatatgaaagatgcaacagtgcaggaggtatttttcaatttggaaaagatgacgaactataccttcctttataagttggatcttgttaataaatgtggtaaagtaaatgttgatgccacagatcaggatttcagtcaattattgctggagttattaaatccactaggcttgtcttttacaatagatgatcaagtggttgttatcactgcaagtaaggccaaagatgatgttaaaaaagagcttactatcaaggggcgtgttttcatgaaagatagtacgggagttccgggagcaacagttattttaaaaggaacttcgacaggtgtaattacaaatatggcaggggaatttacaatcacaattccttatacagaatctcctgtattgatcttttcctttttgggaatgaaaactcgtgaagttagatatgttggacaaaaggagatgatggtgttgatggaagaagatgtaaaagcaatggatgaggtaattgtaacggggtatcaacgtattcgaaagtctgatatggtaggatccactaattccgttaagcgtgaagatttgtttttcaatggaacgaattcaattgaacagatgttacagggaaaacttccgggaatggtggttatgaatacgagtggtttggttggtaaacgtcagaaagttcgtgttcgaggtacttcaaccttgttaggtaatcaagaacctgtttgggttgttgatggaattattcaagaggatccattaccctttaaaacacgtgaattagatgctttgggtaatatttctcaagacaattttgatatggtaaaagatttcgtaggaaacgctatttcttggttgaatcccaatgatatagaagatattactgtgttgaaagatgcttcggctaccgttatgtatggtgtgaaagcagctaatggggtaattttgataaaaacaaaacagggacaagcaggtagaatgtccgttaattatagtggagatatatccattactcctcggttgacttatgaaaaaatgaatttaatgaattctaaagaacgcgtggatgtttctcgagagatttatgaaagaggattaacatcagataaccgtccgttggaatcaatcggttatgaaggagctttagggcgctatttggccaaagaaatttcttatgatgaatttaatgatgaagtaaaaaagttagaatcaacaaatacagattggtttaaattattatttcgaaatagtgtaagtatgaatcatagtttaagtatctctggaggaacagataagattagttattatggttcagtaaatgctacaatcaatagaggaacgtcaataggaaatgaaagtacgtcatatagtgctgctattggaataaatgcaaagtttggagagaaggttaatttggggttgagaataaacggttcgacttcggaaacagatggttattatcaagttgatccttataattatgcttcaacaacaagtagagtaattccttgtttcgaaaatggtgaaaagtttttttataaagataagagcggttatctatataatatattgcatgaaatatctatgacaggaaatacaaatactaatcgtagtatgggtgtttcagctagtttccgttgggatattttaactggtttgcaatttgaaagtacttttggattgaatacctctaatattgtaggagaatcctatgcagatgaacaaagtcattatattacggaaatcagaaagtatgaatttggtacgcaacgtcctgccgatgatttatatcaacgttctccgttacctcatgggggtgagttgaatactacggaggatcgtaatttcaattatacatggaggaatacattatcttataactatgttcttgcagaaaaacatcgttttagtttgatggtaggtcaggaatgtcgaagtaataaatatgatggggttgcttctactatttatggttatttcccaggacgaggaaaatcagtttctttacctcccacgataataaaaaatcagaatggagaagatcaacgtaatgatttactcgataaatataaaactgtagtaacagatcgtaaatctaattatatcggttattttgctagtttcacttatggatttgatgaaagatatatattaacagctagtttccgttcagatgcttctaatagatttggccaagatacaagaaatcgtttcttacctgtatggtctattggaggacgttggaatgtacattatgaaccttggatgcaaaatcagcaagtgattagtgatttaaattttagagttagttacggttggcaaggaaatgtggcagaaaattatggaccggatttaattgctcggattggaagtggaacagagacgatagatcaaaaccgaacaggtgaatacatgatgtttattaaatcgttgccttatggtaatttgcgctgggaaaaaacgaaaacaattaatttaggtacagactttggattattccaaaataaaattacatggacaatagaatactataataagaaaaccgaagatatgatcgtagaaaaagaggttccttatgcttatggtgttacctcgatgccaattaatggtggaagtatgacgaatcaaggtattgaggtttctgttggatttactcctgttcgtacaaataattttacatggagtatgtctataaactcttctaaaaattttaatgaggtaaagtcaactgtaaatgaaaatgaaaattggagagcggctgctagtggaagtctaaacaaagccggatatgcagtatcttctttctgggcatttgattttagtggcttaaatccaaagacagggtcggcagagtttaatattccttctgtggaagaaaatccggcaggacaaacggatgctactacttttatgaaatatatgggaacgttggaacctgactttaccggaggtgtttctatgtcattccgttataagagtttatcactatcttcatcgtttaatctacaaataggtggaaagaagtttttgtatgaagtgtttgatgaatcaatcgtgacttcaactccaagtgcttacgttaatttgcctaaggaattgactaaaagatggagaaagcccggcgatgagacgtttacagatattccagcattatcttcaacggaggcttcgtattacaaattgccgaatggtgcttctgaatatgctcctcgtttatataactactcggatgtacgggttgtgaatgcttcttttttacgttgtaatgctttatctttaaattatacgcttccagagaaatgggtgaaaaagatgtatttgaaaaatttatcgtttagtgcttctgtaagtaatccgtttataattgttagtaaagaatttaaagggatggacccggaagttgcaactggttcacaaccaatatctcgtacgtattcatttggtattaatgttagtttataatgatagacgatatgaaaagttttttttattgtttgatttttatggctcttagcatcggaataatgggatgtggtgattttttggaagagtctagtcaagatgaagtacgcccaagtacagtttcagatttagaacaattattattaggagagggatatctgagaaccgattgtatatatccttatttagagcttttgacagataatgtacaaaatgcttatagtgacaatgaaagccatgttaccgtattgcagcaaggattgccagtatttacatgggatgttgatatgtttgataagatggaagagttgtatacgactggaatagatacttgggaaaaattgtattccaaaataaaaggatgcaatgttgtacttgatatgctggatgatgttactggagatgagaatgaaaaattgaatcagagaggtcaggcattggctttaaggggatattattatttgttgttgataaatacgtttgcacagccatataataaagaagggattgatctaaatacagcattgggagttcctttgattgtgagttctgcagtaaaagatgaattcccagcaagagagagtattgcaaaagtatatcaacaaattgaacgtgacttgttagaagctgtggatttgatggataaatatgggcagaataacatacaatacaaagttacccctttattcgtttataatttgctgtcacgtatgtatctttatatggaaaattggggaaaggctgcagaatatgcttctgttgtgattacaagaaatcctcaattgcgtcgcttgtctgattttgtaacaatagaggttgatgagtggtttggtgatgaaacacttacttatgatgtaaatggtggtgtgttaaattataacagtcctgaacttatatggggatatggagataaaaggatcagtgaaattcttttccaattacctgatatttttacatatcctggttcttcaccaatattttcagtgtctgataaatttttggcacaacatgatgtaaatgatttgagaccagcttgctattaccaacggtattttaagtcaatttttccgatggtatttggttcgatatatgggtctaagtcaaatttaaatgatttgtcgaatcctcatagaggaatgagggttgctgaggcttacctgaacagggcagaggcaaatattcgattatttttggaaaatggaaatgaaaatttgcgtataagtgcattgactgatttgaattacttacgagaacatcgtttccgtcagccttatgaagatgttaatataacagatggtcaaacattattggaattttgtttggatgaacgtcgtaaggagttggcttttgatgatcatcgttggtttgatttgcggcgttgtggaatgccagaaatgattcatgagataactattaataaaggacaagtacaagagtatcgcttggcaaaagggagtgatcgttacgtattgccaattcccaagaaggtattggataaaaatccggctttagtacaaaatccatgatcgtatttattggtaacgaattaaatgaatgaagagtatgaaaaagatattatgcttatttttagggtgtgtcttatttatcagttgttatgatgaaggtaagatcaaaccatcagaggagcctgagttaatttatggaaaatatactttacctcaaggtgatcatgactatgatgatgatattgtagcattttataaaaaatatggttctttattattgtataaattcactacaaaagattttggatggtctcctacgggtaatgttgcttgggatataactacggatacgataattattcctggtgcaggatctaaatatgatgctcagccggcagatgaattgtatgtaagtaatcaattggaattattgcaagataaattatttaattatttgtctgatacattgatgtcgtgcttgcctcaaaaaatattactatgcagtactttagatttggttccaattggattagggtataatcctaaaccagatgaacgtcaacttttaaatgtatatgctggtttttatcatattgctgttaattggggaagtgataagattttgacaatgacggctgatgaacgaaatcagtttaaaaaagatgtgtgtattgcttatttcgggtctattgtaaagtctttgggatctcctcaagaatttttcatggtttcaaattattcagataacatatctgcagatgatatttatgctaatgggatattaaatcattaccatagaacaagtttagagaatgactggtttgactatctgaagttagctatcgaaaattctattaatgatttggaagctgagggtggagtattaagcgaatctgtggatgtcaatggaaaaattcgagaaaagtacacgattatgatagacttttttgaatcgaaatatgattttgatattcaagcaataggaaacgacgtggaataatatgaaataaaaagagtgtggtatatttatcacactcacttaaaatctgaattaaatgagaattacatatactggtgttgggttgttctggatatggttattcgtgaatgcgtttacactatctgcgcaggaaaaattagagttatccggtaaaattcgggtattggagcctgtggagataaggttggaaaatataaaaggagaagttttacaaaaaacggtagtaaaaaataatagtccattttctctacaagcttgtaaaattgaaccggacgtctatttgatttgttttggcgagacaaaacaaccaatttatttaaccaatacccaggtaacaataaaaggcttttacaattgtcgggatgtgaagagtagttccttaaactttacagggattgatatatattatgaattgttgaagtggttgcctaaagaggaattttcacaagacaagacgattgttcctgaaataaagggaaagctgaaagggaatatgtatagtgcgttagcttatatttcggatatgtcgacgtacgagccgaacaagttattattggattgtatgtcagaagaagcattgaaaacgacttccggcaagtggttaaagcatcggacggatagcttatatcattattcgataggggctccggcatatgattttacatttcaagatgctcaggggaaaaaagtgagtttaagcgactttcggggaaagctggtgttagtggatttttgggcatcatggtgtggaccatgtcgacatgagatgaaaaatctgttaccattatataacgaattgaagggggatgatttggaatttatcagcatatctttggattcgaaagaagagaactggagaaagatgttggaagaagagaaattaccttgggtaatgttatgggatgaggaaggattcgtgattggtaatgagcctaataaaattcaacgggcatacggtttttatagtattcctttcattgttctgattgataaagatggacgtttgttagccaaggatctgcgaggagaacgggtgaaagaagagattttgaaggccagagctaataagtgatttaagataaataatttataattaggggttaacgatcagtatggatagatcgttcggtaatgtattgtaaaaaataaaactgtaaagtatgaaaaagtatttcctgttattgatggcgagtgcatgcattagtgttgcagatgcacagttaataaaacagaatgaagaacaaaaaaaacaagccgatttggattggtataattgttcttttgataaagatggtgtgtatggagccgaggtgaataaagcgtatgattttctgaaagggaaaaaaataaagaaaagaccggttgttgctctaattggctcaggaatggatattgagcatgaagatttgaaacaggcaatttgggtgaatccgaaagaaaaggcagacggaaaggataatgataaaaatggtttggtagatgatatcaatggttggaatttcttgggtgggaaagatggtcaagtaatggaggcaacaatgcgggaaggagatcgagaatttttacgtctaaaagataaatatgccgattatatttttgatggaaaaaattacaataaggttattgatggaaagttgactaaagtagctgatcctgagaatatagaggaatataattattatcgaaatcaagtattaccagagtccccaatggctggtacttatagtggttggcaacttacctatgtattgaaagcttatgcagataagtttgatcaaatgatgaaggaacgtttccccggaaaagaattgacggaggctgacttcagtatctgttatgatccgaaagctcctcgtgattcattgtcagaagtttcgtttatgatgtgtgccatgggatttggtgtttataagacagacaaatgggaaactgtttatgccgggataaagagtggggctcaaatagaacaagctaaagccgaatatgagagaaaagtaggacaatttggtgctgatggtcgtaaagatattattggagataattatttggatatcaatgataataaatatggaaacaatgtcttgttaacagcggatgctgctattggtacgatggaagccggtatcattgttgctaaaagggagaacggattaggtggtaatggtattatggatcaagcagagatcatgacgttgagagttgcggctaatggagaaccttatttgaaagacatcgctttggctatccgttatgcggtagatcaccaagcagatattatcatgttgcctgtccaaaatacactttatcctgaagatcagaaaaaatggattagtgaggcattggaatatgctgagagtaaaggtgtgttttgcgtcactccagcctgggagggtgcacaggatttagcagtagaaacttattacccgaaccgttggatgacaggtaaaaaagaattaacaaatttaatggtggtttgttcttctgataaaaatggaaatccctcaatgaattctaattatggagctaaagaagtagatttgtatgccccggggatggaaatttattctacttacacgggagatacctaccagagcggaactggcttaggattggcggctgcaacgacagtaggggttgctgctttaattaaggcttattatcctcatttgacaggaacgcaaatccggaatattttactggagacagttacttccagaaaggatgcagaggttgaaaagggtattattgtagatgggaaaccgactcaagatttattcttatttggagatttatgtctttctggtggtattattaatgcttatcaagctgtagttgctgcagataagattgctaaataaggaaaggaatatgaggatgagattgatttttggaatattattgtttttgattgttgtgccactttcggcacaacaagtcaaaagcgtgatcccttatcgtatggtaggggggaaaatgattgtggatatgactataaatggacaggttcgttcatttatatttgatacgggagggcagatggctttaaccggagaactttgtgaagaattgaatattccggtagtggattcggtgaaagtaacggatgtgaatggtaaggaagtggggttacctagagtggttgtttccagcttgatgactccggatgaacgaattaatttttcaggagccccggcgatgaaattatcaacaccttctccttttgaatgctttcatgcagatgggttgattggaagtgatttgtttaaggatttgatcgtagagatagacggtaaggcgaagacaataactgtaacttcggctgaaaagagttcaacggtttctttgcgtaagatgctgccgttttcgggaaaaggttttatgccgattataaccttgcaggcaggagctggaaatagtttggttgcgttatttgatacaggatgtcctagtttcttatctttaaagaatagagattacgaaaatttgcgttctagcggggcttttcaggtgatgagtgaaggtattggaggaggatcaataggagtgggaggtatgacggaatctaaaatttcgtatcgggtagatttgccacttttatcggtaggaccaacgaaatttaaacaggtaacagctgaaactgcaactccaccttataccttattaggagtgaaattattggaatacggtaaggtcactattgattatccccgtagacgatggtattttgaggcttacgagcaggaatttgatatgactagtaagcattataacgtaaatttacaggtaaaggatgggaatttagtcgtggcaaccgtgtggtctgccatgaaggatgtcgttgaagttggggataaagtagtaaagattaatggaaagcccgctggtaaatatgatttttgtgagagtattatttcaggtatcccagaattgaaagagaagaagaaaacaaaattgacaattctcacgaaagatggtgagaaagtgatcgtttaccaaaaagaataagatatgttgagaatacaattcaaaacgtttttgtgtggtatttttatgttttctttcgtgcatggatttgctcagcaacaaccgacaaaacggatttgtgatactattcattatgagtttatccaaggaaagattgttataccggtagttgtgaatggggtgaaggtgaagtatattgtggataccggaggacagactggaacggactgggagcatgtaaaagccatggggggtgttgccacgggagcatccagatcaatatcggatcacaatgatatgaaggaactttaccaaattgcagaagtagaaaatgtgcaattgagtccgaattacacgttgagtaagatgaaaacgatggttctccctgttattggaagttttaggggaataggagctgttgggatcttaggtggggatgcttttgcccagtctgtgattacttttgatgcgagaaaacagatcatggttataaattatccttatcgtccggatcgtttgaagttaacggatggggtagagatgtttcctggagatacacatcattctatcattaatgtaaatttaggtggggttgaaaaaaaagtattgtttgatacgggagcagaagggtttcttatgttgacggcaaatgattttaaagatatagaagccgcgggtaaaggagaaaagacggctcatgggtttgggattaatggtgtaggattagagggtctgagtcatccggtggatatgaacaaggttaacgtgaaagagatgactgttttaggcaaaaagttcaccaatgctgggagcgttatttccgacaaatcgacgactcttgttggagttgatttactgcaatacggaaaagttgttattgactatatgaggaatcgattctattttttcccctttgattcggaaattgcagatatgggtggagctcctaaaacttggaatgtaagtatcttaccggctaacgaacgttttgagatcactaccgtatgggatagtatgaaagatgttgtgaattttggagatcaagtcgttgatattaatggaacggatataacaaaatttccgatgagtcaaccggcagttgacagtgttatgaatgccataaaagagaatgtggggtatattgttgtattgaaggatgggcaaaaaaagaagatagagattagaagagagtaaggacgtttacaatttatgatttacgattatgattaggaaaaaaataataatggttttgagtttatgtttactgaccctgggaacatgggctcaagcaaagaacacctccgtggaggtgaaggattaccgagaggtggatggaaagattatattagaaatggttgtaaatggggtaatcgctgatttcgtgttagatttggccgggcataatgcaatattaccggagtatgtggaaaaattgaaaatagatcccaatgttcccggagattttcgttatgatacatttcagtataaaaaagtttcgatagaaaagtctgtgaagattggaagtatctcttttggaaatagtgtatttgggaatgaggtggctgcatttgtgttgaaagatgaaccttatttgcggaagttgggtgttgctggggtggttggtagttctctgtttaataatgttgtgttgacaatcgattccaagcggaagaaaataacgatgagtaatccttatcgcccctcttatatgaaattggatcatcgttctaatatggatttgatcccggcttcaggtattgtttgtcctgttgtgctagatggagtaacttattctttgttattggatacatggaataacgggatgattactttgaatgcggcagattttgccaagttaaatggtaaggatgggggaaatgtaaaggttagtgaaggatatgcgtctgcggaaatagcagcaaaaagtaaagttgtagcagcatgccacttcgtgaaaggtgatttttcggacattactgttgctgaaaatggatcattgcctcgttctgttatcgggaatgaaattttgaaacaaggtttactttctattgattacgggaaaaggaaagtgtattttcagccatttgatttagccgaggtgaaggatgaagtgataggtgctgacgaggtaaaagtggaatctggtaaattgaatccgattactagggaatattttttagaacatgtgtatgattatcggaaaagttcggaattcgtgtttaaaggagacaaacctgttgtgattgatttttgggcaacttggtgtggtccttgtatgcgtttgattccggaattggagaaaatggctgaaaagtataaagatcaagtgatatttctgaaagtaaatgctgataaagagaaagagttgtgcggaatgtttaatattgttgctttaccgacagtgttctttatacccgtgaatggaaaaccgattgtggagatgggggctactccggagaaatacgtggagatcatagagaaacagttgctaaagaaataattaacaacaatagattatgaaaatagcaggaattatatttttgttgttcgtgtctttgagtggaatggcacaacaggccgaatcaccaaaagagtacgtgataaaagcgtggaatgagttccaacttccggaaaaaggagcgatcaaagcaatcttagctcagcgggatcagattacacgttacctaaaagcaaataatgcagctgtagaggccgaacaggagaatggtgcgcaggcaattcgccgggctgcagatctgtatgatgaaggagaagatgctcaattaaaatcttccgagattaaaaaactattgaaaggtgtggatttatcgacgaaagagtttgtgaattgtactagtttggaatatgtgattgaggactatttcggactgaaggctgttgccgaaggtgctcccgtggatcaagcttggggaagtatgtggtttaatactacggtggaaacgattggtaataaatatgattatcagagataccgtcagattcttgaattgaataatccggagttgtcgttagcttatttatcatgcctgagatcagttttccgttataacggatacacgaaaggtttggatgagattcgtccgttatttgataaaaatatgccggaaggagcattaaaggatgagattaatggattgtataagagttacgaacacttgaagcaaggaaatgtagctccggcatttacattgaaagattttaggggtaaagaacattctttatcagattacaagggtaaagttttagtgattgatgtgtgggcaacctggtgtggaggatgtattgctaaactacccaagtacatggaaatggctggaaaatataaggatcgtgatgatattgtctttattaccatttcaatagatgataaaggggcttataatagctggaagtatgcattacctcgtttgaaactgatgggtatgacaaatttgttggcttccaaaggagagtgtacttttcagaaagactataatattacagggatacctcgttatttcttgattgataaagaaggaaaaattgtttccgtctatgccccgactcccggtaaggattttgaggcgttgattgatatgaccttgcaaaaataataacgaacaaaaatagtaactggtatgaaaaaaattgtatggtttgtgtttttgtgttgtatcatggtagggcaacccgtttgggctcagaataaggtaaccgaacagcaaaaagtcgagtatgataaaggtaatcgagaccaaaagtacctaaaagaatatatcgaggcgttaaaggctgacgggcagacggaaatattgaatggtgtggtggatgagtatttaatggtattaccattaaatgagcgttactccggtggaaatttattggatttcgtggaatatataactcacatgaatacgaaaaccattgtcgatattattgaaaattgggacaaactttctttcacggaagaacaggctgataaaattgtggagaaaatagatcatgtctgtaaaatggatttgtttcaagtgattatgaaggaacgtgaagatgggaaaggtcccattatggattgtagttccctacaaacagccttaaggaagtctggtattccggtttctaatgtaagacggcaaaccattgaaatgtggcaatactggcaggttaaggatataacgggtatgattggtgcttttgaaaatatgtttgttgaatcggaagctgcccaaaaagaaaaggctgataatggcgtgcttgatttggaaactatatttgatggggtaattcttggaagtatggtgaattatatcttggaagagagtaatttagagcaatgtaccaaaattcttgatatcatgaatctggttgttgagaagaatgataatagtacctttgttgacatgattgccaaatggaaggataattttgaggggaaaaagatgatgatagagatgggcgaagaataagtgttgaggattgggtaaaattaaaatgaatgagttatgagattatttattgcttttttagtaatttgttgcgtgggttgttctcaatcatcacgttatcaatttagtctgaaaggaaacatcgagggagtgaaatatggtaccgttttcttgatgactccgggagatagttcgatagttttatacaagactgatttggaggggggaaaatttgagttgaagggagaattggatgaacctagacaagttatattgaaagtgaatcgacgtcagacttatttctttatggatggtacgaatatggaaatttattgcccttattcggcgttaagtgataagcatataaaagggtctccggcaaataatttagctgcagaatatgacaaacttgcccaagagggatattacaaagaatttaatcaattgattaatgagtataaagggttgcaggatgcgggtgatcaaaaagcagcagatgaaaaaatgactcaagcactaaaaatggatgataaacgttttgaattgacccgtaattttgttaaacaacatccggataacatatattctgcctatatttcgggaattgtgaaagaagaaagttacgagaagggaaaggagttgtatgacttgcttactcccaaaattcaagcttcattctatgggcgtttgttgaaacaacagacagaggcgttggctgtttctgcattaggtgttccttgtccggatttcacggcaacggatgagtctggtaataaagtttcaatggcttctcagaaaggtggaatcatggttcttgatttttgggcttcttggtgtggtccttgtcggcaagagatgaaaaatttgcgggagcaatatgcagagtttaaagatcagggagttcgctttatgagtatctcattggatgattctgtagaaaaatggaaaaaggcttgtgaagaggagcaaatcccatggatcagtgttcgggatgataacggttggtctaaatccgaaattcgtaagttatttggtattcaggcaataccatttatcgtgttactggataaagatggtaatattgttgccaagaatatccgtagaaacagtttacgagagaaaattttggagttgctacaaaaataaataagttatgaaagttataaatataattttagctagcattatcatttacttgggggtaggatctacttgtttcgcacaagaaaatgataaggctttactggaacgagtagataaggtataccgtttaatcctgatagacttgaatacggatgaattacttcagaaaataaacgaggtagaaaagtacgttggattggttatagattctattgaaagtaaagaggcgaaagaaaaagctcgattgattcaagctaaagggttgttatggagtttaggaagttacgtgtttgaaactggagataaaggtttaaaagatgagttatcaaaaagaattaagggggtggatctggattctccaagtctggaattgcttgatgatatcgacgtggctaatttgttaaatggttatttccgattatttatgccagatttatcagagttagatcgagctacttacgttttgtataatataaagagtgaaaaaattcgtaatccttatgtactgacagcattagtgtcaacattaaaacaaaatggatacacggatgcgattcaaggagtgatagaagatattgagctttgttccaaaactgagtcaacaattcaaaaggcgcatgaattaaaagcacaatattatccggtacgagtgggggagatggctcccgatttcgagatggaagatgaatttggtaaaatggtgaaactttccgattttaggggtaaaatggtgtttattgatgtttgggctacttggtgtggtggatgtgttgaggggttgccttatttcatggctttgagggatcaatataaggatcagaaggatttggtgttattgaccatatctgatgatggaatagaggctaaatctcgttggttaaaatttttaaaagagaaaaaatattctggtaaagttcctcatttgatcatcaataaagagaaagataatttcacgaaagattattgtattacgggaattccccggtatattttaattgataaggaaggaaagatcgtgaatgcttggcatatagctgctaaacatgaattattctcttgggcttttaatatggagttagagaatatgaatcggaaataatttttctactcaatgcaaggttcccggtttgattttggtcaaatcgggaatttttgttttgtaaacgatagacttaaaggtgaatatagttgattattttccagattaaattcttatttttgtggtgattattagattactatgtgctgtatggagaatatgaaagaggatccgggcgctttcctggataatttgcagaagggagatgaaggtgcttttcgagtattattcgatgagttctatacggctttgtgtctgtttgcagaacgtttccttggagagcgggaagcggcggcggatgtggttcaggaggcttttttgaaatattgggacaggcacatggattttgataattactataagataaaatcttttctttacgtggtggttcgccatgattgtttgaatttacttcggaataagcgtgaggatttgccggtgacggaggatattgccatagactcggatgaattttttcataatcaagtcatggaggaagaggcatatcgtgtattttaccgggcgattgagcatttgccgccacagatgcggaacgtgatcaattacgccttggaaggattgaagaatgcagatattgctcaaaaaatgggagtgtccgagaatgctgtgcatgcctataagaaagaggcgtacaagagattgaaagagagtatgaaagattattattacctgttggatatatttttcttatatctgtttatttgattaataaatgttaaatgattaaatgtaacatacccgatctaccatttcttgtgttgtaagattgaaagaattgataaatattcaatacaagtagtatggataaagcgaagtttggtgttgcgattttggtggggaagtatcttgccaacaatttgacggatgaagaacaaaagtatctgtccgattggctttcttcgtcagaaaagaaccgcacgtggtttgaacgggtaacatcggagtcttatcagattgaaaaagggaaagcaactcgttccattaacgtggaggaggggtggaaagctttggaacttaaacgggaatcccggctggggggacgtcaccgtcggatttattggatgcgttacgtggcgatgtttgtcttacctctggctattgccgttttattacaccaagtgtattattcccgtaaagataaggtggaaatggtgcaaacaattacttccggaacgagtaaggcaattcttatattagcagacggtttgcccgtggtgttggaacagcagcaagaaaagacactgaaagaatcggatggaaccaagattaacgttctgaaagaacatatcagttacgagcgtggtgttgatgataagcaagagaagtcggtataccatgagctggttattcctcgtgggggagagttttctttgactttgtctgacgggacggaggtctacatgaatgcagattcaaaattgcgtttcccgacaaagttcgggaagggggaacgggtggtggagttggaaggggaagcctattttcaggttgttcataatgaggatgctccttttatcgtgaagacttcccaaatggcaataaaagttttgggaacggagtttaatgtttccgcttatgcggaggattctgttatacgcacgacgctagttcggggctccgtgaagatttcttcggaagtcagcggggaaagcgtggttcttcatcccggggaacagtcggctctcaaccggggagatcattccatgctggtgagcgaggtggatgtgtcgtatgcgatggcttggaaagaagggcgtttacgttttaaggagaaacctttgaaagaggtgatgaaaattatatcccgttggtatgatgttgacgtggtgtacgaggacgaggaggtgaaagattaccctttcgggtgtaattttagtcgccatgcaacgatagaacctttattgaaagtattcgaggcgacgggtacaattgaaacgagtattcacggtagaaaaatatggattagaaagagaaaataaaacggaagatggtggtacatctcccgcttgactaagtactttgtggtaaaagtactataaagttaaataaataaacactcaaagttatgaaaaaaaatcatggattcccctataaatggggaataaaaatgaggtatgtgttgcttgtaatacaagtggccctatttcttccccaatggggacacgcgagcaataatgttttattgccgggacctaagattagcttttcgatgaaagatgctttgatgaaagatgtcatctgggaacttgaaaaacgatccgggtttgtattcgcttacaatgcgaatgatttgttgaaggcggggaaagtgagcgtggaggtgaaggacaaggatgtctatgaggcgttggatatttgcttgaaaggaacgggcttgacgtatgtcgtgcaacaagatgttatcgtgatcaagcgggcagatgctccggtgcaggaagtgaaaaaggtcacgattacgggacgggttgtagacaaggatagtctgccgttgccgggggtaacgattttattgaaacacacgacaatgggtgtggttaccgaccagaacggacgttatagcatcacgatcccggatgtgcaggagcctgtgttgatttttactttcgtgggaatgaaatcccgagaggtgaagtatacgggaaataacgtgattaatatcgtgttggaagatgacgtgacggaggtggaagaggttgtggtgacaggaatgtttacccgcaaggccagtagtttcacgggatcggcaacgacgattaagggggatgaattgttgaaggtggggaatcagaatgtattccagagcttgaaaagcatggaacccgggttgatgattttcgagagccttgaatttggttcggatcctaaccggattccggatatgcaattgcggggaacttccgtgatcacgatgggtgacaatagtgatttggatttgcggggtaattacgagaacaatccgaatattcctctttttatattggatggctttgaggcgagtgcggtgaaaatcttcgatttggatattaatcgtgttgagtcggtgacaatattgaaagatgctgcggcaaaagcgatatatggttcgaaggcagccaacggggttgtggttatcgagacgaaaaggaatgtttccaagaatctccgggtaagttattccggaagtgtggatgttcaggctccggatttgtcttcttataatttgtgtaatgcagaggaaaagttagaagcggagagaatttacgggatgtacactccttcgagccgggagaacgtggacgatattctccggttggaaaaattatacatggaacgtctctcaaaagtgaaagccggggtagatacggattggttagccaaaccattgagaaatggtgtcggtcacaaacattcgttgatgatcgaattgggagataagaacattcagctcgtggcgaacgtttcgtacaatgatgtcgtgggtgtcatgaaaggctccgatcggacgaatgtggccggttctgtgtttgcctcttatcggaataacaaatttaagtttaggaatgagttgtctgtgaacatgaacaagagtaatgactctccttatggttcgtttgcagaatattctaaactgaatccttattggagtccggtggatgaatacgggcagattgctaaaaatgccggagatgaagaggccttttacgggaatccgctttataacgccacgttgaatacgagtctgaaagataaatatacggaggttaccgataatttcgagggtgaatatgatattttacaaggctttaaggcgaaagtgaggattggttttaatcgtaaattcagccggtcggatcagttttatcccgctaatcatttgaaatttaattcagagcaagaattacagaagaaaggttcttaccagattaacgagggagagagtcaaacgatgaactacgatttcagtttgaatttttcccgtcaagtgaaagaactacattatttgttcggttttttgagttacagtttggatgaaacgacttacgaagagaatatttacaaggcagagggatttcccagtgaccggatgaacagtatcttttttgcccgtcagtatgcagaggatacaaaaccacagggtgcggaatcgacaactcgtaatattggtgtgaatgccgtgttcaactattcatacgatgatcggttactttttgatgccacgttcagaacaaatgcgtccagccagtttggagcaaatcaacgttggggtaacttctggagtttaggtgccggatggaatatgcacaatgaaaaatggttgagaagtaaagaatggttttcacggttgaaactgagagcatcagtcggaagtacgggatcacagggaaataatgcctatcagtctttggctacttataattatagcgagaaaaactatgagaataagttgggagcctatttgatgggtatggagaataaggatttgaagtggcagaagaagatggattacaacgtgggtatggatatgtcagtaaaaaataatttcaatctcgtgtttgattattatcagagtacgacggaaaacttgttggttgccttcaccttacccccatctaccggattcacaacggtacaagagaatgtggggaaagtaaggaacacgggtattgagctaagtatgagttacatggtgttgtcgcgtcctcaagacaggacattcttaacgctttccttacgtgcggcacacaataagaatcgggttgtcaagatttccgattccatgaaggcctataacgagaagatggatgagatggcggaaagtgatagtaaattggtcaccaaatattacgacggagtttccatgaacgctatttgggctgttcgctcgttagggatagatccggcaaccgggcgtgagatttatttgacaaaagatggagtatccacgtatgaataccgggcggaagatatggtcgtgtgtggagataacttgcctaaattgcgcgggagtttcgggataaatctcggatataaaggatttggattgaacgtgatgtgcatgtacgaattgggagctaaaatgtataacgagactttggtggatcgggtagagaatgtaaatatgagctatgccgtggataaacgggtattggagggaagatggcagaaaccgggggataaggtacgtttccggtcgttgaaacaggtgtgggacccggagaaacaggcctataaggttgacgagaagacttatgcaacctctcgttttgttcaaaagaagaatgagttgaatatatcttctatcaatttctcgtatgatttcttccgtcatgctttcgtgaagaaaatgggtatggagcgtttgagtgtggcgttctatatgaacgatgtggctaagttatccacgattaagacagaacggggattgtcttatccttttgcaagaaattataatttttcgttgcagatgactttttaggtcctgttatagattgaatgaataaaatataaaaatatgagcgctagaataaatacatattgtttgataatttggatgagcttattatcattcggaaccatatcttgctctaattggttggacgtggaacccaaatctgaaataaagggtgacgtgttgttcgagacggaacaaggttttgaagacgctataacgggtgtgtatatcctgatgacggatacccgtttatatggaaaagagatgagctacggttttatagaggcggtggctcaacaatacgagattgatccgctgacaaacaattatttcgattgtacccagtatcgttatgatatggatgccgtgttgacacggattgatggcatttggagtgtagcttataatgcaattgccaatgtgaataatattttgaaaaacttggaaacgagttcctgtgtaaccccacccgtatatgcccggattaagggagagtgtttggggttacgtgcttttctgcattttgatttgttgcgcttgttcggttggggtgatttaaaggaacgtccggagatattaagtcgtttgtcgattccttacgtgacggattataataaagagataacaaaacaatctacagtaaaagatgttttagcctatatcgaggctgatttggcagaggccgataagtttttgcctcgtgaggtggcaacttcccggttaacgtttaactattatgctttattggcaacacgggcccgggttgctatatggcaggggaataaggatatggcgttgaaatatgccgaagagttgattgcaatggagcagcaattcccgtgggtagataagaatagattggaaacgaatgatttgcagttgcgtgattttacgttttcttccgaatatcttttcggattgaacgtgtaccaattctcgaagatcacggagttgagtttcgaggctaaagtagatattacgagaacgaatccccaattcctgtttcatgcggcacagacgggtaaagatttgtttgaactgggagacaacacgggtgcaggtgattatcgctatttgtggttgtatgataaattaggtactcaatatgcttttctgaagttgaaacaggtggataaatctacttatgccaatcgtcttcctttgatccggaaagcggaggtttattatatggcagcagagtgcttgaacgagacgggaagtgttaccgatcgacagaaagcaattaattatttgaatatcgtgcgggagaaaagaggaattcaacgtaaattaggaaatgatttgtctcagagtgtagttcagaaggaaatattgaaagagtggcgtaaagagatgttgttggaagggcaaatgtttttctattacaagagaagaggtgtgaccaatattcagggatctacggttgttatgaacgataacacgtacgtgatgccgttaccgaagacggaggttgagtttggaggtcgagaaacttattaaaaatgatgaattatgaaaaagagtatattatatagtctggttatattcctttctgtttttctcggtggatgcgagaaagatgaaccgatgggataccgtggacgtccgggtgtttattttaacgggaaggagttttcttataccttcgctgaaaatccttggaaagatgtcgatacggtactattgcctattttgcttaccggagatttggaagattacgatcgaaaagtgaaggtggtagttgttgcagattcaacgactgcaacgggagatatgtatgaattactggagggaactataagtgccggatcggaatcaggatttgttccggtggttgtgaatagtgtgcaggagttggaacataaggttgtgcgacttcgggtacagatcgtggagaatgaagattttaaagaattggatttggtttatccggcatgtaatttcacgtttaccgctcagattattaaaccctataactggtctcagttagaatactttttcggaccttattcgacaggctggtggaagtttatcatggagaaattaggacgtacttctttaccttattgggatttattttctccgatacctaacccggatccggataagtatgatatgtcgtattacgaaatgtcgaatattcagcaaatgattcgtttggaattagccgaatataataaacactcgacaaccgggccgatgaaacatgatgatggggattacgctggtaaagagatcgttgttcctgccccgtggtaatgggtggcgtgtttaatggaattgtttaataaaagatgaacagatgaaaacaaaaatatttttaggactggtgatgatttgtttcttgcttggctcttgctttgatgacgaatcatccaagaatgtcgagtttttgaaaccaatccagattaatgatttctcgacgtctatggaactatacgtgagccagggaggacgtttgaaaataaagacattagcttataaagagggaatggatgatgctgcgttatcgttcgaatggaaacttcaggggcacgggcaacatgaaacgttgggaaatacgatgatattggacacggtgatcaacgtgccgatgaatcgggaggcttattctttattgtacacggttacggatacggagaatgaattgacggtaaccaagcgttattacctgtatgttacagggcaatacgaggccggcttattagtagctgataccaaagatgaacaaacttccgatctgcatttgattatcgggaagaactttaaccggaattatagtaaacatgaggatgatcgtgtttttgagaatatctatagtatcaataacggaacgaagattggcgagcttgtcacggatatgaaatctgttgttgccgggtatcttgaaacaagtatcgcaacggaacattctgtcgaggacctttccccgctggataattttaccgtgatccggagaaataacgatatgtttatcaaagcttttgacggggaatttgttgtgggaggcttgaataattgtgcccgtggtccttacgatgtgattgctgtaaacgggcatatccataagagaactcaatacgaggaggcgacaacttacggggtgggaatgttattagaggatttgacagacgattattatgtcacgcattatttgtacagaccttacaatccgtatccgggagaaggagatcttttcgggattgcgtatgatcagaaacaccatcgttttcttgccttcccgcatttccgttcggaagacaatttgcatatattccgaaatacttctgcagatggcaaacaggacccgaatcagttgggaaataaagagtgcatatatataggttatggtccgaatgttacaatgtatgccgtattgaaagatagcggtaccggtttgcatgaaatatggacatttaatatgaatgcagatgataagaaccgtccggatgtgattacgggatgttatattctggatggatgtccggatatagagaaagcccacaagtttcagtcacaggctatggaagaagtcatgtattatgcaacggatgacaaagtatatgctgttttgctaacggcgtcacatccccaggtattacctaaatatgaggtaaatccgggagaaaagattacgggaatccaagtggttgagtactgtgagggaaaactggaaattccgaataccgataaaccgggcgaattgacggatctgggagctagtaatcacatgatgttggttatgacttataacgaaacgacccgggagggaaaggtaattgttgttccaatcttatccttgggaactggtgacttgattcaagataaggcctatcatcgggaatatggtcctttcggacggatattgaaaacaacttgttatcacacgcgttaaattgatgaatatgaaaatattaatgaatatcatattattgtcgttattaagcatgagtataatgtcttgccatgataatgatgatgttgaacctttggtgcaattgaataaataccgggccaaagagatcaaggggcataatgctttgtggggagattttaaaattagtctgaactatattgataatagtctggatttaggatttattacagatcgtaatcaagatactatcgggaggttgaatagttctcaagttcttatgttggttccgtctatcagtcaggaagagattgatcagttggagccgggaagtactattccgatgaaatatcaggttattttccagatacaaagaaagacgaatcaggaggtcatttatcattatgcaaaagaggatttacaatacgttctcaagtattcggagagttatttgttcgagtatgatgatactttaaggatggatcgtaagattatgaaatggcgtcgtatcggtgattcgaagacggatgatccgttaatgcgtatggtatatacttataatggcgatcggcttacgggcggtgaatacgccacgtatatctcaaattgggagcctcgttctcacgtggaatatagttatgatgggaatcaattgactgggatcaaagaaacaacaatagatggacaggttgtctttaccaaaactttcatttattcagggagtgatcggttgaaagtcaagacggaggatcatggggttgtccgggaagtggactatgtgttgaattctgacgggtatgtaacccggattgacgagggagacgggaattatatggaggttgaatatgaactgggacatggggatttgagtacgttggtatcaaatattgtaaaaatacaaggtgaaccatttattaaatagtgaatatgaagattatagcattagttattttatttataacaacgattattggttgccattctccgaaagtgaacacgattcatttgaaaggacagatggcggatatgggtacacaagaagtgattatggagtacacgggagtgacgggagattttggtacgagtttgaacaggataatcaaaacggatgcttccggttatttggatacgacttttgtgttggagcaaccgatgtatttcaatatcagtcgtaacattctttacctttcacccggtgatgatttggaagtttacttgacaccggatacccgtcaagcgacttttaaagggaaagggagcgaggcgcagttgtttttgaaagatcggctttatcccaaggggggctcttttcttttgtccggacggaatgtaagggagaattttgagaagacgaaagaggtggtggatgcgcttgcggcttctaaattggctcaactggatactctaaagggggtaacggagctttttaaggagaatgaacgtattcgggtgaaggcgaatttgttgaatagttatttgacttatgctctgtataataaagaaaatacaggagcgtcacgggaggaacaaaggcaatggtacgggcgttttattacttctgttatcccggatgtaaatcaactgatgcgagagattacgaaaaacgagtatctggatattatagatgtcagggatgtgatcgtgtataacttggatcaagcggaatttatgcaaggggtggagattaccccggaaatgcgggaaatcaaggatgctttacaagttttggcgaaattggattcatcaacagatccggaggtgattctgagcatggaggaaaagacaaaatcttttcagcacgtgggaattgtttccgaattgcaggagaagatccgtaatgtaaaaagtctgatgacgggacaaccggcccacgagatcatcatgacagatgttgatgggaatgaagtcttgttgagtagttttaaaggcaaaaatatttatctggattgttgggcgacgtggtgcggtccttgtattcaggaatccccggcatttgccgcgttaagtgagaaatataaggataaagatattgtctttattcaattgtcaacagataattccagaaagacttggctgagttacttgaaacaaaaggaatcggtagtgcctcagtttaattctgtcgataacgaaggattgagagtgaactggcagattaagtatattcctcgttttatcttgattgacaaggaatttaatattgttgagtcttttgccccgaggccttctgatccggaaattactgaacatttggatgccttgcttgcaaaatgaatgattattgataagtaaaagtaattgccggattttcttccggcaattacttttttccggttgatactcgtactttctcataataaacgctttatttgcggatttagggatgttcaataaatatttagtgcaaattaatgtaaaatagtgtattcaaaatgtgataatacagttatcatattgtgagccgctcccattccgctcccattcctcccctattccgctcctattagaataataatatattgtattacaataggaattattaacat

SEQ ID NO: 10820 - DNA, 29223 bp, Unknown
  gut microbiota DNA sequence
ataaccctatctgatagaaattttatttgaatgctcgttttacaaggataaatcactgtttgtccgggtatacctcgatgtggaaacgattgcttgcattttttcttttggtgtatatgcttgatattatattttttggaggataattatattgttttgtaattataaagccgtacttttgttcacccgtgggtcgcaaagtatggagaagaaaaatgaagataccagtttattgttgaagcacttgcaagaaggtgacgaacgagcttttcggacgttatttgaggagttttatgcatcattgtgcttgtttgcgacccgttatttgggtgatcgggaagaggctgcggatgtggtgcaagagacgtttttaaaatactggaacaaacacacggattttgatgattaccggaagataaagtcttttctttatgtagttgtgcgtcatgcctgtcttaatttgttgcgtgaccgtgagttacgttcccgtatccccgaggagtggattgaggattctgaacaggagtttcgaaatcaagtgatggaagaggaggtacatcgtatttttaatcatgcgatagataagctgcccttacagatgcgaatggtaattaatctttctttagatggattgaaaaattcggagattgcagaaaaaatgaatctttcggaaggaactgttcacgcctacaaaaaagaagcctacaaaaagttgagaatcagcttgaaggattattattatttattgccttttcttttattcatatctcgttaaatattaattaacgttaaataccgaatatcagacactccctaaaatccattttttgtgttctagctatgaatttaatctaatagtagcataaaatgaatgatggcttctttgatattgtcgagctagttagtaaatatatgacaggagaattgaccggggcagaacgggagaatttggataactggttgagtctttccgaagataatcgtaaatggtttcatgaggttaccgaaaaagaatttatataccggaaacgtcaggagttgagatccattgatgtaaagggtggatggaaagctctttctcgtaaacgagccaaggagaataggaggcgattggggattcgtgcgttgaaatatgcttgtgtttttattctactggttgtttcttccatgtatttttttatgcagcgtgttgatcgggaagaaattattccagtggagagtgccgagatccttcccggaacttccagagctatcctttacatggcgaatggttctattattgatctagccaatcatgatcgggattcattgcgagaattagatggaacgattattggcttggatggcgagagtattacttataaaaatgcggtagattcggtagtcagttcagatttgtataacgagcttgtgattccccggggtggtgaatacgtgttgacgctcgcagatggaacgttggtatgtttgaatgctggatctaaattacgattccctgtgcaatttagtggaatcacgaggaatgtagaattggaaggggaaggatattttcaagtggcacgtaatgaaaaaataccttttgttgtcaatgcatccggggtgaatatcacggtgttgggaacagagtttaatgtatcgaattatcctgaaaatgaagatgtacagacaacattggtcaagggtaaagtacaagtaactctttcagaagatatggatggctatatcttgaatccgggggaacaagccgtgtataacaaggaaagcggggaggttacggtggcaaatgttgacgtgtcgtatgtcaccgcttggcgggaagggcgtcttcgtttccgggatcgtcctctaaaagagatcatggattttatttctcgttggtatgatgtggatgtggtatatgaagatgagagcgtgaaaaattatcttttcgggtgtaattttaatcgtcacgtgacggtgactcctttgctggaattattccagagtacggggactgtccgctttgaagtggttggaaagaaaatcatcgtaaaaaaatagcgaagaatatgcaactattcttcgcttgttaataacacctcttgctggaggcattaaaaaatcgaatttaatcaaatcaaaagtatgaaaaaaaaacgtagaagtactcgttggaaagtaacaaatttgtttttagctttccaggtggctattgttttggtgttctccgggggacacgtgtatggaatggtggatgaaccactacttaatttatcgttgaaaaatgtggcggtaaaagatgctctttgggagattgagaagcaatccaagatggttttcgtgtataatgctgacgacttgggtaaggctggcaagatctccatggagatcaagggtaaaacggtacgggaggctttggacatttgtttgaaggattccggttttgagtatgtgatccaacagaatacggtggttattaagcggaaagcggtgcccgttaccggagtgcaaatgcagactatcacgggaaaagtggtggggcaggatagtgtacctttacctggtgtaactattctattgaaggggacgagttctggggtagttacagatttaaatgggaaatatgctatcaatattcctgttacaggagatccggttttattgtttacgtttatcgggatgaagaaggaagagataaatgttgcagggaaaaaggttatcaatgtagtattaaaagaagaattgaccactgtggatgaagtggttgttaccggtatttattctcgtaaaaaagaaagttttacgggatcatccgaaacatatacgaccaaagagttgaaaatggtggggaataaaaatattttggagagtctacgaactctagacccagcttttaatattatcgagaataaccagtatggttccgatccaaatcgtctgccagatatcgagattcgtggaaaaagtagtattgttggttttaaagaacaatttggtcaggatccgaatcaaccgttatttattttagatggcttcgagacgacattagcgacgattatggatttaagtttggatcgggttgctagtgttacgattttaaaagatgctgcttcaacagcgatttacgggtcaaaagctgctaatggggtggtagtggtagaaaccaaatcaccggaacggggacgattgaggttgtcatataacgggaattatgatatttcttttgcggatctttctgattataatttaatggatgcggcagagaaacttgagttcgagaaattggcagggaattttgatataaattcggcgatatcccaagagcagtttactgaacgttattatgatttgttgtctaatgtaaaacgaggggtagatacatattggatgtctgaaccattacggatttctttcaatcatcggcataatctttatttggaaggtggtgaccaacaaatgcgttacgggttaggagtgagttattctaatgtagatggtgtgatgaagttttctatccgtaattcttttagtgcaaacttggatttgatttatcggaatggaaatttccagtttatgaataaattgacgattgattacggtaatacagaaaatccgatagtggcattttcatcttattcccgagctaatccttattatgagaagagaactcccggtggtggcgtggaaaaatggttggaagctagaacgtatgaaaatatagcaggtaatgcttattctgcccaatgggtagctaatcctttatggaatgcagcgcagaatagttataataaaggaacctcgtggggagtaagaaatagttttagtttggaatatgatccatatccctctttacaaatccgggctcgttttggaataagtaaaagtttttctgaatcagagatattttattctccaacggatacccgttttgatgagacggagcaactgaaaaaggggtcttattccaacaatagttcggatggattggtttatgatggtgatttcaccgtgacatatggagaagttttgggagataagcaccaagtaaatatggcggtcggagctagtgcaagtgaaaataattctttttcaaaaggtttttccggttacggatttccggaaggaaattttacttctccgggatttataaattcttatccagaaggttctgcaccgtcatataatgagagtaaggatcgggaagtgaatttttattttaatggggggtattcctatgataatcggtatttgctggatgtaaatttacgttctgatgggacctctatttttggtgtgaacaaacgtttttctacaacttgggcaattggtttggcatggaatgtccatagtgagaaatttatgaaagggaaattgtcttttataaatcgtttaaaaatcagagggtctattggaaatccaggaaatcagaactttggttcttttacttcgataacagtatattcttttaataattggttgttgaataatttcggaacaggtgtcgttatagactcttatggtgatccagatatggattggcaaaggacaatcgataaaaatattggattggatattacgttatttcatagtcgttttaatctgactattgattattattacaaaaaaactgatccattgatggcatccatcaatttgcccttatctgtcggaacaacaagtcgtttggctaatgttgggatgcaggtggataaaggggtcaacggttcattacgatatgcgttactttataaaccgcaagaacgcattaattggacaactagctttaatttccgctgggggaagggattttatgacaagataggtaaaaatttagatcaaattaataaagaaaatctaaccaagagtctggttcgttattatgacaaagggagtactacatctctttgggcggttcgttccgctggaatagatccagcaacaggacgagagatttttattaataaggacgataaatatacgtatgattacgattatgacgatgaggtggaagtcggtgatactcgtccgacattagagggtgtttttggtaatgttctttattacaaagggttttcttgtagtgtacaattgaggtatagttttggtgccgatgcttttaattatactctatacagtaaagtcgagaatatttcaaaaacagctttacaaaataatcaagatcgtcgggctctttacaaccgttggaaaaaaccgggagatatggcaaagtttaaaggaatctcgttgaccgaatccaccccaatttcttcccgttttgtgatgaaaaatcattatatgtctttagaatcgatacgtatcggttacgagattcctgaacgttggttgaaaaagattcggatttccggcatgagtttaagcggatatatgaatcaaatctgtaggatttcgtccattaaagacgagagagggattgattatccttttgcccgttctgtttcgttttctttaagtgtaaatctataatcgagttctggtatgaaaaagaatatactgatattagttatcccgttattgttaagttcttgtgagagttggcttgacgtgaagcccaatgatcggatttcggaggaggcaactttttcgactccccgtggatttgaattagcattgaacggcgtgtatgtagatttaaataagacaagtttatacgggcaggccctgacatgggattttatagaaattcttgctcaacgttatgctatcagtaagacttcaacttataatcgggaagccatgcaattccatcacggggcggatgaggtgaaaactagggtagagaatatttgggctcaagcttattctttgatttcaaatataaatttgattttgaaaaattgtgaagatcgtcgagaagtgttgtcggatgaatactataatttaataaagggagaagcccttggattacgggctttacttcactttgacttgttccgcttgtggggaccggtgtatagtcaggcttccgaaacggctttaacgattccttactacgtggaatttagtatttctgcacagccgaaattaaccgcctcgatgtttatggagcaagttatcacggatttggaaacagctgcggggttattgaaaatggatgatccggtgatgaaagggagtggagtgttggaagcgaatggggcgaataatttttggggatatagagcattgcggttaaattattatgcggtaaagcttttgttagcacgtgcttatctctacgtggataataaaggagagaccttgaaggcggctaaagaggtgatagaggtacaagaacggttatttccttgggcgaatgctactgaaatatctttagccggtgaaaatgtggatcgtatgttttcaacagaattggtttttgctttgcagaatgtgaatcgaaaagcgatttatactaaatattttgattcggataatctgaaaatgggagtgttgttggcttgtaatcagaaagtgatagatgaatatgtttttgacagtgaatatagtgatttacgttataaagtctggttggataaaaatgttgagattgaaggtggaagttataaagaagttatgaaataccagacgacttccactgattcgctttatgtccaattaataccgatgttacgtgtgagtgaagctttttatattgctgccgaatgtgaaggtgaagaagatgaagatgccggtgtcgcttggttgaataaggtccggaacgctcgttcgttacaaggagtggagtggtattattacgagtctacgcttgagtcggaatatatgcgtgaatttatcggagagggacaattattctttttttataagcgaagaaattatgatgaacttccttctgcgtatgatctttatgagtctgttccaatgaccccgaatgattacgtattattgattccggaaaatgaaagtaagtataattaaaaaagacatgattatgagacaatggatttttttcattataatgggatgttctgtatgtgcttgtaagcaggatatagatctttacgaggggaatagttcaatttattttgatgataattcggctggtgtttatgatatatcatggtcaacatatgattctgatgtaaagaaaatgaccgtacagttgcaagtaaatctttctggaatggtcaaggattatccccggaaatttaatattgaagttatttctagcgagacagattctttacatagtgttgccggggttgattatactcccttggctttggagtacgagatgccggctctggcaaatcatatgtatattgatgtggagttacttcgaacggatactttgcttaaacaagcgaggcggtttactattcagttggttcctaatgaagaattgggatttgaattcatgaaatacggtaaattggaagatggtacgcttgtttcttatagccattattgtgtgatctatatgcatgaagagttccccagaccgtggtggtggagcagagttggggaacctatttttggagaatggtcggttaagaaaggaattttgatttgtgatgtaggaaacattgatagagctttgtttcaaggagaaattgatagtggtaatggaaacttgacaagtgcttttttgagatttatcggtcgtaaagtgcacttgtggttacttgaaaatccgacaatggatgaggatgatgaactgatggagatgggagaagattctatttattaaattatattacttatgaaaaagtggttatttatattaggagtcttattatggacatcctgttttgatgataaaggaaattatgattatattgatctgggagaacttacggttgatggtatcattacggatcaatggtatgaattgtttgcttattcggatacgttaaaaattccgattgagattcattcaacccggtatacggagggggaggaaccttacacgtatgaatggaagtttatgtcacagagttcgcagacgtgggatgagcgaaatgagccgattgactataccgtgtcaagagagaaaaatttggctattgtcccgcaattgacagcaggagagtatttcggttttttcattgttacggatactattttgggtttacaggagaaagttgatttctttgtccgcttgagaacgaccgtgagcgaggggtggatgattttgtgtgaggaaaagggagaggcccgtttggattggattatgaatttgacggaggctgaagaacgaatatcccgaaatatatggaaaggtaacaattttaagctggggaagccttacggtttgtcctatgctcgtactcgtcctaaaatgtcgaatcggtacgtgtttacggagaatggaacatttaatcttgatggggaggatgcgcacgtgggagaggaaaatgatgtcagatggatatttggggatagcccggatattgtacatggtagggctgcggaagtagcttttgcccggggaaataagttggatatgataattacccgcgatggtaatttgtatgcacgtaaccctctttccacaggagatatatacggtttcccgataaatgtaacttctgatggacaacgatttgaagtggctccctattttggacatcgttccggtgcagtcgggggagggaacgttatcatttatgataatacaaacaagcgttttatggcgttggacgatgataataagaaaatcccacatgtgcttactttttctggcgggactgccgatttccaagcggaaacaggacgtgatatggtgtatatggattggacgaaagataactatacttttgcgttactggaggaccctgaggacgaggaaatgtatgtgtatggaatcggggttggagataatgggataaatgaacggaaatactatatgaaattgaatcggcctaataaagataaaattacgcatgttgcatttcatttgtattatcggtatttattctattcgaccgagaatgcggtttaccagtttgatatggaatatccggagacacctgccaaagcagttctttcttttccgggggaaactattacaactttaaaagttagtaagttggctctttatattgctttccagccatgggagaaacttcgtgagaatcaattagtggtaggtagtattgtaaatgataaagatgaggatgaatgtggtgtaatgagaatatatgatgtccctactttgatgggacctttagaaaagaaaaaggagtatacggagttggggaaaattgtagatatcgtgtatcgcgacagagattaattaaatattataattatgagaaaattaatgaaattcattgtactatccggtttgattttaggaggatgtacaagtgttaaagagtatgttattcggggtgaaattgcagggaatgatgcaaaattgtatctgagtgtcgttaatgaacaagggaagtttgacacgattcagcaagtggaatcccaaaaaggtaaatttcaaataaaaggaattttggataatcctaaaattggtttcctgacagtacaagacaggaaagggcggatacctttaatgcttaaggatacgatttttgatttgaaaataaaggggaatgatttgggtgatgtcagaaacttttcggcccggggaggagtattacaaaatcggaaggatgctttggatcggaaagaggaaaaaatatatcgtgaacgggattctgttttagctcgtttttatcgggcgaatgaggaggataatatttttgggaaaatgcatgagatggcttcgttgcaggtaatggatgaaatatatgacaaagaggaaaatgaatatatacagaaaaatagagataatattttgggattatatttagttttttatcgacattcttatttaaattacgaacggctgaaattgaaatttgacatgttgagcgaagaaatgaaacatacacccgaaggacaagtgatagataagcggtataaaaaattaagtgaggttaaagttggagcctatgctcccaattttaaacttccgactttagacggtgattctgttcatttgtacgggaaatctgcaacaattaaaattatcgatttttgggcttcttggtgtggaccttgcaggaaagaaaatccacatttagttgagatttataaaaagtataaagataaggatttgcttatgataagtgtttccatggatactgatgagaaagcttggagaaaggctgtaaaagaggatggattggagtggattcaggcgtgtgatttacaaggagcggatgggaaggccgtaagagcatatcgtgtcactggaattcctcatatttttgttttagatggaaataataaaattataggtgagaaattgaaaggacaggaactagatgatttgttagctaaatatttaaagtaatttgtgtgttgataatgcgaagagtttatgaaataaaatgaatctttcaggaataaacggttttaattaactggggtcatctgaaaacttcatataaaaactcctcccagcttttgcgggacagtccttgagtaaagttctcggtctgttctcgcttgctcaccaaatcttcttgataaacagagtgagagttgaaatattcactgtttttaataaggatgctcttttttgtttattgagaaaatggtagcgaagctgatgggggagtttttaacttaaatttaacctgttacatggagtattaaatattattgatgcttatatttaaaatctaatttagtttgtgtttttatatattattttttgcgaaatgaaacaagtttaccgattatcaattttattgtgtttaatggtttcggtgatgtcctcgtttgctcaaaagaagaaaacaggacgtgtcggaaacgagtatgtagtattggcttctaaggctgtgcaacaagatgcagcgtggatgcaagttgttaatgccttgaaggaaaagcatggtgcagaggtctttttttacgagaaagctcctcgtgagaatttaggagatctgcaacgagtaaaaccgcgttacgtggctattgtggaaaaaccggagaacctgaaccgggattacgtgatagatatgcatcatgtaagccgggaggtggatgaagatatttttgccgatttcctttggggtattattacggggtatgatgcagccggagcgatgaagatggtaaataatagtacggagcctttggtaatcaagaatgctgtggctactattacagagttgaaaagtgcgaaatggtttgatcgttttgcttgggtggatgaccagacgttaggattgtggggggagaagacaggtaaaggcgaggctgtgaaaaccgataaagtatcggtagatggacggttaaaaaaattatcggatatgtatgcggcatgtgacccggacttagtggtaacagcatggcatgccacggagaaagatttacaagtacgttattcctctggagatattcgggcgaaagacggaaaattgtattttaatgatcataaaacaagagcgacttgggatgttccggaaagcgggaagcgtaaagtgtattttgccgttggtaactgcttgatcggtaatgttaacaacacgaaagagagtatggcaattgcttggatgaatggtagcaatgcaaccacgatgattggttatgttgtgactacatggcatggacgtaacggttggggcggcttgaaatactggttaactaatccgggacgttattctttggcagaggctgtttacatgaatcaacaggatttcttgtaccagcaatatcaatggtatccttctttgattaaggagaactatcctacgtttgaaggaaatgaattccaacttgcagggcaaaaggtggcagaagcgataaagggacaaccgacgcaggatcagatcggtttttggcatgatcgggatgtgttggcttactatggtgatccattgtggaacgttcgtttgcaggagataccggaagagaccgattttaccgtaacttcaaaggtgaagggtaaaaagtgcattattacaatcaagaccaaggagaattttagcctagaacgtatgaaaggagataaatttaaacaggaacatgtgcttgatttgcctttcagttacttcttcccggaacgcttgaataatcctcgtctagcagcagggcaagattggagagcggtcgtggatgaaaacttcttgatcatttataatccagatttcaaacctaatatgacgtatgaggttgtattggatatagataaatagtattttccaatttaggtattaggtaaaaggtgtgtttcggcacaccttttttattttttgatatagatcaagccttgcaatagtcatctgtgttatttttgcacgattttttaagaaggaatgtatgaaaccgactaaaacgttacgtaaacagttatttcaattgacgggaccgatatttgtggagaccttactaatcatgttattgggtgcaatggatacgtttatgctgagtcattattcggatgataccgtggcggccgtcggggtggtaaatcaattattaaatttggtatttctcgtgttcggggtgtcgacagttgggacttccgtgttatgttcccagtacttgggggcatcgcaacaggcaaacgtgcggcaggtggtaggggtatcattggtttttaatactctgatcggggtgaccacgagtgctttcttgtattttcgggctgaagctttgttgaagatgatggatttagcctcggaattgattagtgaggggttagcttatatgcaaattgtgggaggttttgcctttttgcaagctatcgccctaactatgtcggctgtgttgcgaagtcacaacaaggcatactatcccatgcgggtgacgttattgatgaacgtgttgaatattatggggaactatgccttgattttcggtaaattcgggttgccgcaaatgggagtcgtgggggcagcaatttcgacttcttcttgccgattggtggcgttagcgttattattgtatatcacgtttggtaaggtggtacctcgcttctcgttttcgtgtctgagaccattcccgtgggataagttgaaaaacttgttgcatatcggtcttccggcggcaggggaacaggtgtcatatagtttgtcgcaagtggtcattacttattttacggtcatgttgggaacggcggcactgacagcacgtacttatgcgatgaatattatcctgttttcatacgtgttttccgtggcccttgggcaaggggctgcgatcctgatcgggcatctggtcgggggcgaacgtactgatgcggcttttatattacagaaatattgcctgcggctttcgattgtggtttccatttgcgtggcggttgtcactgcggtttgcagtaagtttattttcggaatgttgacttccaacccggagatcgtgtacatgggagtgatgattctttgtattgatgtcttgctggaggtgggacgtgcggtgaatatcctgtcggtaaacgtgctgaatgccgtgggggatgtgacttatccctttatcaccggattgatcgtcatgtggggagtggcaacagcgttaagctacgtgttcgggatctctttcggttggggacttgccgggatgtgggtggctttcacgctagacgagaatatccgggcgattattttcgtgcgtcgctggaatagtcggaaatgggtgggtaagtcttttacccgggtggagaaattgttaaagcagaccagctctcacccggcttaacgtttcgggggtcatgccgagtcgggaggcaatgtggatgaggggagcccgtttgactacttccgggtgttccgtggccagtcggtggtaacgttcccgggcggtctcgaaacgacaggcatcggctttttgctgtgattcgatcagggagttttccagcattttgcaatacatgtgttccacctcgtgattcgttcgcataaggtcttgtagttgatcgtgtgggaaagaatagataacggtgggttcgagagcctcgatcatcaagtagctcggggtttgccggaaatagctttccagcgaaacgaatatccctttttcatacgaaaagtgttccgtgaggtcccgcccgtctttattgtagaacaagcgaatcatgccccgggcgaccatgctataatatttgcatacctcaccttctcggagaaaaaggtctcctttggccagattgaaacgtacgagaatgttggccaatttttcgtgagtttccgggctgagtggagcggtttgagcctcgaattgcctaatgatttcttccttcgtgtccatgaggcaaaaatagtgaaaaaatctgttatatttgtgacataaaatattatgatcatgaaacaagttttgtggatactgcttgctttcgtgctgttatgtgcatgtgaagaaaagcattttatgacagatccggactaccggaggatggtggaacaggattttcaaaagaaaaaggaggtgttggaaggtaatccgggtaatttgtttgccgtgttcgattccccgatgagcgtggaggaacgagaggctctgatgtttctctacgcctattctccgttgattgatttatctttttcggggggagattttctgttgaagcacgtgcgttgggcatttcaggcgagagaggcgatgccttgggggaaagatattccggaagatatattccgtcattttgtacttcccgtgaggggtgggaaagagaatttggacacggcccgaatcgttttctacaaggaactgaaggaacgggttgcggcctgtgaatccatggaaaaggcggcgctggaagtgaatcactggtgtcatgaacacgtgatctataaaccgaccaatgcccggacccgttcaccgctagccacgatgctcacggcttacggtcgttgtggtgaagagtccatattcacgctggcagctttgcgagccgtgggaattccggcacgtcagatatacacgccccgctgggcgcattgtgatgataatcatgcgtggattgaggtctgggtggatggcgagtggaagtacttgggggcttgtgaaccggaacctcggttgaatatcgcgtggttcacgttgcccgtgcaaagggcgatgtacgtggagtcggaggtgttcgggaaatataatggtcaggaagagattgtttacgtgaatgaaagtggttcaggcgtgaacgtgacttcccattatacacggaccgttccgacagtagttcaagttattgacgagaacgggcagcctgttgagaatgcgaaggtggaatataagatatttaattacggggagttttaccccgtggtgacattgtattccgacgtgaagggtgagacttccctgacgttggggcaaggagatattttcgtttgggcaagtaagggaaagaagttgggttttggggaattgtccgtggagcggcaggatacactgaccgtcgtgttggataaaactgtcggggatttgttttcaggagagtgggatttggtaccgccaaggcaacatgatattacagctttgtcaaccgatgaggaacgggccgtgaatgaccgtcgttttgcccgggaagattcgttacggaatgtttacgtggcaactttcatgtcgaggacgcaaggcggggatgtagcgatggagttgggtgtggatacggcacgttttgccgcatatatggttgcgtcacggggaaattattccgaattgctgcgttttatgcgtgaagtgttgcctgaacgtcggacattagccatgaatttgttgggtgtgatcgcggagaaggatttgcaggacactccggcagacgtgttgttgtctcatgtggaaggagacggtcgtgatgtggcgaatccttatttcacggaatacatactgaatccgagagtgcagaacgagttacttacggcttatcgggaagccgttcgggaatttttgaagaggcacgatattacggatgttaccagtttgatccaagaaaccggaaaaatcaaggttgttgattccctgtaccccgcgaaggtggtaactccaccggtgggagtgattcgggcaggggtgacggatgtactttcccggaatgttttcttcgtggcagcctgtcgtacaatgggaattccggctcggttaagcccgatttcgggtaaaccggagtattatcagaacggaacgtggcatacggttaatttcatgaccgaaaaggtagtaccgaaaggggagttgatgttaaattatgctcaaaagacggtgagtgacccaaaatatttcctgaactttacgatcggaaagttggaagatggtcgggtacggacgattgacttgggaagtaacgcggcggtggatatgggtgttggtgcgtcatataaaacgatcttcacgaaaccggtcacgctggaagagggggattatcttctttcaacgggaaatagacggagtgatggggctgttttggcagatttggtatcattccaagtggaggctggtaaattgacaaatatagatatgcttatccgtccttgcgtggagaaaatggagattctgggagtggtcccgacggcgctatccattgtcccggagggcaagacaaaaccggaggcaatccgtttgccggagaaggggtacacggcgatagccttgatcgaggcgaataaggaaccgacaaatcatttgttgcgggatatgagcgggatgaaagatgatttcgagaacttgggtgttcccttgtatttcgtgtttaaggatgcggatcatcaggctaagttcaatcgtgaggacttccgggcttttccttctgtgatgcggtggggaacggacttggacggtcgtttgctgaaaggtttggcagaaggattatgcttgacgaacacggagagcctgcctttgatcgtcctgttaaacgcgaagggggaggttgtttttgtttcccaagggtatcgtgtcgggttgggcacgcagatcatgaatataataagtagaaagtgatagacattataataagagaatttgatgaacgggacgcggaaaccgtgtcacgtctgattaggaataacttgaccttcgtgaatagccgggattatgaacctgcggtgatagactatatgtgtcgtttgttcacgcctgattatctgtgtggaatatcggctacccggacgatgttcgtggcggaggaaaacgggaaggtggtcgggacggttgggctggaaggggatgaggtctgcgccttgtacgtggacccggatgtacatggccggcgggttggggaacgtttattacaacgcgtcgaggattttgccttgagtcgtcatgtccatttgttgcatttgtcggccagcctcacggcagtcggtttttatgaaaaaatggggtatcgctcccaagagaaggaggaatccgaacttttcggtcctgcttatattatgactaaattattgtaatcttataaaatatttccacatgaaaaaggtgttggttttcttcgtttgcttgttgttgatacaggtgagagttatggctcaggatattcaagtgcaaccttctccccggcaggtcaatgttacagggaagagtatgacgattccggttgctttccggctcgtgggtgaacaggaggctaatcctcatgcaatagctttgttgaaacaatttttgggtgaccgtctcgggacggaagggtttcccttgtacgtgggcgagaaaggtgaccgggccgtgcggggggcaaaacggctgatacccgatcatccggaaggatactacctgtcgattaccgataaggccatcatgctggccgggaatgacgagcggggaacgtattatgccgtgcgtactttcatgcagttgttccacgaggggcatttaccgtttgttaggattcaggattacccggacgtacgtttccggggcgtggtcgagggattttacggtacgccttggagccacgaggcccgtttgaggcaactgcgtttttacggggagaataaattaaacacgtatatttacgggccgaaagacgatcctttccatagttcgcccaactggcggaaaccttatcctgccaaggaggcagctcgtcttgccgagctggtgaaggtagcaaacgagaacgaggtggattttgtgtgggcgattcatccggggttagacattcgctgggagacttccgaccgtgattcattgatggccaagttcgagcatatgtacgatttgggcgtacgttcttttgctgtcttttttgacgatatttccggtgagggggcgaaagccgaccgacaggtggaattgttgaattatattgatgaccatttcgtgcaggtaaagcccgacgtgacgcctttgatcgtgtgtccaaccgagtacaataaaggatgggcacgaccggaaagcgggtatcttgccacgataggtgagaagttgaacccgtccgtggaggtgatgtggacgggagatcgggtgatttccgagattactaaagaaggcgtggagtggattcgggaacaaatcaaacgtccctcttatatctggtggaatttccccgtgtcggattacgtgagggatcacctgttactgggcgaggtgtatggtaacgggaaagatattgccgggagtatttccggtttcgtggctaatcccatggaatgggcggaggcatccaaactggcaatatattgcgtggcagactacacgtggaatatgcaatcgtatgatcgttcccggtcatggtaccgggctattcgggccatcatgccggagaacgtggaggcctttaccgttttcgcccgtcataattccgatctgggagagaacgtgcatctgtttccgtcgggaagaatctgtggaaattcaacccgtggccgagcgtttcataaaggggtatcgggaaggacattatgatgagcgggattttcttgctttgcaggacgagttcgagcgtgtggcagaggctgccgatttgttgttgattgaccgggaaaacgaggcgttgattgaagaaattaccccgtggttgcatcagttcaagatattgggagatgccgggcaggaggctttgtccatgattaaagccggggaacgtggtgatcgtgaacttttcctgcggaagtataatcacgttaaagccttgcgcaagagaagttacgagctggaaagacaatttaatcagaatccttaccagccgggcgtgaagaccgggacgacagtacttcaaccgttggtgctggatgttttcacggaggccacggaacggtttaatcgtcagaacgggacggatttgcctttgttagccgattattcaccttgtaagttgaccacgaacgtgcctcaactggaacatctgcctttacaagtatatcccagtcgggttcatttgacccctttgctggaagtcgtgaaatggccggccggggggtacctgcaattggaacttgatgatgcctaccggattcccggtacccgtttgaattttgacgtgaaaggtgatctttcctggggtgtcatggaagtttctgctgatggtgagacgtggcagaccgtgacgttgacccgtgacgctcgcggccgtctgaacggcaaatgggaggatactcccgtgaagttcgtccgtttcacgaacacgggagagggagaacaacaggtgtatttacgggagttctacgtggtgttcagtttgtgatgctatattttcttgcctgcccattttccgcttttcatgtacatgaaaccgagaatgagcaagatgctccagtaggcgtgttccgtggtccaacagatggcgacatccgcttggagatagaacacgatgtagatgatgtagagaacgtagaacgtgagcgtaccgaactccatgaatagagccatacgtgtgtttcctgttcccgacacggcgttgaaaagaatactgccgggggtggaaagaaggactgcgctcatcatcacgaaaagtgaaggaatagtggcttggatgagttggggatcatcggtgtatattcttaaaaatgtggcgggagccagtagtatgatgatgccgatcgggatgacaaagaggtagcacatcttgattgttttgagacaagtactccagacttgggaggtggcctgcgctccgattaggttactcacaagcgagctggtcgtggcagcaaaggcggaaaccggcatgaagaagaacatagcggcactgcgcacgatgttggacactgccagcgggcgttcaccgaggtgttccacggcaataaagaacagaaaccaagtggccatggccagaaaggactgaatcatagtccaaatggagatgttaagtatgcccgacaataatttcgggttgaaactggacaggttgaaaagtgcgtattttttccaatcaacttttttccacgtatataggatatagaatatcatggaaacgagttctgccactgacgagccaatagcagccccgctgatgcctaaggccgggaacccgaatttaccgaaaattaacaggtaattcagcacgacattggtgccgaccatgacaagcgaattgatcgagagtatgcgtgtcgtggtgattcccacgaagaatgcccggaacatgacggcaacaaacgagaagaagaaaccgaatacccgccatttcatgtagtcgttcgtggccacgtagacttgttccgagtcaatgacggaacggagaaccgaaggcgtgtacatgcgggaaactgtgaacatgagtgtggcaagtcccaagaggaaaagcacaccttgtataaaaatggggccgatatctttgtagttgccttctccattgcgtcgaccgatgagaatttgagctccaatgctgaagccgaaagcgagcatatagattgccatgtagtacacgccggctaaggctgatgcacctaattcgacttctcccactctgccgagaaatgcggtatcggtcatgttaatcaagtgttccatcaacaaactgactaggatcgggaaagtgatcacccatatttgtttgtgtgtaaatctcatattcgtttcgtttatcggtttgttttttcgggccgcaaagatacgtatttttattgttttgtggctgttgggtggcagataaggtggagaacgggttacgtaaagatgtcgcgggtgttgatggttggttgccaacacgtttcattgatcggctttaatttggatggggaacgtctgtaactggtctctgcggatggttcttccgtcgatgtcgccctcaaatcaggcgggattgtgagtgtcatttcggaaagcctgtatggtagccatttcgtgtatattattggggggattttaacgtttcagagctgaaatgaggtgattaattgttagaaaaattaaatgaaattgtttacattagtcgcccttttaatgttcttgtttgtgttaaatttatatgttatgaaagaaagttctacaagtattaaggctttactgcctgtgttgtttggtttttttatcatgggattctgtgacgtggtggggattgcaaccagttatgtgaaggccgatttcgggttaagtgaaactattgctggattcctaccttctatggtatttctatggtttttgttactggcggtcccggcggctatttttatgaaccgtatcggtcggaagaaaacggtattggtgagtatgttggtgactattgtgggaatgattattccttttattgattataatctgtacacgtgtctgatcgcttttgccttgctgggaatcggtaataccattttgcaggtgtcgttgaacccgttattgacgaacgtggtgaagggaaacgtactggcaagttcgttgactgcagggcaagtgttgaaggcagtttcttctttttgtggtccgtttattgcggcatttgcggcaacagtactgggaaattggcaatatcttttcccgattttcgccttgttgaccttgatttctatgggttggttaatgtttgtgcacattcgtgagaaatcaccggaacagtcgaactcttcgtggggagcgacgtttgggttattgaaggataggacgatcctgttgcttttcttgggtatcgtgtttgtcgtgggcgttgatgtcgggattaacactgtggctccaaagttgttgatcgagcgttgtgggtttgatgttacgggagcgggtgtcggatcgagtgtttattttgccttccgcacgatcggggctttcgtgggaactttcctgttagcacgggtttccggtagcaagtatttccgggtgaacattctggtagctattgctgccatgatcgtgttgttcttcatgtctggacaatactcgattttggtgttgatcgcattgatcggtttcacgtgttccagcatattctcgctgatcttctccatggccattcaagcccgtcccgagaaagctaacgagatttccggtctgatggtgacaggtattttcggtggtgcggtaatcccgccattgatgggatattgtacggatttgatcggtacacaggccggttcacttatcgtgattctctgttgtatgtgttacttgttgtattgttcggtgggaattaaaacccggaagtgattttaaatttcattcaacttttagtttttatcttttaatttttgccttattatgtatcagtttgataaaagaatagtgatgacattggatgccgggggaacgaattttgtattctcggccatccgatctaatgaagagatcgttgaaccgattgttttgccttcgaatggcgataatttggagaagtgcttggagacgatggttacgggtttttctgccattaaattgaagttgccggaagatcccgtggcaattagttttgcatttcccgggccggcagattacgtgaacgggattatcggtgacttgaagaacttaccggcttttcaagggggagtggcattaggtgcttttttgagaaataagtttgggattccggtatttatcaataatgacggggacctgttcgcttacggggaggcattggctggtgcgttgccggaagtaaatcgtatgctacgggatgcggggaaaaataaggtatataagaatttgatcgggattaccttaggtaccggattcggtggtggggtagtccgtgatggggagctttttctgggtgataacggtgcggcagccgaagtatgggtgttgcgggataaacgccagccgatttacggggtcgaggagggaatttcgatccgggcgatcaagagggaatatgcccgtttgtccggggatacacggcagttgaccccgaaagaaattttcgagattgccgagggaaatctggaaggaaatccagtggcagcaaaaagggcgtttgatcatgcgggagaagtgctaggtgaggctattgcctcgatgaatgccgtggtggatggaatcgtggtgattggtggagggattattgctgcccacaaatatttgatgccggccgtgatgcgggaattgaacggaaccttggaaatgtacgaaggggctccggcggaccggatggagatgaaggcttttttcctggatgatccgggagattgtgcggctttcttggctcccacatccagatgcattgtcgtgcctggaacgacggaaacggtcgaatatgatccagtgaaaagaatgggggtaatcacgacaaagctgggaacaagcagggctatcgctttcggagcttacgcttttgctttgaatgagctggacaaataggaaaagttaaaattagtaaggcatttaaaatgaaaaaacaactacccccaccggctcccccttgcatagggggagaggcgaatgcgagaaaacatcacgatctaacagtgtagcgtgtactccccctgtgtaagggggagttagagggggtagttaaggcgttggcccgtgtggttggaatctaaaataattaatcagattcaaaatttaaaatctagaatctaaaattaactagggattataactcattttttttatttttaaaagctaaaaattagtagatctaataaataaaaaaatatgagttcaaaatatgcactaaatcctcatgctttggttcgttttttagagaaagatgctaaagatttcaccaaagatgatattattcgttacgtgacagagaatgaaatcgagatgatcaatttcaggtatcccggtgcggatggacgattaaagacgttaaattttattatcaatagtcttgatcatctggataatatactgacatgtggtgaacgggtggatggttccagcctgttcccgtatatcgaggccggatcaagtgacttgtacgtgttgccccgttatcgcacggctttcctgaatccattcagcgaaattcctgcggttgatattctttgtagtttttacatgaaggacgggaaaccattggaaatgtctccggagtacacgatgcgaaaggcgcacgaggtattgaagcaagtgacgggaatggaatacgaggtgatgggggagttagagtattacgtggtgagtgaaaaggacgatttatttttagcctccgatcaaaaagggtatcacgagtctacaccttttaacaaggggcgggatttacgtgcgttggccatgaaatatattgccggaaccggaggattgattaaatatggacattctgaggtgggtaatttcacaaagggagatttgatgtacgaacagaacgagatcgaatttttgcccacgaaaatggaagatgctgccgatcagttgattattgccaagtggattctgaggacgttggcttaccagtttggtgtagatttgacatttgccccgaagatcacggtaggcaaggcagggagcgggttgcatattcatacccgtttgaaaaaaggggataagaatatgatgatcgagaatggcaaattaacggatagtgcgttgaaagctattgccgggtatctggatctggcaccctcgttgacggctttcgggaacacgaatccgatgtcatatttccgcttggttccccaccaggaggctccgacaaatatttgttggggagatcgtaatcgttcggttttggtacgtgtgccgttgggatggacgagtggtgcgggagatatgttgcgtgatgcgaacccgttggaaaaagtggaagatcaggatttcagtggtaaacaaaccgtggaattccgttgtccggatggttcgtctgatgtgtacctgttgattgcggggttggcagttgccgtgcgtcatggatttgaaatgaaggatgcgttgcaatatgcgaaggaacgttacgtggatgttaatatatttgatgatgcgaacaagggggttgctgatcggttaagtcagttgccggcatcctgttatgattccgcattatgcttggaaaaacaacgtgctgatttcgaaaagtacggggtgtttgctcccggcctgattgatggtttggtggccggtttgaaaaagtttgatgacaaaacgttgcgtcaggatttaggaaacgacgaggcaaaaataatggaactcgtgcaaaaatatttctattgcggataaaaaggcaatggaaaatgagctattcgattttatgatgtcgaatagctcatttttatttaatctgatagtttttttctattctaactagatatttttatccttccattcctttgggaagagtctgggatcttttgtagagaaaacctctccttgctttctttttataaatcgaatattcgactatataacgaattgattctatgtgttttgtgttggaataacgatttgcctgataagaagaaggtaattattccttatgcatttattaaacgatcatttaataatatgcgaaaataaataataataatgataaatacaaataattatttgttgacaacaagactgattaccaattaattatcgttattgtacccaaaaccataaaactcatttgagcgtatatcaagaaatgatcgttctttgctattcctaaagaggatgtgggggataagaggaacgaacgtgtataactaggaattaaatgagtgtaaaggtatttttattgttcttttctctcctgtctatcccgggagtaggggcgacgagatatgttcccgttgaagaagtatcggatagtgtacgtgtatttcgttttgttccttgtagagcaacgttttacgtgcattttggatccaataatgtagagttggatagtattctttctatggtaaaacgctatcaggaagatattgaggcagggcgtatcatgttgcagttggatagttatagtacatctctttcaactgatgaagaaaatctgagtttagcgttacttcgtgctaacgaagtgaaaaaagctattgcttggcgtagaaggttaacagatcattgttttgtggtgcatacacaccccacgttattggaaaatacacgtgaggtcgtgatcatacgtttactggtaaaagtaggagaaaagcaagaaacgaatgttgctttatccgaggttcaagatcctaaaaaggctaaagttcataatcatgtggattcatctgctttgtcggagaatgatgttgttatgttgcctttagcctcggcggaagtatcacctgttgtgaaactgtagactatttgtccggtagaattcgagtttctggttgtattttgatgatttcccggtaagatattgcttattatattgttatggcgtaagtcatggtggtgcataagtaatatgttacagggaaatttcttattcttgtttataataaattcttttactgagcttgaaggttaattgcctcccgtcatcattgataaaggcctcgttcgtgaaactcgtgagaggatcattagtgaattgaatttcattcttgtttaaaagaaaccactttccgatagcatcacgggaggagtttgcacttagattataaatactgaacgtgtaggtgtagtcaggatgtagtgagaacgtgaaccgttctgttggcttgatattgttgggtacataggttatgtagtctcccgtgagtcgtgcgccacgtggatttgttccggggtgtaagccgatgatttgagtaacggtaaggccgttcgtggaagtgtgttcaacatcgttcgtcggggagagatgtccgagtaattgagcgctgactcccttccctgtaggtagctttagcgctaaatattgttctgccaatcgggttgctatttcgccgttattgatggtgaacgtggaacctgtggcttgatcctttaaggttgctttatctgtttgatacaggtattctccggcgaagtaataattactggtaatggcaggtgttgcggcaaacgtgctgtccggcatgttggaggccttgccttgaggtttgtccttacatccattgagaagtaccatgggtaaaagtagcgtgatcaaaatcattgttttcatattctcctgttttatcgtgttaaacggaaactacagaggaatgttcgataggatgattcttacacgagtttcattttttcaagcaagatggatgcattcatgttttggctgataccgggtttcagtttataatcataggcaatatcatcatccgtatgcgtgatctcgaaacaccggttaaaaaagttgtctggtattgtgttggcgagttctccgagttcaaggtcatgcgtggcaacaagtccggcaacaggtaaagtaagtaatttttgaaggaaacgacgggaaccgttcaacttgtctcgggagttagttccttttagaatttcatccaaaatgataaacaaacgttcttcgtgttgtgccatgttgacaagttgttgtaatcggagtaattcggcatgaaaataagaggttccttttgccaggttatcaacggtgcgcatactggtaaagagggccgtaggctggaattcaaaacattcagcccgaacgacagctccacaacaagcaagtacaagattcacccctatcgcacgtaggaaggtggatttccccgccatgttcgctcccgtgatgatatagaattcgtgtaaccgggctacttcgaaattattggttacacattcattggcgggtaggagggggtgaccgatggctgtacctcgtaatagcttgttttcaccggggatggggtggataaaatcgggatggttatacttgtagttggccagactaactagaacgtcaagttcgcctgtgatttcaatccaggtcgggatggccgcggcataacggcgtttccaggaaacaaggcgctggataaggtgtaattcccgcatgaaaagcccgttcataaacatggcaaccactgcgttagagcgctggtcgaaactttcctgtattttatgcagagaacgtaaagcttcgtttgcgttgtatgtttcgttgaatagttgttgacgcaatgtttttaatttggcggaagaacaggtaaatgtagaaaaatgtccgattagttcgtgaaggttactgaacgagcgggtgaattcatccagacgcatatgggttcgtaatgttttttgagctggtagatagctacaaaaaagagatatgcaggaaaggaataatggaatatttaacgtgagtatagaagcaatatacaatatccaggcagaaatcgtcagtatcggaaggatatataggaaaggacgtgtccagcgtggtagcccgacttgttctcgctgccattgttcgatttgttgcatggccatatgggtaatacgttgactgttgcccttggctcggaaaacgtgacaccattccggcttgcgggcaaattcttcgatggcttgttgacgctcgatgatgggttgcccggattttaacgggtagagcaaccatccccgcaatttatccctcccgtgaggtgtaaccgtacggttgatggcttggaaaagggaatcttccccgaatatgtcaagatcatgagcgtaagggtgagtctggtctttgtactcctcgcctgtcggaaggtttttaaagtttcctgcaagatattccagttccacacgggaacattcttcaagtttgtgcaggaattgtatttcttttaataatttggtttcgaatatattcgtgatgatgaatagtactatggcagcaataaaagcgatgagataaggcgtgtattctgtgttggcgaaggtgtatataaaatatatggctaacaggaataagaagacttttgcgagggtgataccgttacgccgttgtctgtgtttttttaagaggatcgtaaggcgtgacatttgtgcttgatagtattcttttggctgctgcatggtatgaatgttatttattgcaaatatagtttt

SEQ ID NO: 10821 - DNA, 6847 bp, Unknown
  gut microbiota DNA sequence
aatttttattttatgaatgaaaaattatgcatttattaaaatgtaatattgctaaaaatgaaaacgattaaaattgaaaaattaacaaagaattaatgtagaatcattttgaataacgaatttcatcgtataaatttgttgatagaaatggtgcgtgatctttagagatcaaaaaaagttgaatgattaaaacaattaaaaatgaaaagattaggattgattattgttagttgcatcttctcgctgttatcggtgcatacgttgtatgcgcaggaacaggataagttgttgcaactattgaaacaagagttggcggcggatatgcaagaactgcagaaacaggaaaatcctccctatcacatgaattttagggtcatggatgatcgtacggtaaatatttcaagttctttcggggcaacaatgatgtccgtggaacaacattctcgttcgatggttccgcaaattcgggtgggagatactattctggataattttaaatataatgcaatgggtgccccggctgatcagcgtggtaatgtacgggtggcttacctggggttggatgatgagaaaggtgccgatgcaactcgtcaggcaatctgggccgaggtaatgaaacgttatgattttgcggtggaagcgtaccaaagagcgaaaactcaaagtcaagtgagtgtcgctgacgaggataaggctccttctttctctgctgctccggttgagaaatattatgaggctcctcttcctgcagagaagttgacggttgatcgagatgcttgggaaaaacggttgaatgaaatttccgcggtgtttaaggcatatccgttattacaatcaggtgatgttagtttgacattccgggttctgcggaattatttcgtaaatacagaaggaactgaggtcgtgcagaatagaacatacgcgcgaatcatgattagtgcatcaatgaaggccgaggatggtatggagttaccgttgaatatgtcgtactttgcatacgatccgaaagatcttccctctaatgaccggatgattgctgacgctaaggatatggtaagaaggttaaccgtgttgcgtgatgctccggttgttgatccttacacgggacccgctattttgtccggtccggctagtggggtgttcttccacgagattttcggtcaccgtattgaagggcaccgtttgaaaggtgggggtgaaacttttaagaagaaagtaggggagttggttttgcctgcagacttccaagtatattgtgatccgactttgcgtagttacgccggggaagagttgaatggtttctatttatatgatgatcaaggagtgaaagctcgccgggttgatgtcgtgaaagatggcgttttgagagaattcttgatgagtcgggtcccgctggatggattcccgcgtagcaatgggcacggacgtactgccgggggtggtgatcctgtatcccgtcagtcgaatttggtggtggagacaacagcacctcactcggaggctgaattgcgttctatgttgatcgaggaggctaaaaaacagggaaaggaatatgggtactattttaaagaagtaaccagtggtttcacgttgacgggagaaggaggtagcttgaattcatttaacgtgactcccttggaagtgtacaggatatacgtggacggacgtccggacgagttggtgcgcggcgtggatttgattggaaccccgttatccatgttctcgaatattgtatgtggaggtgatactcccagcgtgttcacgggagagtgtggggcggaatccggttgggtacctgtgacggccagttccccgatgatcctggtaaacaagatcgagactcaacgtagacagaagtcaagagatttacccccgattttaccggccccgggaaagaactaaaagttaaaagctaaaaactaaaagttaatgaatcgggtgatttaaaaatcacggggtcattgaaatttaaaatctacaattgaaatgaaatatatattatcgattatattatttttcctgttggcaggatcattgttcgcgcagaatgaacaggatcaggtgatttttaaagctatgcaggatgagatgcaacgtagcaaagatcaattgatgttgccgggtatgcagaaaccgtattatttgtcctacactttgggacgtacacgccagtttgaggtcgtgggtgcgttaggtggtattactaatttctacgagtctccctggagtgccgttggtggggtacagatgttcttgggggattatgatcgtaataatgacgttaattacgcgtgtgcttctattcaggccggaatgccggagcaggctgattatgatgtaatccggagaaatttctggttgggatcagatgccatgtataaatggtcattgcaggcgggagcgatgaaggatgcttatttgaaggcgaacccgaagactgcagaagaagctgccgtgaaggatcaacagaaggtggctgccgttacccgaatcgaggaaccgaagactgcttacacgattgatcgtgcgaagttggagggtattgtagaagaattatctgctattttcaagggttataaggatatttatgattcatccgtggctattacggggcaggaaatggaagtgtacaagtctaccacggatggggtcgtgctgaaagaaccgttacgttatgcaagtttggtggtctctgcttacgtgatgaccgaagatggagttcgtattgatgatgcatattccgtgcttgtcgctcgtccggatgatttgccttctttggatgaattaaagaaaggggttaaggtttttgccgataacttgatcaagttgaagaatgccccggcaattacagaatattatgcaggtccggtgttgcttgaagatggtgcttgttcatctgtttttataagtaattttttgaaacgcggagctctttttgcttatcgtaaacccgatactgaccgggctcaatcggtgaaaacgttggatgctcgtttggggatgaagattgtagataatcgtgtgtctatcaaaaactacagctctttggataagtataatggagttcctttgttgggggcttataatattgatgcagagggtgtcgttcctgctaaagagatgacattggttgaccatggtatttttaaaagtatgctgaacgggtgtatcccgacgttgtacgctccccaatcaacgggtagttcccgtttcttgttgtccagcagcaatggcatgttcgccacggctccgggaactattcatattgaagtggaaaaaggaacgaagccggagaaaatgaagagcgcgttgattaaagctgctaaagaagaaggtttgaagtatgcttatattgttcggagtttagccggtaaggcttctcgtatctatcgggtggatctggacggtaaggaaactcaagttcgtttcggagatgtaagtgggttgacgttgataaatctgaaacgtatgttgaatatttccagtaaggaaaatgtaagcaactacattttaaatggtcagttattgtcttctttaatttatccatcttccattttggttgagaatatcgagatcaacaagtcagacgtgaagaaagataaggaacaagtattgactttcccgttacaacggtaagattattttaagatatcagaacaaggggcctttgattcagagatggatcaagggttttataagttcttgatggtataaaaaaaggcggtcgaacaatttattcgatcgccttttctcttggttacctgtctttatttaatttcaatagttctctctgcttttttaatctcttccagagatagtttcggtagatcaatggttagaacaccgtgttcaactccggctgcaattttctctttatccacgtcatccggtaggatcatggtttgttggaatttcgagtatgaaaactcccggcgtaaatagcgatgttccttttgttcctctttactctcgctctttttctccatggaaattaccagattattatcttcgtctatgcgaacgttgaaatcttctttcgtcatacccggcgcagcaacttctactttatattccttttcggattcaatcacgttaatcgcaggtgcggttgcgtttgctcttgtcatccactcgttatcaaagaaatcattaaagatacttggtaaccaattttgagttcttcttacaggcatcataattttagtctcctatctttaagttcaacattatcatttaattatattcaggtcttttgtgaacctgcattcgtttatagatattgcaaagtgtatgccaactctttttatggactttttgtcacaattttatgtcaaattttcagcgcttgcgtcaaatagagaaaagaaaaaagcgagattaaatatttaaatttctaataataattgtagctttatacttccttttaatgaggatagaataatttaatgataaacatacattatatgaaaaagaattacaattgggctaaagtgacacttgttatggggtgtatgcttgggttggggtggttggcaaccccggtaatggcacgagatatggacgtgcggttaatggatgaagatacgacaattatggtagttgccgaggtacaaccggaatttaacgggaatttgaatcaatggatcggggaaaatgtacagtatccggaagaggcgtatgtcaatcaaattgacgggcgggtatttgttactttcgtgatcgagaaagacggagcggtgacacatgctcgtgtggttcgatctgcccatcctcttttggacgcagaggcattaagggtgattgcaggtatgccgaaatggaaaccggccatgtcaggtgggaaagccgtacgtttcgagaaaactttaccgattacgtttaaatataccccgcaggaaacggtattgacttttgaagagtatttgaaaaacttggaggaagaacgagtgatgttggagaaaggtgaaaagatgagtatggaggatatggctcggcgggtgaatgcttttaaagagcaattgggtgatgatgccaccttgcgtaaaatgttgctggaaaagagtcagtcaatcaagggacagattgatagtactgtgaaagttcaaacgaaagtgttgaagttgaaaaagaatgacgtgaaggaattgacgaagatttacgaggatgagattgatgcgaagatcaaattgatagagagtttgggtacggatcagtttatcagttatttcgtggaatcggaacttgaaatgagaaagatagagatggacaagatgttgaagattaaagatcttttgaaggatcgcttcaaattgtattttgagaattacatattgcaacaataatatttagattaaaagatgtaaaagccgagattctttttatctcggcttttttgttgccacattgtcagtttcggtcgtaactatgcatcagcttagaacgtatatcacgggttggtacatagtttgtattaactattacaaaatgtataaatcataacagtatggcctatatagattactataaaattttaggagttgaagaaagtgcttcacaggatgatatcaagaaggcttttaagaaattggccagaaagtatcacccggacttgaatccggacgatccgaatgccaagcaacgttttcaggagattaatgaggcgaacgaagtattgggtgatccggagaaacggaaaaagtatgaccagtacggcgagaactggaaacatgcggacgagtttgaagctcagaaacaacgttaccagcagcaaggtggtggcggatttggtgacggaggcggggcttactggtcctcgggaggcggattctccggtatgggaggagacggtgaattttcggatttcttcgaatccttgttcggttctcggagaggtggtgggcgaactgccggattccggggacaggattataatgcggagttgcatctttcattccaggatgcggctaagactcacaagcaagtgttgaccgtgaacgggaagaatatccgtattaccgtcccggcaggtgttgccgacgggcagacgatcaagctgaaaggtcagggaggtcccggggtgaacggcgggcctgccggagatttatatatcacgtttgtcattgccgaagacccggtattcaagcgtttgggtaatgatttgtacgtgacggctcctttgaacctgtacacggcggttcttggaggagaacaagtagtcgagacgatgaatgggaaagtgaagttgaaagtgaaaccgggaacgcagaacggggcaaaggtaaggttgaagggcaaaggttttcccgtttacaaggaagagggaaagttcggtgacctgatcgtgacttactcggtagagattccgacgacgctgacggaaaagcaaaaagagttgttccgggaattacagaatcttaattagggagaagagttatggaaacagatttgattatagtcagagaatactgtcagaaaagtcacgtggacccctcgtttatcgtgtctttggaagaggacgggttgattgatatccgggtggttgacggagaacgctatttgcttgaatcgcaattacaggatttggagcgttttatccgttggcacgaggatttgtccgtgaatatcgagggtatcggtgtcatccacgagttgatgggacgtttacacgaaatgcagcatgaactggatcagttacgccgagaggttcgggtgttccgctcgaatcatttcgggtattgggaagaataggagctaaagagtgttcgtatatacatactttgtactttcctgaaaatggttgactcggattaaacaaaaattttaacaaacaccctaacaatgtatcaaa

SEQ ID NO: 10822 - DNA, 41030 bp, Unknown
  gut microbiota DNA sequence
cccccttggcgcttggccgatccccgaccgttgagtcaaaaatgaagatgacacagtttaatttacacccccctcctactattgaatcaagtggttggtgagtgattacggtttttgataaacccattttatagcatctcccacaacccattgtccgggtaatccgatgtcatatagcttgacagaacattctccttcaggcaagaaaaattctccaatgactacccacctagaagtttcaggaacgtggactttaatctttttttctctgttgttgtaggatatggagtagcaatattgtatgtcccgaataggttcttgggtaatcatgtgtctactacgttcgtggctataagagatgttcgggatgtaagcatatatcttgtatttcccttttttgttaatgggagttgtccaagtcagtgaactttcccctttacctgttctttttctgagacaactcaaacaatattctccgaaacagtcgggcataagtgtatattcccaatgagatacagctgtagaggaatgtgtgtggtgattatgatttagtcccaggaaacgttttaaccaaggggcaggaggatttgtgatttgaaaattgtcatcctcgttatcaacgatgatttcatttgcgggaggaaagaatatggcaggagagatggattcttccccagcgatggagtctctggtggattccattcctttttctagcgtgattgtcttatcatgaatatcgaaaatgtttggacggttttttgacaaacctgtataaatgctatgtgaaacaactggatgcgggcatataaatataatttttttggcttctcgggctttcactgaaaatgtcctaggggtgtagagcatcctgtctacccgacgatcaggtcccgctttgtaaatggcagttcctaaatgcatggtaatgactccatccacatcactttggtttaaaacgtcaaattctattctgaatttcgtgtgaggagtccagggatcttcttcctcttccgtgggtgataaaattcgttttattcgaaaattttttacttgaaaagcgggtagttcttgacggtcaaaatatttcgggaaaatttcagacaggtgccatccgaagttttcagagaaggcatgatcaaaagtttgaaaattaacttgtcggaaacggttgtttttcataaaatcttgtacgaataaatgaaaatccgtggcagaagttcctttaagaatgatttgcgagagtaaatcgtttgcttttagttcgttaatttgatttatgatctcaaaggaaagtgtcttatccgagagggccgcctgataacttttcccatttaaatagtccaaggctttttgctgggagtctggaggtgctacattgggatctctgttttcccacggtcttttcacgatttgatttaagagattattgatcgttgggtatttgtgagagtaaatgtagtttatgtagttgaaaaatagaggattgaagttgtatatgttgtaagttgattcgtaatgccatgttgtccctaactttaggtgggagagtgggccttcttcccaagacgttagaatatgttcattgttaagttcccagtatagacttctttcgaaaggttcgatccaattagatatttcaaagcgtaaccgtttttgggcaaaggctctgattcttccgtttagtatacctatccctctttccggacacaataccatttcgggttgtatcatctcgcttcctcctgttgccgggtgatagtgagaggtgaaggtaaccggggtttctacgaggcgcaagcggttaaatagataggaagattttttttcatattctatggtttctttcacatccctgattttgtcggagagtgaggttaattgttggtcaattgaggtgagaatctcgaagttattttttgacatgtacagctcgtaggtcacgctgtccacggttatctcccgtttctcatatttcccgatacatagcgatatgttcctttgagggtgttcgttttcaaaccgggtacctgatgctatcccgtggcgggagccttgggagatagcagtaagccgggtcgggtgattgatggttaaggtatagcgggtgaaatcgcacggggtgttatagggatgagcggggtttacaggtggggaggtaatcgggtaccagaggcattcgggcgtgagcaaggtgtaatctttttcgaggaaggcgtatcgatggccgaacctgcaggataggtagtggcggttgtcaatgtcaaattctttctgttgtttcgggatatagaggtagcagataccttcatcgatagttccttgatattgaatgtcaagagcgagagaatcaccgggcgaaacaggtcgtgagatcacgatagcctgagcctctctcgtgaaaggtacgggagataggttttcttgtatgcttgtaacctctagggaggggttcaagtaaaggatgatttccgatagggttatgccagtcgggttatatagcgaaacccggctttccacgcgagcttctttctgttggtaggtaaaccggatgtcatgagcgatgatgttgatcttgtttggagagtcgtgtttctcgtacacggattcatagagtgcgtggcgtcgctcgacttgctcgtgatggttgtacgtgataaaacctgccaataatcccacgaagagggcgagaatcccggaacaggcagcccgttgacggccgttgatcttgttggggatacggggcagcccgctaatggcgagcgtgatgaacccgattcccagcaagaggaaagttgttcgatggagcaagaaaccgggtaaatcggctatccccgtgaagtcggaaaacgtgtagggaaggaggatgccgagaggatcgaatagcccgtggtaaagggtggataggaagaggatatccacggagaggtaaactagcataaaaaaggtggtgacggttccgtttttaaagcaacgagcggcaaggaaagaggtgatgcccacaataaaaacaatggtgggaaggattagtgttaccaggtagaacaaatagataaggggccggaaagaggtcggggaggcgaaaagattgattaacccggccagggcgagcgagatacttcccatgatcatgaaggcaatgatgatcccgagtataaagcctgtcgagtaggtatcgtttccttgcgggtgaacgagcagggcttccagcgtgttgtattttttttgcttgtgtacccagaatcccatggtggcgagggggaatactaagagtaggttaaacatgtaagcgttttgtgtggggatgaaggaggataggacaagggtgtactcgacgggaatgttgaacatgtcactttggaatgatacctggtatgcgatgagtagagggatcaagaccataaatgcaacacggaaagttttatttcgccatatttccgtgaaagaataccgggtaattaaccaaagttgatgtaggttcatggtatgtgggttgagtgttaatttaataattgtaatatggagatgtgtcgggatgacacaccccataatttagtaggcttcgtaaatgtttagaatatttcttcataacatccacaagcttggttttccggaacgcaagttttaatggagcaatcgaataaatatccaggaggacagtagtgtgtgatccaagtaactccgactacaacttctgtgtacgttcctcggactgctataacgcctttaggtgttatagcccactcgtggtcaagttcccctatttcaggacttcgagaagtaactgatgagaacggactcccgaataaattcaaaaaaagaaaaaacaacatggttgttaaaccagcttggataaaaaatctctttttcatgattctttgattttagtggaatatttttttaataaaatgcaatcgcatttattactaatacaattcagagtggtttttgggtgaaaaatgaaaatagattctacacgttataccctaattcaacctaaataaagaggtaatgcaacccaaataatctcactcattcagagctcattcgaagcttaatcgttgctcagacattgggggatggcgaagctctgagggagcttcgagtgctcttcgaataagtgggattatttccctaggatttcctacagtttactttaggttcttgttaggatttcattctttaccatcatttgttatcccgatagtttcgaatttgtttaaactttaccgagaatggataaaaatgctagatattggtaattcagaatgtgatgatcgtaaaaagaattgtttaaatttgttggaaatttggcttttagagggtgattttgtaataaatgctcttgatgtgttataaaataatcaataaaatttgaattaggttttcaccctgatcttgttgtgaattgtattaggataaaacgatcgtttaatgcgtttgtaaataggagccttctgggctctttttttttaattctaaaaaatcgtttattctaattatcaattcgttagtatttgtctttcattttcatctttcaatgtcattaaacgatccttttttgatcgtatcaaaaatttggaagatggaaaatttagaaaaaggcatagaggtttctcggttgatagtgaaatatttacagggatgtatttctccggaagagaaagttatgttagacaagtggttggaggaaagttctgaaaatagagagatatatcatcgtgtgcaggggcgggtgaatcgggaggaacggcagaggatcattcgaaaactaaataaacgtgcggcttgggaacgggtagataggaacacgaaaaagtataggcatcctattctgaggcggtgtatgaagtatgcggctactattgtgttgcctttatttatggttggagttggtttttatctgatcagggataaagaagaaattcatccggttgcagagatggtaaaaattagtccgggggtaacgaaagcggaattggtattggcagatgggcataaagtagttttgggtacggaaacgatagactcgttagtaagcgaagagggtgtgaatattgtgaaggatgggaatggagtatcttatttggggaataaagaagaaggtgatttggcttataatattatgcgtgtgcctcgtggaggtgaatttaaggtgagattacaagatgggacattggtttatatgaattcggagaccgagttaaagtatccggtacgttttgtcggaaaagaaagacgagtgtatttgtcaggcgaggcttatttcgaagtacagcgagatacgacaaagccttttatcgtggttatgaatgggaatgaagttcgggtgttggggaccgaatttaatgttcgttcttatgaggatgaaaaatgtcaatttacgacgctggtagcaggaaaggtgttactgacaacccacgatcataggtgcatagaattattaccgaatgagcaggggattgttgatccgcaaggagatataagaaaagaacaagtggatgttgctctctacacggcttggaaagatggcaatttcgtgtttcgaaagcaaagcttggaacatataatggagattgtcgaaaggtggtatgatttgaaagtaacctttgaagacgagtggtgtaaacaggttagtttttccggtaacgtggagcgatatgatgattttagtaagctggcagaaatgctggaggctaccgggagcgtgaagtttagaataaagaataatgaaatctatgtaaccaaaagataaaaagaaaaaggtggaatacttgcactattccacctttagtaccagtgtgactggcattgttttacttaaaatacaaatgtatgaaaaaaaagcgaattgtacatcttctcccgaaaagaaggttattaaaaacatggttgattatgaggtttatcgtcctgtttatgtgcgtgtccgcgatgcagctgacggctgcggtgtacagccaagaagtaaaagtgacgttgtctgtgaaagacgcttcttttgagagtgtgatccgtctgttagaagcaaacacggaatacacgtttctttatgaggatcggcatattgccgaaatcggaggtttaaatctgaatttccgggatacggatattaaagttgtgttggataaatgcttgcaaggaacaaatttgagttatcggttgatgaataatcacacgatcgtgatccaacggggtgtggcggttgacacgacaaaacagaaagctcctcaaaagatgtctgtttccggagtagttaaggacgtgaagggagaggttttgcccggagtaacgattcggataaaaaatacacaattgggattcgtgacggatattgatggaaaatttaagtttgattttccaaaacaggatacggtgattttaattttctcctttgtgggttacaagactcaagaatttcaggtgcaaaatgacaaaccgatcacgattgtcctgaaagaagatgtgacggaaatggatgaggtggttgttaccggtattttcacgaaagcaaaagagagttacacgggggcggtaaccacgattacggcgaaagatcttcaacgggttggaaaccggaatctggtgtcttctatccggaatattgatccgagttttaatatcgcagacaatattgatattggttcggacccgaataaattacccgatattacggtacgtggttcttccagtttggatgttggtgtaagagatttacaggaagattccagaagtacgcaatctacaaatcaacccttgtttatcatggacggttttgagattactttggaacgaatgatggacttggatgagaatcaagtggagagtatcactcttttgaaagatgccagtgctacagcgatgtatggaacccgcggagcgaatggtgttgtagttattgtgacgaaaaagccggaagcgggacgtattcgggtgacttacaaaggtagtttaaatattgaggcgccagatctgacatcttacgacttgctgaatgccagagagaaattgcagtacgagtgggctgctggattgtatgagaatacaaatgccaatcaaacacaagagctatgggatttgtataatcaacgtaagatggatgccgagcggggagtgaatacgtattggttgaaatatcccgtgagaacaggtgtgggacataaacatagtttacgttttgaaggaggagatgaagtttatcgttattcggtcggtttgtcgtataatgatattgccggtgccatgaaagggtcaaaccggagaacatttaacgggaatgtttttctttcatacaaatataaaaacttgacattccaaaatgatttacaagtttcttctaaccgttcgtataattctccttatggaacatttaatgattttgcgaaaattaattcttattggactccttatgatgaagaagggaatttgataaaagtgttagagaattattattataatagccttaataggagaaattttgtatataatccactttataatgcgaagttacccagtaaggatgagagtcggtacacgcaaatccaaaataattttgcgatagaatggcatatcttaccggagttgtttgtccgcgggcgtttggggattacttcaaagacggatcgtgcagatgtgtataaatcggctaaacatactgattttgacaattactcggaagatgattatggacggaaaggaacttattcttatggaacaggtgaagctttcaattatgaggcagatttcacgttgaattattccaagaattttatggagaaacaccaattgtacgtgggattaggatataatttcgctcaagaaaagaacgagtttttcaccattttggcagaagggatttctaatgttaatatggattttctcggtatggccagcatgtatgaaaaagatggtcacccacaaagttcagaaggtttctctcgacggatgggaggaattgctaacgtgaattatacttatgatcgtcgttattttatagatgcttcatgcaagattgaaggatcatctaaatttggtagtgataatcgttatgctccattttggtctatcggaattggttggaacttgcatcatgaggcatttatgatggataataatttgttgaatgttgctcgtttgaaactttcttacggaacatccggttctcaggcctttaattcctatcaagcaatgacaacctttaaagattatggaggttcgagttatcaaggttggtatggagtctatttgatggccatgggaaatagcgatttaggatggcagaaaaccaaacaactgaacgtgggtgctgaattggaattctttaatgggcggattcgtgtcaatgcagattattataacaaagtaacagatgatttgttgtcggatattacgttaccgtcatccagtggttttggaagttataaggctaacgtgggacaggttgccaatactggtgtcgaattaggagtgaatgtttacgtacttcgggatacaaaacgggatttgtcctggttgatagggggaactttggctcataataagaatgaaattaaaaagatttcaaattcgttggaatttttgaatgaacagatgagttcagaagatggggggaatccgagtttcatgtacgaggaaggacaatctatgaatacgattttcgccgtaaaatctaagggaatagatcctagtaacggtaaagaaatatatataaagaaagatgggacagagacatatacttgggatgcgaaagataaagtaccttgtggtattaatgagccgaaaatatggggtaatttaaatacgatgttccggtataaaggaataacgttgaatgccatatttggttatcgttacggtggacaaatgtacaattacacgttagttagtaaagtagagaatatcaagccttatgataatgcagataaacgtgtattatatgatcgttggaaaaatccgggagataatgctttctttaagggggtacgggattttacggcaacaaatgctacaagtcgtttcgtgatggacgagaatacgttggagtgtcgttccatttctttaggatatgactgggaggctaagtggctggatcaagtaggcatttcttatttaaccataacgggttacatggaagatgtgtttagaatttcatccataaaacaggagagaggtttatcttatcctttctctcgcaagttttcagtgtctttatctgttagattttaaaagagtatgattatgagaaatatgattaaaaagaaatatgcctgtatcctgttattgttattggcaataggatctggatgtagtgattggttggatgtacggcctcggaacgagatgaaagaggatgatatgtatactaatgaagaagggtttaagagtgctttgacgggagcgtatatccaattggctgccaaagaactttatggccgggatgcgtccatgtatttacctgagatgttagcacaacattggacaatttcgacggataaaacctccttgatttataatatttgtgcatttgactatacacatgaaaagtcggaagaggctattgaaaaactttggaaaaagtactatcaatgtgtcgtgcatttgaataatgtgttgggaaatttggaaacaaccggagtaacttttacgaatggaaatgaggctttgatcaaaggggaagcactaggattgcggggattccttcatttagaattgttacgtctatttgggcctattcctggggatggggtatctagtgttcctgcaattccttatcaggaagagatgacgaaagatcctggtaaattgcgtactatcacttacaaagaagtatgtgagaagatcattcgggatttggatgctgcagaaaaacttttggagaaagatccgattttagtggggtcaaatacgcagttgaatcaacccgcatacgattgggaaggtaagcctcaagacgagtggcaattttatcggcaagttcgttttaattactatgcagtgaagggggctaaagctcgttattatcattggattggtgataaagaaaatgcagtgaaatttgccaaagaggtgatcgatgctaaaaatgaagatggtacatccaaatttactttggcgacagagtcaacatatagtttatccactgtcggtacaaacttggtaatgaaatgtgaacatcttttcggggtacataatccgcaacatcaaacgatcttacaacctttatttaaggatgacgatgctagtttgaggcagacggtagcttatattaatacagcgtatgaaagtacgatacacccggatgatataagaaataaagcaaatcgttattgggaagagaggacttatcagaattccaataaagtgaatcattttagaaaatacacgggaagtgatacttatgagtctctgaatattgtgcctgtacttcgtttggctgagatgtatttgattttggtggaagattctcccttgtctgaggctagtggatattttaaaacatatcgcatcgctcggaatctggatatttctattgataattcacttgtaacggaacaagatgttttgaaccggatggagaaagagtatcggaaagaattcttcggagaaggacagatgtgggctttctataagaaacataattttaccagatttacttggcccaagaataaaactattccggaaggagcttatctgcttccgatacctaagagccaaagtgtgtttgattaagtaaaaagagagattatgaaaatagtaattgcgaatatattgatatttttattggttgtgggtacaatcagttgtaaagaaaattcagcattagagtatgaaaatgatccggccctgtattttgaaaatacaacttatggtcagcgagatagcattgcccatacttttttcatccaaccggatgatcagatgcgggataccgtgtttattgagatactgacgatggggtacccgacagattcggatcgtccttttatcttggaacaaacgaatgctggacaaccgggatcggcaattgcaggaaagcattttgtggcttttgatgatccggaaatgttagagcatttaaagattcctaaagggagtgtacgtaaaagttttcctttaatcgttttgcgtgatccttctttggaattggaagaggttcggattgagttgaagattggggagaatgagtattttagatcaggaattgacgactggacgaattttgttgtaaagaccacgtctatggcggtaaaacctaccaattgggatacctattggaaatattatttcggaccaacttggggttccgtgaaaatgaaatttattattgataataccggattctcggactttgacggtgatcgtttgaatacagattatactaattatctgagttctaaggtgaaacaaaaattattggagtataatacgaatcatccggatgatccattaagtgaggcagacggtacattggtaacttttgaatgattaaaatgaaattgattatgaaactgaagaacatattaataggaataggtttaataacatctcttcagggagtacaatcctgtattgatgaccgggggaattatagttatatttctaatgaagaattacttcctgtaactatttccgggtttgaagatactacggtaataatccgttcaactttgaatattactcccgtattagagaatatggatgatgagtcccgttatatacatttgtggtatgcagctccttcggttacggcaggatttactccgcaacgggatacactttcgttagaaaaagacttgtcatttgaagtgacgtatgaatccggaacctataatttggtttatgagctacgggatcccaagttggatatctatgttcgaaaacaagtgttgatgaccgttcaatcggatgtaagtaccgggtggtacgtgatgaaggaggagaacggagaaacggatattgattatatctctatggatgggaagaagattgaaaatttgatcaccgcttctggacaagaacggttaaaagggaaaccggtaaaaatggcatatcagtcttcccgttatactcccgtgattcagaatccggatggaacaacgactcggttgaataataaaagagcttttcatgtttttagcgatcaggatataaagatctttaatgcagacaacatggctctgttttataattatgaagattatttttatgaagtcccagaagtgtgtaagccggaaaattgtggaatgtatagcactgatttttatgcgattaatgcaggaaaggtttattcaatttatggtatgtcaccgaatagcggaatgttgggatatgcgaaaccgggattgtatgaagtgcaccctgatatggtgatgggtacttatggtgtgatgctttttgatactaaaacaagtacgttctataatacatcgtccagtggtagttccatgaatttgttccctgaagattccgagggtggaatttctccaacgaatatggatgtagatatgattcggatgttagttcggaaagagggaaatccctctactgcatttgctgtaatgaagaataaaaataaagatgagcattacgtgtttgatatgtcttattccatggctagttatccgattgttgatattgatactgttcctgcacattgtgaaatgccagagacaaaggttatgggaacttctttatatgctagttgtatttattattctaaaaaggaagcggatggtgatgtgttgaaggtgtataagaatgtcaaaatagataatcgtgaaagtgagttgaaacgttttccgggagaagaaatagtttacattgtaaatgcgactagtagatatggagctccagcggatgaggtattcaatcatttggttgtattgacaaatagtgcgacgggttggaaattgtatcgttttaatgtaatcgggcaaacaccggagatcgaaacggagcctgcgtttgtttattccggtaaaggaacagccggatatgttatgcttcgtaactaacatcgttttgtaaagaattttcagttggcttgaaaataaggtggatgatggcatttgccattgtccgcctaaatcactagtatattttaaataattatcgggagtatgaaaaaatttagtttgttattgtttttaacctgtatgggcgtggtgctatatgcacaaaagtacacggaaataaagggtttcgtgaaaaatgatcgtttgaaggaagttcatctttatcgtgtagaagatgggacgacacattcttatgcttcgaccatggtggcagaagatggttcttatggatttttgttttgcccggaaaagccggggttttacacggtaggtaatgataaacagatggattttgtggtttacgtgaagggtggcgataaaatcaatattaatattttggaaaacaaggccgagttggcgggaaagaatactaaagagaacgtggccttgtataaatgggaagattttgcggctgatgttcgtttgaaatcagtttattttatgctgacaatcagtaattataaggactttttccctgaattttccgtatttgtttctaaacttgattcgattaaaaagaagataaagagcggtaatgcggaatttgatgctttattgaaaaagaagattgattatgacgtggactattatgcagcagtctttttgcagactcccagaacagctcatccggaacgtcaggattggccggaattttacaacacgatcatatctgatgataagttcacgacggatgacgtgttgttgtttcctcaaggagcacgaatgatcggtatctatgcaagttttggatatatgacgtctggtaaaaagtatgatccggtagattatcaaagcacttgtttagggtatttgaagacagatcgtttgaaaggggagtatttgttacggaatgtatttgccgggttgaagtcttatgaccaatatctaagtttgatggatcgttatggaaaatacttggtaacgccttctctaaaggctcgggcagaggctatcgggacagcgttgtatgacacggctcccggttcgattgctgccgattttacttaccctgatgtaaacgggaaagaggtgtcgttatccgatttcaaggggaaagtcgtgttggttgacgtgtgggctacttggtgtggtccttgtcggggagaaatccctcatttgaagaagttggaacaggagatgcacgggacggacgtggtattcttgggcgtttccgtggatgaagcgaaagataaacagaaatggttggatttcattaaaaaggaagagctgggaggagttcaggtacatgcatccggatggagtaagattgcccaggattacaagataaagggaattccccggtttatggtatttgataaacaagggcgagtcgtgtcggtcgatgctcctcgaccttcgtcaccggagctgaaagaaatgttagaaaaagagttgaaaaaataaatacaattcgggggatttgtgaagggagaacaaatcccccgaattgtatattcattaaaatggaatagattatgaagtatcgtttattatttatcgtgtgtagcctattatgtttttctgaattatgggcaggaccgggaaaagtggttgttaaaggtgcggatcaaaatgtttgtgtttataacagtatccggggaagagggcgagcttgttttgccccggagaaaggaatgaaagaaacggtgattttactaccggaaaaggagtgtggtgatttgttttatttgatttcgggggatcggacttcttggataagggtgttgccggatgaaatggtcacggtggatgtccggaaaaaagactggcagttctctggagattcaaaagcgataaatcgttatttgtatcagtggacacaaaagatgtttttcgggaagccgaacgctttgatgtatcgggttgaaatgatgttctatcaattgccggatcgggataagagaattccggatccgaagatgttttacacgaaggagtatatcgaatggattgataatataggattggaatcattgggggatttagcaaaggcgaatttgaaagatgatctattcgtggaagagcaagaaagacgaatttattatagttggttggaaatgcaattgcaaaattaccagttggcaagtgataagttagaaattcctacagaggcatttgtttttcttcaagaaatgaagttcaatcatgttgcatatttgaaatatccgggaattgatgatgttttgaggatttactatgacatggcggatgcctgtgggttaattacgtatgataactacaattttttacaacgaagagcggaacggattatgaatgccgaggttcgtgaatactatatcctgcaggaattagataatatcattcgtaatcaatggttgtatcaattggataaagtcatctcatcggtggaaaatatggtgataactcaagcgggaaaagagcaattgacaggatacaaaaagcagtatcaggatttgatggcatcagacgtaaatcaggaagggaagaaagcggtaaatatttcgtttaaagatgtgaatgatagagagtggggattgtatatgtttaaggggaaatatgttctcattgatgtgtgggctacttggtgtggaccttgtaaatatcagattccacacttgatgcgtttggaagaagagtttgaaggaagaggaatcgtgtttgtttctttgtccgcagataaacctgccgatactcagaaatggaaagatatggttaaagagttcgggatgaagggaatttgtgggattgccccggatgcattcaatcacgcattcttcgagaagtataaagtgaaaagtattcctcgtttcattttgatcgatcccgatggaaatatcgtgatgactaaagctcggcgtccgtcggatccagtattaaaaatgcagttggaagagttactggaacagtatgatcagaagaaaacaacaatctctggtaagatggaaggagttgcggatggaacgcaagtttctgtcagtcataaggtcggaatgatgactcacacattagggcaggcagaagtaagagatgggcgctttgaattgagctttcttttggagaaacccgaatttataaatttctcttgttataaagtttttttggggaatgtttgggccaagccgggggatcggatggagcttgagggaattaaacctgtttataccggaggagaatatgagttgaataatttgttgacagaacttaatgcaaaatatgcagatcgttggccggggtatggagatgatatttttgatcaaaaacgaggtaagttatcttatgatatttatgcgagtatcaagaacgagattgatgccagtgtattacgactggaaatgaaacgtatgttgacaggttatttccaaggagtgttattggataagatgtatggccgggtggctatgtcaaaggtgatcggtaaaggttttcctcgtccgattgtgaaaaacgggtattcgaatgccgtgttaaaactagaattattgccggagttagtgaattatccgtcttggacagatggtgtgcaggagttattgtacgcacgtttggctgcgggcatgataaagattcaaggacgaggtagttatattactgatatggctgccgggcttaagagtgagaagttgcgggaaacttatattatggatcaattacggatggagattttacgaggtcatttatttggaattgaagatcggatcaagaatgcacgttcgatggtaaaaaatcctgataatgtagccttgttgtctcggatgccggaacaagcacaaaagtctttgcaagagtttaagactgttttacctggtacggatttgagcggattttcttttaaaaacgagaatgggaaacgggttgctttatctgattttaaagggaaatatgtgtttatagacatttggtctacgggatgtaatccttgtgtcggagaggttccttatatcaaagatatggaacaccgttttgccgggaaaccgatcacgtgggtttctatttcaatggatttaaataaaaaagagtggttggatttcttgaaggaaaagggaatgaatggaatacagttgatatgtaacaaagggtataaagatccattcccgaaacaaatagcattgaggggaataccacgattcctattgttggataaggaaggaaaagtaattgattttgaatcgttgagaccttctaatccggtgttgggagagttgttgcagttgatgttgaataaaaaatgaagggctgatgtgtggctctttagtatatgttttatttaaatttttgagttatgaaaaatgaaatttttaaaaaaatgcgtacaatgattcttttattaggtgtaactttattttttagcagctttgtttcaagtgatgatgattatattataattaattgtcctggtaatttagcttatgaccctgtagtggatgcctgtgttccagaggctgaaaacgatggaaaaggtttagtatgtgttataaagaaaattaagacgggggaaattaaatttgcttgtgaccctaaaggagaaaaggataattgtagaacagattcttggggacatgaattatcatgtcctaatgcaacaattgttatccctaattaaagttttaatttgtagggagtattaatttgctccctatataaaatgcgttgtttatgagacgaatattatattttttattattagtttttttagtttcatgtaagaatagtgagaatatcgaattatcttatttcgaattggaagattttccgagaacaaaatattgtacatcgaaatctattagtattcaagttgctaattctttgtcttatcatgttttacatgattctttagtcttggtgactacaagggggaatggtggttattttgttgaaatgtataacctaaatagtaaacaaaagattatggattttgcacaaaaagggctgaatgcgaatcagttttctcatgctagagtcgttttagatgaaacgaatgtttcttcgattttttatctttataatgtaataactaattccattgttgaaatcaatatagattctttattaaaatatgaagatagttattcttttaaaaagatatacttctctggttatacgaatgttccgagtttttgtaaatatgatgaaacaagatatttagcacaaaataaatactattctattgttaaagatttggataatgacgtagaccgttttctttttgtaaagaaaaatgagtttgatattacaaatagtacttattcaaagtcttgggaatacaaatattacttgtcaaatataaataaggtgataatgtttagtgattcgactaagaatcgtttatggtgcgtattagatggagaagatcggtttgatatttataagagagatgatttaagtttattgaaatcatatagtggcccttatcattatgatgttgaatatgttgtgggcgaagcagggaggggtagtttaccattagtggtgagaaatggagtgtattcaggatatagtgcggctgttacaacagacagttgtgtttatttgttattgggaaatcaaaattataaagggaaaagagaactgccagatagagttttagataaaagtgaaatatataaattgagttgggagggagagttgttatgtcggtatattttagatagttatgtgtatgctttttcaatggatagtgaaggaaagtatttttattgtactgtgaaagaaaatcgtcaacttgatcctaaatttgtatattatgaactttgaaatgattaaaaagtttttgtttttttgtagtgtaatacttttttgtggctgtggtaataaatcaaatagagaattacaacatatagaacttggagagttccagaatcaaataaaaaatgattctgtggcttataggatcgtatgtataattgatggagggtgttctttgtgcataggagattttgtggaattaaatatgaattttcttaaaaagaaggatgagtacaaatgtccattgtattatctcgtcatgacaggtgatcccgtgatatttgaaagtaatctaatgaaatttaatcaagttgtaagcggagaactttttgttgatacaacttattccttgatgcaagctaatcaattatttaaagaatctagaatagaagtatttttaatagataaagacaaccaagttttagtttcagggaatccctttattgataaaaaagtacgttgccaatatgataacttattgaaataatattatttgagagaatgaaagaagctatatatatattattcatattattatgttctggatgtgtacgtcatcattccaatattgcatttgaaaataaaagttttgaggatattcttggtgatacctcattgattgataaagatcatgtactttttttaattcggatgaaggattgtgtttcgtgtgatttattacaagagggtgcttttcgtgatcgaaaattattgcaaagattgtctgataaatatatgtgtgtagagcaatgtattgatttagaagaagataaatttgtcgcacagttgctatatgagtatagttttccaatgattgttgttttttctaaaagaggtatattagaggcattggtgatagggaatagaactgcaaaggaattaacattaatgttggataaaattgaggctcatcgtggttttgttacaaacactcgtaatagattcgttttaaatgatacatgttatgttgatttaataaaaaaaacggtgaatgcttttcttgctttaaaaagtgaggacttgggaaaagcaaaagatgaaattgaagcatcaataaagatccaaccttatttttacaatttgtatataggatcccaaatttataaagaattaggggatacagttcgttttatagaatgtacagatcaagctttaaagatgaatgatcgttttgataatttattgtataattcaataaaagagaaaattggtaacccagctgaagaactagatcttgttacttcaatttcttttgaaaagactatacatgatttcggtcgtatatcgagtgaagatagtgtggaatgttccttcctgtttaagaacaataattcttttccagtaataattgaaagcataaagcaatcctgtgattgtatggaaatcatttgggatacaaaaccagtattacctcaaaaaattggaactgtaaaagtgatatacaaaccatcctctaaaggggtatttatgaaagcattatttttgacaatatctaaaagtaataaaatcattcctttacatataaaaggagtggttatataagaagactatagatatactaataacaaacttatgaaaaagagttctttaaaaggtatgatgagtagagtgataatttactcgattactgtattattgtcttccttattttgttggcgggaggctgatgctcaagtacgggcaaaaacagtgtgtttaacagtgacagatggcttttctgcaccgttatatggagtatatgtcgtggatatccgtaaccgattgttggtgacaacaacggatgaagagggacaatgtaagattttactgaaaggattttcggtaaaagatacattggaattttcttgtttgggcttttatgcaaagcgcatggcggtggattctctgcatgacggacaagttattgttcttcaagaaagaagtattttattagaggaggtggcagcagaggggattcatccttgggatttactgaaaggaatttcaaaggaaattaagaaaaagaaagaaaaagtaaaaggatatcgttattttgggaatgggcagtatgaaaaaataaccgagtgtaacgaaagagtagttgagtatcggcgggaatatggttgttttgccacaaccggaaatacgaaaaaaagaggaacctttgatcgtggaggtgaatatggttttgtccccaagtatgcggctcgtagctatcctctcacagtggatgggaccgatacgttagtccttttataccaaacggaagaaaaacttttttttgaatccgggaaacgaagggtgtttgagtttatacgagtggtggaactatatgggcctctattcgggggaatgaaggactatgattttaaacagatagaaacggaaagtggtgattatacatttcaatttaagacaaagaagtcccgttatccaaacaaaacgtttttatcttgtcaagggacgcttacaattgatcgaagaacacgaaagttgaaagttatcgattttgattatgtggagtacgctctgtgtaatcagccccgttgggctaggaaaattatgaaagagatatttttctcttcacgggctgagttgaagtttaaatattgggcagaaggggagtattgtgtagagagctgtacgatggaaacaacttggaaaagtagtaaaacagaaaaaggacgttacggaacattaccctctagaattgagccgctgaagaataaattgatagaaaaagaggcatttgcctgtaattcttattatgaggttccggcagaaggacggaattcagcatttatttttgctatgggaataggatcttataatccacaaggagagtacaatgcccacatattttctcgcttaccggaattgttggattctaaacaggcatttcaagatttaaatcaatatatggatattgagaagcaatttaaacgattgagcaatcgtgcctattatccggtggattatttgcttgcctctccttggcgttggagtagtatattgactagaggagaaggtgttgtagcaaattttaataaaattagggaaatgatgttgctttgtttttttaccggatggcggaatccgttaggggatgaggaggaggtaaaatgaaatagaatagatatgaagataaataattattactggattatactcgttggattgtttctttgtattgtaaattgtgtacaagcaggagggaatgaaaccggacttttgcctgggatgagtaagacatcttttgaaaagatattgaaaaggacgtcagagaatattaagaaaaaacgggcgtctgcagacatattacaattttatggaaatggacaatatgaaaaaattacagaatgccggggaaaagctgttgagtatcagagggaatatgggtgttttgtgaaagttggtaattgtcgtaaggatggcaatatttatacaggaatgtattctttcgttcctcgttattctgcccgtagtatcccttttgcagaaaatggcatcgattctttgtgtccattattcgagaaatatgatgaatattattacgtgtcagggaatcgtaaaattttcggatttatgcgtgctttagaatggtgggggccattattcggtgatttggttaattatgagttccagcaattgagtgttaatggtgaaactttgacatttcaatttgaaacaagagattcatgttacccacataaaataccgttctattgtgcagggattttggtacttgatcgtaaaacatgtgaattaaaaaagattgacattaatcaagtagagtattattgttgtggccagcggggatggaaagagatgtatttgaaagaggttccgttggattcacgtgctgtagtggaatttagctatgatgataaaggggaatgttttattaaaagttgtgtattggaatctgtttggaaagatgtgccgttggagaaatggccattcactaatgctccgtcaagaaaagaaccagggaaaaatagattaatagagaaagaagcctttttctgtgaaacttgtcagcgtgtttcaaagaatatacagtttgaggatcttcctccaacgctcatgtatagtgtatgtaatctgcaagtagaatatgtatcggatattttcgggcctttgcctgagttgttggatgttaaacaggctttcattgatttaagtaatgatgtaaatattcatgaacaattcaggcagatgagtaatcgttcatattatccagaggatttcttttttgttttgccttggtgtatggaggcggatgaggctttgaaagactctttctgggaaaatagtcttaaaattaataaaatgatcttgcttcttttctttaaataaatggtttaaattaaaatatttaatcatgagtattaagagaataataatggttgctcgttacgaggccagactactacgacggagttgggtgtttctgatttttgcagtcttgggagtggtgggaatttcgagtttccagtttttaattggtagtgttgacagtgcaatggaatatggattgacttccggacggaatttgtggtatttgagagcgttgccgtcctgcatcccttatatgaatgcctatctttttaatagtttacaagcacttttgatcgtgtttttcgtggctgagatggagaaacgagcacgagtgacaaccatggagccgttatggacccggccttgcacaaatggggagttacagtgggggcgagttctaggccttgctggaatggtggttgtcttaaatattatttccatgctggtgactttgatggttcacttgtttactccaaaggggagtgttgaggtaagcatgtatgtattctatttttttaccttgacattaccgggtttagttttctttttgggaatatccatgtttgtggtacattggattaaatcgcagggattggcgattttgttattgttgatgcttattgccggtatggttgggagtacgggaggattacatgggttgctggatccattggcgaggacgattcccgctatattttctgttgaagtcgggagtgcaaatttagggttgtttctattacaacgattggtgttcttgggtttgggtggggcgttattgtgcttttctattttttacgtggaacgtttgacaggagaatcggaaaggaaaaatattttgcgattggcaggaaccgggttactggtaattgctgtttttgccggggtgagttatgaagggtattttgtcaaaggtggaaaacagcgggaggcgtttaggcaggcgtatgtgcgaagtgaggataaggtaaaggtgcatatactggaacatgatattcattttaaagagaaggtaaaaggaatggaggcttccagtcgaatggaaatttgtaataaaacgggcaaggaaataccttcgattattttgtatctgaatccatcattgacgatttcacgattgacttgtgaagggcagaaaacccgatattctcgtgacgaacaagtggtcgagatcaatcgggtaatacagccgggagatacgttagtgattgagatggaatatgaagggggtataaatgagggagtatgttacctggatttgccagataaggagttttatgacacggaagcgaatagagttggtattttccgtttcgggaatcggcaggctttcgtgggtgaagaggtgacgttgttgcaaccggagtgtttgtggtatcctcaaagtgtggcaccgatccatttgtcttcgttgtttgatcgacaagtggattttacacgttattctttgactgtagaaaatgctgccgggcgtatggcggtttcacaaggggaaccggagcgtttagaggggaagactttctttcggcatgatcatgctttacaaggaatcagtttaagtatcgcggagtttgataatcgttcgatagaggtagatgggacacaatatgatattttcttttataaaagtagtgattttttacttcaggcatttgaggcccctgaaaaggcatttaaattcatgataagggatattaaatacatgacggagtcaactgtttgccagatggatgaagattataagcaaaaggcaaatgcggtttggaggaaacgaggagagatcgagggggaagacccggaggcatacagcccgtcgggacggtatccgtataaatggtttatcgttatggagactccggtttcttattcgagacgttaccggggatgggctcagaatgaagaatacctgcaagcgggaatcgtgtttatgcaggaacggatggccagtgctttttatttcgagagcacaccaccacctgttgaggagtgggattttgtggctatgaataattttaagggggatattgcgatgatttttaaatcagggaaatataaaatagctccgatgtttgttgggaatacttttttcatgagttctgaggagttccccgcgatacaggaggtaatcaagatgttcgggatgcccgtggataaattaccggctgcgatgcaggccccggagagagttcgggatgtcgctgcctatttgaaagatcatagtttgatgcaggcgtttacggacgagggggtgtctcctgaattgctaggagaaattattgaatggaagacgatagagttgaaagaatatttgaaacatgaattgtctgaggagaaattatatggtttttataatcgttttttacaggaacatttgtttgaaacagttgatatagatctattttgtgaggaattcatgaaggagttcgggatggacttgaaggagcggttaaggacgtggtacaccagggatcatttgcctgtgttgctactggaagatgttgtgttgactgaattgccggaagaagaaggtggggagggaaggcaaagtaaatctgcatatggtcgttttaaagtgtataatcccggtgatgtggagggggtgcttgtggtttctgcggcaagaataaaaggggaaaaagtccgtagttttttaattcaaggacacgagtgtaaggagatccgggtgaaaatggattatcgaggccttatgatcacttccccgctggtgcagaacattccttcgggaagatgggtattaacagatgaaatacgtccttttgaaggagataccttgacgggagtctttcctgcagattcaacggtctttttacttcggcccggagaaattatcgtgaataatcgggatgaaggttttaggctggtcgagcctcaaggggagaagttgttcacgttattacggggaggaccgaaatcctgggataaagcaagacgaaattatgagcgttgggtggaaatggtcgataatcgcttttatggaaccgtggttcatgatgcttattgtaagagtgtcggggaagggaaatataaagctgaatggacaactcagattccagaagcaggggaatacgaggtatatttttataatggagatttctttaaaatgggaatgcttttccaggcgagaaagaaaggtacatgtatatattataccgtgtatgattcattaggggggcatgaaatccgagttgaaccggcagaggaatcgatgggatgggtctctttagggaagtattatttggagaaaggagaggcaaaggtggtattggatgaccggggaggtggttcggaagaggttgacgagaagtcggagggaggtatgcgaatgatgcagaataagcagatgattgtggcagatgccgtgaaatgggtgagaagagggcgttaaatatttattttgtattgattttgtgatatcgtttaaatatttatcaaaaaatattaaaaaaaataaactaaaaagaggggtaaacatattattatttttgtaattttggtgctgatgtatgaattgaagttatgatgaggaggatcacggcactatttttcttcttgggcgtgtatgttttagggtttgctgaaaatacacgggggagggagtatatactggtgcttagctcgattaatttcaatgaggcttgggcgaataatttataccaaaatattctggatgaattctcgtcgccggggtttcatgttgaggcagaagagttgtctattccaatgatgacgaggatcgaagaggtggaagaaaagagggaatatttgttgtctcgatatttaaagccacctaaagtggttgtttttattggggatccggcgtggctcgtgtgtcagccgttatttgacaaggaatggaaggatatacctactgtaatctgttattcacgggattctatgccgagaaatttagaaaattttgtcaataaggattttctgggagaagggaaattcgtgttaacagaagtggctactgcgggatataacttgaccgtgataaaacagccattctatgtcaaaaatacaatagatttgatccggaggttgcaaccggaagtcaagaaaatagctcttatttcagatgatcgttatattagtgccatggttcgggaggaagtgtgtggcgtgttagagaaggattttcccgaattgaagttagatttgttgacgtcaattgacatatctacggagaagttgttggatactttgatgggatatagtagggaagtaggaattatttacaactcttggttcgtggggaaaaagcaatccgagagccactatctgtctgataatcttcaaaaaattatatatggttttgtcgatgctcccgtgttcacgttaacggagatggatatggagaccggagcttttgctggtggatattttatttctgcatcaactttcggaaaggttgcggttcaaacgatacgacaaattttagacggagtgccagcccggaatgtagaaggaaggatcgggggagagccgaaagtttatttgaattatcatcatttacaacatcatggtgtagatcctaacagcatcacgggagatgtagtgttttatcaggtcccgcctaatttttatcaactctacaaggagtatattattatcggcttggcgtttattattttgctgggtgcgattggtttaatgcgttttcatgttatgtgccagagacggcagcaacgtcaacgggaatttcagttactttcacaatatagaaaactggttgataatatgcctgtgatttatattcgtaagcaattgatctttgatgaagaggggaatgttgttgatttcatatttcgtgatgttaataatcttttcgaggaagttttccattgtacccgggatcgggttgtggggaaacgcttgagtgaggctgatgtggataaccaactcttggactatatgatggataaagaatccgggcgtatcacctcttttgtttttccggaagaaaataataaaattcgttattacgataaattatctttcccgagttccgagaagaattttatggatgtgttctttatcgatcggacagaagagtatctggtttcgttgaaaatgaaggaacatcaaacttcgttggaggcgttgaatcgaaggtatgaactggtactgggtgcgacacgactaatcccatggacatgggatctgttgagcaagacgattaattacgacattacatacgtgactcacaagctttgcaagacgaagaattctaggatgatgacggaaagggatggggatatgcttgttcatccggatgatcgggccgggatgcgtgaggcgtattatgatttatattatgaccgggctactattgttcgaaaagagcaccgatctatgttttgggaaggatcgaacgagtatgtctggtttgagagtttcgtgactgtgggtgatagagatggagaagggcatcccacgttgctggtcggaggctctttattgattgatgaacgcaagaagatggaggaggaattgttgaaagcgaaagaggcggctgaaatttcgaatcatttgaagtcggctttccttgctaatatgagtcacgagattcggaccccgttgaacgcgattgtcggtttttctaacgtgttggcttacacagaggatgagaacgagcgacaggagtatatcaagattatagagaataataacacgttgttgttgcaattgattggtgatattttggatttgtcaaaaatcgaggctggtgtttttgagttcgtttattccaaggtaaacctaaatgtattgttgatggaggttattcgggcggctcgcttgcgattaaaagatgattcggttgttgtggagttcgtggagtgtttacctgaatgtgtgatttgttccgatgtaaaccgtttgatgcaagtaatgaataatctgatcacgaatgccataaaatttacagccaaggggagcattcgtgtcggatacaggttgcgggaggatgagtcgttgtatttttatgtctcggacacgggatgtggtattcctgcggacaagttaaaagaggtgttcgggcgatttgtgaaattgaactctttccaacagggtacaggattgggactttccatctgtgagagtatcgtgacccggttagggggacagatcggggtgatgtcagaagtggggcaaggatcaaccttctggtttaccttgtctaaatcttcgtggcaacaagcggattaattcatagtttaaatttgaaaaggttgttgaatgattcgctcatggaggggtgcgtgaagatgaaatccttttacgtctcctatggtatggatgtggggtgtcgttgtcttcaaatgttcgtccacgatgatggctcctctttcgttgacttcgacgttggcagcttttagattctattcaaaaaactcctccgtcagggagttcatatgaatgacttttgctacactcgtaaatcagttgataatcaacactctttctctccctccccctgtgtcggggggagggagaaagagtagttgttttatgaaggcagacaaaaagaaaagatgtctatatccagttgtttttggatagcatcttgtaacagtaaatatttttgttctaccaagggatattcttccatgagttcgtctaattcttcttttgtcgaagagaataaaaattggaagtattgttgtacgtccatctcttgacttgggataaataagagacaatcttccgggtcttcggtttcggacatataaggatcgaacgtgatgaatccacattctctggcttcgataattccctcttctaccgtgtacgattcaaacaggctgtagtccccgtaatactccttgcttacctcgtagaaagctcccggtacgaaccatgcctcacgtttcagtaaatattcggtccaaagactttgattaatatctccccggtaattgttgcgggtggtttcctcgagagttgtcagatcgtcattgatgtttgcgatagcgataaagccggagcttgaataggcgttgactaaatcgtaatcacccagtatccataactcaattcgattggccagttgaattgtgaacgggaaatatttctttttgaaattgtcgtcataaatattcaagaattgctcctcaataaattgcagtccagttttaaggacttctttttcctgttccggggcttttaatgagatcgggttttgattattgaagttataaacgtagtcactggaatccgggttggtcaggatgactacaccatatttctggtaaaagtcgtaaatgtaatgctgcacgtaatcgttgggatcatcggttaacgtgtactttccggcttgtaattctacctttggattgtcttcattatgacatcctaaaaggatgaaaaatagggttatgatatagatatttttcatggttttgttttttataggtttattgctgttcggggcgttcaatgttcacgataatcttgttttgttctctgatctttttggggatgggtagtgtataggatttacttcccgtgggtagaatgtactctttccgacttcccccgttcgtgaaaatgtgtcgtagttccggcattccttgtcttctcaggtcgaaccagcgatgtttctcgaaacaaagttctctcctgcgttcttcccaaaccttgttcagggcatcctcccggttggtggccgtgatttcgtaatcgttcttgatacgcttttccctgattgtgttaatatccgtgatggctgattcccacttgcccaagaaaactaaggcctcggcccggttcaggtaggcttctgacaggcggtaggtattcccgtaggactgggaattcgtgctactgaatttgtgtggtttcttgttcttgtcccaaaatgtggttttgcgtaagtcatcattactaaaaagtgaaatgatcttatcggagacaaggtatgttgcatacgtggaagagtaattatagataaaatcaaaactggccatgccgtaacagaacatgatctccgggttatttttgttgataaaataggagtaggaagtcaggccggccgtatgtaggtcgtagagctggtatctttcgttattaataacgctgtcggcataattcttggctgattggtactcttttttgtaaagatgcagccgggaggcaaacaagtaagctacgtccagacttgggtggacaacattcttggtccactccgtatttttaaaacgtgtgattgactcgtgcaaatcggattctattttcgcatacactttcgctagagtttctctggaatagatgttatccatgatcgtgatttcctcgttgatcgggaccccgagggctttctcggcttgctccgcactttcgtagggttctccgtacaagtttatcaactcgaaataagcttgggcccgcaggaaataagtctctgccagtagttgattcttttcttcatccgtaccgtgcatggaaggggttttatcgatgataatattgcaggtgaaaatggcatgatatagttcgctccatgcctcgtcatttctggtagccagatcccttccctcttcgggttcccgttgccacgtgtagtatccccatagttggttgcgatattcatactggttcccgtcttgatctgcgaaatcatctgtcatgacggacaaatattcggtgtagtcttttttgttttggataatctctccgagtaagagttcccgtagttgggagaccgttttgggaacgactttgtcctgtgatttaggttcaaggaaatcattacattcttgtgtcaacagaaccagaattgcgagtataaaatatatatttttcatgacttcagggattaaaaattaagtgataaccgcatggaataagtttgttgtggtggaatggaacgtgccccaaggctgatttgttccgggtcccgtcctttgagggctttatctttgataacaaaaaggttggaaacagagaatccgagattcaatgaatttaggaagagccttttgcaccattcttccgggaatctgtaattcaaggagaggttcgtacaacgtaagaaactactggatactgttcgtaaatctgaataattatacatttcccataaagatgctgcgattggatatttcagatcctgcggatatacttttgagtaggcatcattccattctcctattctcaaggcgtcatcacttaaacggggtatgttcgttcgattttcatctccgggtttacgccatctgttcacgtattctgtactcatattttgctgaggatagggaagtgtttgatttgccacgtagagattatttagtcgaaccttatggcctaggttaaaggcgaatgtggagcttagagagaaacgtttataccggaagtcggcagaaagaccaccgcttaagtccggttcccggcttcccatagcgacgaaagcccgagcgtatgcctcttcgtaagagctgataatgaaatcaccttttttatgaccatccccgtcttccagatattgttcgttgtagtttttgaatgtcggataaccatttgcatccaatttatcaaattggtaggagtagaacgtgtttaccggtttgccgttggtaatcacgcttccattgacgtaatttgtataagaagtattttgctccttatcagcgttggtaactttattgtacaccttggatgtattaaaggataggcttattccgtagtctttgcgatttaaaggtttaagtccgacggataattcccaacctttattccggagagaacctcggttgatggccacccgggatgctccgttcgtggaggtgatttccttggtcacgatcatattctttcctgtctttttatatccttccagagtaacgtcaagtaatcctctcaagacaactagattgattcccaagttgtaggattgtgtcttttcccattttaaatggtcattgggaaccttgtatagcgtggatgaatactcctccgagatattgtccatacctcccatggtcaggatcatgtcgggaacttgttcctcgttgacatttccttgtataccgaaagagccccgcacggccagaacttccagccattttacgttttgaaggaatagttcttcgtgggcgttccatctcccggagatggaccatatcggtagaaaacgggtggaaatatctttcccgaattgatttgaaccgtcagctcggatgttgaaattgaaactgtacctattgtcgaacgtgtaggtaaaggctccgtaaaaagagactttgttgtctttagtgtccgtgatagccggatagttttcggctacggtatttctgtacttgctgtagttttccagaacgatcttggcgaatttatgtccccgttcccgaagatacccgtaatttgtttccgttttaccgtccattttcctagagttgatttctattccggcaatggcattaatttcatgtttttggaatgtttggaagtaactgagggaacttgttaactggtaggactgtccccggtaatctttttcattcaagatcccgcccatgggaagttccgtgtccgtgtaataattggaggctaattttgcatcgggttctttgacaccgtatgcgagcaaccgtttggattgtgcgaacgtggattgttcgtccacccattcctgttcatttgtgtgagtagtggtcaggttgaattgggtgtgccagttgaacatggagaacagtttccagtccaggtggaaattcatggacgtgttgctggtcgtactctcgtaaccggaatgatccagttcgtgaaatatattgaatttaatatctggcgagtaataatcttttgccgtgtttttcaacccttctttcgtggtgtaaaaatagtcacttccgtcctcgttgtaggcgggaatagcccgggaagtttcgtatgcgtattggtataaatcgacagaactatgcgtacgcttgcttttcacccgggcggaagaaacgtctgcccctatttttagattggggtataaattgacatccacttttgccaaggcgttgtagcgagtgtatttttccggttttgccacacctttttgatcgttgtacccggctgatatgtaataattcacccgatcgcttcccccggaaacggataggttataactttgcgtgaacgaggtgtggaacagtagatcgtaccaatccgtgttcatttcctttagtttttttacttgttgattgaattcctggtaggtgatgcgacgctcccacaggtcccttaacgctccttcgtaaccgatttcagacgggtcatatttgttgaaatgtaatgctttctcctgcatttcttcagagacctcgatgcggtctttcgaattcatttgtttcatgatggaatagttagggcgggcaacgacggaaagattcgttgagaagttcacccttggcgggccggattggcctcttttggtggtgatcacgattaccccgttggcggcacgaactccgtaaagagccgtggcagaggcatcttttaagatgtcgatccggtcaatgtcttccgggttcagaaaggaaattgcgtttccgatcaggttgacattatccatgctattgatctcttccggggtaagtggtattgggtcggaaaggatcacgccatcaaccacccacacgggttcccggcttcccgagatagaggatgagcctctaattctgatttttggggctactcctggtgtccccgactggttgatggcctgtaatcccgggattttcccctgcaacatctggtctatggacgtgttgatcgggtccagcacgtctgaacctttcacgctcaccacggcagaagtcagtttacgtttttcgatcacttggtaacctgtaacaaccacttcttccagttcttttttgcttgatttgagcgtgattgtgaccgttttttgtccgatatagggtaacgtgacggattccattccgataaaagagaaaataagggtgtccttttcctgtaatttgatagaaaattctcctttcgtgttcgtggttactccattgcttgatcccttcacgaggacggttactcccggcaggggttgtttgttttcatcaaaaaccagtccggttaagatatttttctcgggttctgccattttgggggtaatcacgatgatgtcattctggaaagtgtacgagaatcccgtgggacgcagtatttcttccatgacttcctgaacacttttatttctgacggaaatggtgatttccccgatctgttcaccttgattggtgttaaagatgaaacaataacctgtttgtttttgaatctcagcgaaaaattccttgcttgtagcgttcttgaagtccagcgtgacttttttctgctgcgagtagccggaggctgacaacccgaggttaaaaaccagaagaatgaatgtgcaaatcttcataattagaataattttacttttaggacgcccatgtacatgaggtcgaaattcaaaagttttcataaatttgtggtttaatttatttagtattagaataaatgagatgtccagtctgatttattcgttgttctgtaaggacggatgatggtggaacatctccgtcctttgttttacctgttcgtgtactcgtttttgtttataataattgttctttcttttatatgaaatgtagcgctaacggtggattcaatggcatttaagatgacatcgatgttgtcatatcgtttcaagtaacccgtgaagcagacgttctttacggattcattttgataaaatagttccacgtcataccacagggcaagcttgtctagaatagtttccagacgttcgttgtcgaataggaatataccttctgtccaagccgtgtacggggtggtatcgacatcccggatggtgatatccccgtcagttttttgcacgatggcttgctggctgggtttcaagatatactcttgcgatgaatcttgaacctggattccgacggagcctttgactagcgtagtttgtatttgattctcaagtaatgtgtttatattaaatgtggttccgtacacttttacttggacgtcttcagcgataacgagaaaaggtttgttcgtgtttttgcttacttcgaaataagcctctcccgaaaggaatatctctcgtttgtcgggagcaaaattcttcgggaatcttaatttggaattcgaattcagatgtacgaatgttccatctggtaaggtgattttgaattccccgccacggggtgttactagttcatgatattgtctttctttttctgtcgtggagtctgaaatatatacgagtttgtcgccttgtaaaactaaatcgatcccttccggtagtgcgggtagtgcgtgatccggcgataagtcaatcgtttccccttgggacagaatcaaaattgctttgttgtttccatgggtgataggtgattgcgaaatttcacgggttgctggttcttgattcacgagtaaataaacaagtcccacgagtacaggaacgagaaaaatagccgcatattggcttagacggtaaatagattttactttatgaggttgggtattctttttgaattttgaaaatgctctttcggaatcgatgtgttttcgggtttcaaacttttgcatcctcttttcgggggagataacctgttgaaagaaggagcgattctttttgtctttttccagccaagcggttaactcttcttgctgtgtcttggaaattttattttccatgtacaatacgattagctctataattttgcggtgcgtgttatccatgagtattcattttgtataacaaacaacatgggttgtaaaaagtacgacgctaaaaatgaaaaaaatacttttcctctattcttctttattctttctctatattcttacaacttcctttactgctcttctattgctattatagtattagaactatttatttcaaattgaatggctctttttatactagagagggtgtgaaggtatactagtgaaatgacaaggaattcccgatattggtgtttttacatgaatagtaaaaagaaaaatagcgggttcagtctttcttttaaacgttgaaatgccttctgtttttggcttttaaccgttgagagggaaatgccgagttgagaggcaatttcattttcttttttcccggctaagtgtaatttgaatatttccttacagcgttccggcagttgatcaatgacgttgaagaaaatacggtaaatctcttcttccatgacttggaaaacttccgattcgtctgatattgattctccttgccggtaattaatgtaatttaattctgctttttggtgttttaggtggttgatcgaacgattccggatgaataaatagataaacgaatgaaatgcggagatagaatcaaaatacgtgtctttttcccacaatagggtcattaaatcctgcacaatgtcttcggcaacttcctgtctgacatagtgcatggcgtacatgaccaaagatgcatagtaatctttgaagagcatttggaaggcttcctctttttttcggtttagcgctttaatgaattgctcgttcgtgtgcatgtgatgtaacgtttaattctcttcgcgttaaaaataggaaataaataaagaaataacaaactggtgaacgagatgaagggactgtccccaaagtcttatctagtatctacaaactacccctcctgtgctaggggggtaggggtggtagtcgtttaaaaatagattttgggggtagacccttctctttataacttttatctcattctattgttcgtgtactttgtgatcagcgtgttccgaagttgtacgtaggtttgcatgatagtgtcggcacattcctgcgtgtatttgttgagtaattctgttgctttcttgggatttttcttttgtaaggcgataaactctttctcgatctcagcgttacgtccgaagaatgatcgttccatgggagcccgtgcggcgtccaaatccttttttccgtcctgccagttcaggtagagtaagttatcgacaaaatcaatggcccagcgagcggaattgtcagagtattctttggggttatacgtggaatagacttccgggatgcgggtcacacccgtgaagatgggcaggtaaggcgacgtgtaggcgttatcttggaaaacccagtatattccaccgatttcccggggaagatcagagcggagctgggcaaccatgccgtattccccgtcaacccgtgctactaggcgtctgcgagtagtcttcattaatttttgcgtttcactggatgggaaaggggtggccagtttacttttcaccatgttcccgttcttgtccgggtaataccaaacggcgtcattctctttgtcatagatggttcccgagaacgtggaacgttggaagtccatgaagtctttcacggaaactttttgctccggtttaaaggagaacgggtacacgctaagcggttccacgtattggatatactggtttaagttatcaaacgggttgttggtacgtctggacgggagcgggtcgagagagggtgcgaacgtgttgacaaataaccaaaaacggtttgtggcccattctctgggagtcggggcataaacatcctgccaaatgaaaggttttccgcttgccggggaataccaaccgttttcaatggctacctgctgatagttggaagaggcacggaattgttccggttttgaaagatctatttctttaatgatgctccagttgggaatcatggcgatttcatcgtccggcactcgttgagcggcccagatcactcccggcttaccactttccggggtccagtttttaccgacactgaaaagttcaagaacccatactccttccgggtctgcgatcgtgagacattctgattccggtccgcaagagggaaggaacccgtatttttccatgagcgaggtgatgagggtgagggcctcttctgccgttttgcaacgttgtaaggcaaaaatcatggcttgttccacggtcatgatctgtttcccttctcctttgtttacttgtaattcgggacgttggcttgtggtgctttccccgatacatagctggtactcgttgatgtgagagtaagcggattggaaatatgtgtaggtttgctcaacttgcgggatgtagcctaagatttccccgttgtcatccaaggggaggtcaactcgctgtatgccgtaatacacgggagccatacttcctttggggaatttttggcccgccacgacccggatacgacaatccgcaccagcatccgtgtgtgaatttaaaacactaccgtcaaccgtggcttttttgccggccacgatgatcgtgcaggcttttcctgtctgtaaaaagaggaaagctgctgctagaagtaaaaaaaaggttttcatgtgtaatatgatttttttgttttatgatttatcagggtgcaatgttgcaatatttattttaacaaaaaaattaaaagcatgaaataatacaaattttagaggtagagtactttatctttctcggctgtttcttttatggcatcgataattgcaaatagtttactgtatcatttttggagtaaggctatttttttggtatatcttcataaaattattcttccttgtcgatatcgctataaaaagagatgttctaattgggggattttaaaatcagcatttttaaaatcagaaattttgtcttttacgttctgaattttttctccgaagtcttacatttggagcgtgcgtgagtatcccgtggcgttaatttgattgaaaagaacgttcatggaatgcacgtatgcgctgtaaaacattttttctcaaattctgattgtaaagattaaattcttccacgtgtaaattccctttaggtaaaagtacttccacgctgggaatataatatttgtcttcatcaattcctgttaccacgattgtatggatggaaggggcgatagatgcggtaaaaccttgataagaaactccggggctagcatccgttttccagttcagtggattaatacacacgatgttgtttttgaacaatggagaaattgcttccggttttgtcacgctattgaatccgatgatcacccctacgtccgtagagtctttagccattcgtagataaggataactgtctagttcctcttgtgtgattgtatacccgatggcgtaagatgcgactaagtgctggtagatctccggtgttatctcgtgtttcaataattcgatcacggcttttgctccttggctgtgaccggcaagaatgaaaggacgtccttgattgtaattgttcaaataataacgaaaggcggctaccacatctttataagccaattgaaaacgtttttcgatgagagcagtgtccaaagacaaccagctgtccatcgaaatctgacggtaatagggagagaaaaaattacaactgtccgacaagacatttttggccaatcgaatagacgggtctaccatttgacgctgttttgtgttgaatatgtccatgttatgttgtatttgcccgaggctgtcggtataatcccaaatgcaagtaggcaccacgtaaaaaatatcgacctttttgttcatgccctcttgattggcctcgaaccaacacttgctatccgagtaatccacctcgtcattcgtgaaattcgaagaaattttcccgcaggagataaataaaagcaaggagcaaaaagcaaaaatatatttcaaaacagtcttccccataattttatttttgatgtaaaatttaaggcaaaaataggtattttctttatatgtttttgtggaataaacgttttatcttgccgtggatttacttttaagtttgtaagtgaactatttctagggtaataggggaaaacccaatgaatagctgatgtacattcgatgcatacaggaattaaagacgtatcaatttcgaa

SEQ ID NO: 10823 - DNA, 15988 bp, Unknown
  gut microbiota DNA sequence
ttaatccccctaaataatatcgtatatcgttattttgaaagaaaaggtaaggatatgactcttaaatagatcgtaaaaatgcaataattaatcgcaatatttgtagcgaaatacgcacatgcaacctacaaaacaggcgatttgtgtcgttttacgcacataataaacaatatatatacaaaatatgaaattttttttgatcaattctttcttgtttcataaaaagtcgtacatttgcaatcaatatatgaacgattattgatattttcttaataaaaaatatgatggttaattttaacattaaaacgtttcgttttattaataatccattgtacctttttgatcaatttcaatataaaagccaccattaatacaggtggcttcattgtatcaaaacaacattacggtttaaatgtacccctcatcatatcaattagcaaaaaaggtgaccaaacgaatctggccaccttccacttataactcgaaagtctatataattaccatataattatcacccgcatttagaagaaccgcaaaccttacagattaaacacccctcttgataaataacggatttagaaccgcaattctcacaaaccgaaccggttgcttccgtcccatccgggataaatttccgtaacgctctttccacaccattcttccaggtattgatattctcattatcgaactccatagcagcaaccaaatccacgatttgattgatcggcattccataacgcaagaccccggaaatcaattttgcatagttccaatactctttattgaacttgtatgataatccctccaccgtcgtcttgaaacctctcttgttcgagaattgaaagtcgtaacggctatttccatcttcatccgtgttctttacaatcttaccgtcggtcacggcttttggcaacatgattccctcttcatcatcagcgataccagtaaaaatctcgtaaggacgtccgtcatacaaaccaataaaggcaatccatttctccttattattttggaaacgcacgatttccgcatccaattctttcggacgcttggcaggcatcgcacctccatccgtctttttatctttattggaaaccaaaaccccggaacgggaaccgtcacgataaaccgtacatcctttacacccactcttccaagcctcgatataaagttgaccaaccagctcttccgaaacatccgcaggcaaattcaccgtaacactgatggagtgatccacccatttttgtacacgtccctgcatacgcactttagcaacccaatcaatatcattagatgttgctttataataaggagacttcgccaccatctcatcaatctcctcgttcgtgtaacgtttatgaacatcatacccgtttttctccatccaaatagcaaatttatgatggaacacgataaactcctcgtaagcatcccccatttcatccgtaaaatcaacatgcacgttcttgtcgttcgggtttacctttcttcttctcttgtaaaccggcaagaatacaggttcaataccggaagtcgtttgggtcatcaaactggttgttcccgtcggggcaatcgtcagacaagcaatgttgcgacgaccgtatttcaccatctcctgatacatctccggagaagcttcttttaaacgagcaataaacggattattcttctccctctcaacatcaaaaattttgaaagcaccacgttccttggccaacacgacagaagaaccgtatgcggcaacagccagttgtttatggatatccacggagaaatcaaccgcttcatcactaccataacgcaacccgagagcagccaacatatcaccttcagccgtgataccaaccccggtacgacgcccttctctagcttttgctttaattttctcccacaaacggatctcaacacccttcacctcgttatcttccggatccgatgcaattttctcaagaatagcatcaattttctccaattccaaatcaataatatcgtccatcaagcgttgagcgatagccacatgtttcttgaacaactcgtaatcaaaatacgcgtctttctcgaaaggatttaccacgtaagaatacaagttaattgccagcaaacgacatgagtcatacggacacaacggaatctctccacaaggattcgtggaaaccgttctgtaacccagatcggcatagcagtcgggcacactctcccgaataatcgtatcccagaacaagattccgggttcggcagatttccacgcattataaacaatcttattccacaattttactgcactaatctgcttcacgttcttcggctcctcagaatataccggatatttttgaatataatcacgctcctcgataaccgctttcataaactcgtcatcaatcttcaccgaaatattagctccggttactttcccctcggtcattttcgcatcaatgaaactttccgaatccgggtgattgatagaaacactcaacatcaaggctccccgacgaccatcttgcgctacctcccgggttgagtttgaataacgctccatgaaaggaacaattccagtggatgtcaaggcagaattcttaactggagaccctttcggacgaatatgggataaatcatgtccaaccccacctcttcgtttcatcaactgcacctgttcctgatcaatcttcataaccccgccataggaatcagaaggaccatcatgcccgatcacgaaacagttagaaagggatgcaatttgataatcattaccaatacccgtcattggccctccttgcggaacaatatacttaaaatcacgcaacacctcaaaaatttgctcttcagtcatcgggtttgcgtaatttctctcgatccgagcgatttctgaagccaaacgatgatgcatgtcatccgggttcaactcaaaaatattcccgtaagaatcttttaaagcgtatttgcttacccaaacacgggcagctaactcatcccccttgaaataattcaaggaactgctataagcctcctcctgcgtgtagactttcttttctttcacagtttctttttgtttttccactttcttcgtagtttgttccattagtgtattatataaatagtattttttgtgactaattcaacaaggacaaaactaaagaaaaaaaacttcttggaaaaatatttttactaacaacacacgaaagttttccaattcaaacaactaatgcactaataataaaataaataacaattcatagaatgtcaaaaaatttcccaaatataaaatcaatacaaactacaaatattttccaagaatattttgctttaataaaatttgaattttacatgataagtacaccacccagaaacacccaataagacacacaaatagctagcaatttttagctatttatacgttctagtgtttaataaagtttaataaagctccttgatctcttcagaaatatttacatgcattcttttctcatcatgagaaatatccaagacatattcatcggatacgggaagaagaatttctttggaaaatatttttatcgtgagaaccacgttacctgaataattgtctacctgctccacaacacccgtctctcccgtcaactcgtccagcacggaatagccaattaagtctgaaagctcaaaaggcaatttatcctcttcttccagcaaatatttctccattaacagatcacaaccaaccaggcgatccgcttgctccttcgagtctacaaaatcaaatttgacaatataagaagaatggtttctttccgtcaaaccatcttcagcaatataaaagggaaccggtgctccttctaaaaaaataaacaccggttcatccatgtattgttcaagaagatcattatccgtataaacaacaagagctccctgtaagttatgagtcttaccgatctctcctatctttacacaatcttctctcttgaccataaaattactctgctgctggagtttctgccggagcttccggagcagcctcagcggcagcttcagttgcagcagcctctacttctgctctagcagctgcttcagcttcagcttttgcagcagcaatttcagcttgttttttagccacaatctcagctttagcctctttcactttagcctcagcctccaaacgagccttataagcactttctgattcgttagccaaacgagcaattttagcctgaattttagcaattttctcttttttccaagcttcaaatttcgtgtcagcagcagccatatcaaatgcacctttcttcacaccttccaacaagtgctttttcataagtactccctcgtaagaaagaattcttttagccgtgtcagtcggttgagctccggtcatcaaccagtataacgctctgtcgaaattcaaatcaatcgtagccgggttggtcatcgggttgtaagaaccaattctttcaatgtaacgaccatcacgcggtgctctactatctgctaccactacatggtagaacggacgtcctttacgaccgtgtcttgctaatctaattttagttgccattctttttaattttaactcattaattactttcctattcacgataggcgggtgcaaagatagtcaattaattgaaagttgaaaattcttttaaggcaaaacattttgaaaaacatgttctatttctttcaggtactttggattaacgacaatctccttatacctgtttttcaatatcgacacggcctcctcaggcaattcattacaatactgcatcacgaaattattccctatatcatcccgaatctgctcatgcaaacccaaattattcaactcatcaatataagcattcacaaattgccccggttcagacatcaaattagctaacttctcgcccagcaaattattccaataagaaacctcataaattttataacgatatacatcccgataaacatctatatcatttttcggcaacattcgatcaaatatattgaaatcagcaggaatatcacttttatcctcccggttcaacaacgaatgatacatgggataataaaaataagaggcagccaatggtacttttacctgtattcgaaataattgcacaaacaccggatcgcaagtattctttttcacgaatgctgaaataatacgatcattaaaacgtacaatagaatccatgagctgtttaaaatcactcggtggaagtacaaacatctcttgtgttgatgggaaccactgtttctggtaataatcaaccatcattcgggtttccgggttacttccctctaaaaactcaacagattcataatcaccctccaacacgctctttacatccatcttcaagcgaacactcttccccggttgcaaaaaaagaggaaaagcggctttcccattcgccaatcgcacataactggcttttaccaaaggtaaatcagcctcaaaagctcccgtactatctaaagcaacagctattgttgtatcttgtccacaaacttcaaaatataatttattccctttataatgaagtaaatttcctgaaatctttaccccattaataggattgcacgcccacaggcatgcaatccataaaccaatacaccacctcatcacttacttcactttagtaaaatgatacctgatcatatgcatttccatcgggaactccccttctcccgaccaggctgcaagatctctataagtattatataagaaatccgttggctcataatcaaacacggtaacctccaatgtctcattatcctccaataatctaaaaccaacctgtacagatctcaacttctcatttacacccgagaaattaacattcgcctgactcaaattcatcatagaaacagtcacctgtggtggtcgtccgattcctccaaattcatacaagtacaccaactgttctttcaagaaagtgacatcagcatctctaaaatacttcgccatatctccggtcgcatgaaccttcaaccgagttcccccattcacaaactccaacatatccgtcggtaaattattttccggcatatttgcgatctcttctccaccataccacgcattatttttcacataatccattgatgtcagctccttaaatatccatttaccttccaaacgatcaggagttgtcattccctttatataaatctcggtttgatccacatcacccggtaaaatacgatcattcccgtccggaaccaataaaaacaaggtcgtttttccctcttcccatttcaagaacctgatttttatcgtaccataactctttttggccggaataacaaacattttatcgggattatccacgaattcataatgtacatgttctattgccgtcgaatgttctcccacgataaaaggaacttttgtatccgtactcgccgagaaatattttcccgtattcgcatctttcgcatccattctaatctcaacctccccgggtaaaacataattctcttcctggaaagaacaaattaactgtcctttagtaagcacttcgatcaaggtaaaattatactctccaagcgcatatccgtcaatagggtataattccagttttatcgttttcccatcctcaaaattatttttaggggtcacggtaatactagcggtactctctcccgcgggaataacaaactcatcggcagaaagctaatattcctctccctgcacagcggctccccttacattaaatttgacagacgtattcgccgataccggctctgtaacccgaatttcaacttttaacggttcttctgcatccagcgtatagattaattctgaaaaagccagttgaggccctttctcttcactgtcatcatcgtgacatgccacaaagcacatcgacaacagcaggcagataatcgatataatattcttcatcatatttcacttaaacctttagctattacaatccttgaatcgcattattatactcctctttcaacaaccgtatttcttctcgttcttccaaagtcaacggcctcgctttaggcagctggtaatcttgactttccgtcaaaatacgcggcggaacatcatccggtttatcacaccctccacaaaaagacagtaaaacaaaccctaaacccattaatattattcttgttttcatatttacctccttttcattacttgacataaccttcattttgaatcattcccgggatcaaatcaatatcccttgaaggaatcggcgcggtatacataaattgcttcgtctcgtatttaagtccatctttggcaatccaaaactccgggcatccgttccgttttaagtcgaaccagcgatcaccttccatgaacagctctttccgtcgttcacaatgtatcgcccacaataatggggtaaaagcccctccttccgcatttacccgaaccaaagcgagctcatccacggcaggtaaatttcccatcacataaggagtataatccgaaatccgttttgaccttagcaaattcaaatactcaagagcctcttttgtttgattcaaataagcataagactccgccacgatcaagcacatctcagcactcctgatacaagccaatggaaccttctttgcctctcgcttattattgaacaaaaacgaataccgaacatctcgctctttttcaacaaatagatcgataaaacttttacttacaggcttcacgaccaaataccccttggctccattataattttgatcaccgcttgtatgagataacacgtaagaacgtaaaaggatattacccttttgtacatgttgggccgacagcatatcaacatactctgtcccttctaccaagggatacgcctccaatatttctttggccacgggaatagcctgctcccaattttgagaccaaaaatacagcctagccaaataagcttttgccacgtctaccgtgtaacgaaaaatttccgatttggaattataagaaatccctttcttcaaatcttcttctataagcgacacgatctccaacaaacttgaccgcttcggtcgtgcttccatatcaaaacgtgtcacgatggaaaggcccagttgttctccagccttttgcttgttataaggttcacaaaaaagacgcatcagattgtaataggcaacacccctcaacgtgtatgccgtggcataacatgcctttgccatctccgtatcagtctcctccatttcgtgtatcaccaaattacaattctttattagtgcatacaacttctcatattcagacttaaatgaattcaagcggtcacccacatatttaggaatagcccccattccagtgacattcttcgtcaaactattctctacattatcactaaaacactctaattccaatttttccatagcattacccagtatggcctcatcataaccatcatcgatctcgctcaaatggctatttaacaaagctgcaaactcctctgcagtcttaggaataacctcgcctttcggcttcacatccaagtactctttacaggacacacatgcaaaaaataccattaaaagcacacttatatttttcaaattcttcataatctcacaaattaaaagcctaaactaagtccaaatgaacaggaacgtgccaaaggataagttgccccgggagtttccggctctaaccctgaataatttgttatcgtaaacaagtttgttaggataaaagaaaaactcaaagaagaaacccccattttactcaccacattcgatggcaacgaataagacaacgacatattcttcacccgcaagaaagatacattctccagcatggttgcccgagtaatcgtactggatgtcgggtaaatctggtcataataaagtctttcgccataagtgtcaataattctgggatacttcacgccagttctgttatcttctgtccaacgattagtcacatctttcctcacattcagatgattcacgtacaaatcattttcactcgtaggaatcctttctcctgatgacattcctgtaacgcttatcgtgttataactcactggcgacgttatctcgtccacgaccttccctcctaacgaataagcgccaccgacactcaaagagagcgttttccatgaaaaactaaaattaaaacctcctgttaccggagccgttgatgtccccttgtagtatatatagttatttacatcactcaaatctgtcggcttcaaaatatctgcatccgggcgtaacttatatttatataacccggtctccggatttattcccgttgatttacccgcaaaaatcgaacctaaaggataaccaacaaaattattggccgaataagatatcggtgacgtgtaacgtttcaatatattactattccaagcaacatttaccgaggcattaaatttaaaatccctatacctaaagacaagcgcttgtaatgttgcttcaatccctttattctcaatctgggaggtattataaccttgtccccggaatccagtcacgtaaggtacatcgacacttgtcacaagatccttactcaaacgataatacgcctcaaccaaaccattaatccggttattaaaaagtccgaaatccaaagcaactttcatatcccgcgttttctcccaacgtaaatgaggattaggagcctttctaacttcaccgattcgaagattttccaagtcggttttccgataagaggtagaataatacataatcaactcaggcttctccgttttattcacgtttccagtatatcccattgccacgctcaatttcaaacgactaagaacaggacgaagtttttccatgaaatgctcatcccccacgtgccaagccaaccctaaagaccaagtcggattaaactgttcgtcactaccgaaattatttgacccgtccgtacggaaagagagactggcaatatacttatcatacaaactataatccacggaagcataaaacgatgcgaaacgagtttcttcgatcgactgtccggaaagcccgtcaatcaaattcgccatatccaccaacttattataatcaacctgatcatctgtcttttccggagccggggtagaagaatttcccgtgacaggatcataaccgtaacgtttctcataaatattcttcgctttagaacctcgtatttctgctccggccaatacctgcaatcggtgaatcgaattgaaaatatccgaataattcagttgtcctcttgcgctataattcgtattattagttgaagattgagttattgacccgtaagtccttctgctattccaatcgtccaactcactaggtttatccttaaaagcagcataagtatcaattccattaatattatccgatttattattgataaaactatacgaaaccaaaccggaaaaacggaactttgaagaaattatataattcagactcaacatcaaattggcggcataatcatccgcaacactcgacgtttcgttaatttcccgcataatattatacccgttggcaggaagtatggcctctcttcctccattaatctgattcagattataataagtataatccggtctgtacgagccgtcttcattatatggcttctcataaggattggcaaaataagcatattggaaaggattcacgttcaatgaagatccatctgatttctgctgagaaaaatcaactcccaaatctaccgaaacccgctcatgaggattcaatttcaccttagttgacaaactgtatcgatcataagaaaccttcttcagtattccattatccttcgaataaccaaacgagacatagtacgttgcgacatccgttcctccggacaaagacaagtagtgattcattgaaaaagccgtccggaacaactcgtcaaaccaattcgtcgtggttttagacaaatctgcaatatacgcatcttgctccgccgcactcatcggttcaaatccctcgtcagtccataccttaccgtccttccccaacttattggcccgtaacataccgacaataccgaccactggataatacgatccgttcgtaaacccatctgccgagaattcatcccacaactcctgctcccaagccaatttttgttttgaattcatcaaatcaccatccctttgcggtttcattaccatcgaaaaattagccgaataattcaccgccattttcccgactttacctcttttcgttgtaataacgataactccacccgcagctcttgatccgtagattgcagcagcagaagcatctttcaatatggtaatattctcaatatcattcggatttatcccggcgataccgttagcaaaaatatcattaaaatcacccgctttaattcgtcctttttcaatactcggtatattacgttgcaaaggtaccccatcaataacccacaaaggttctgcatccccggtaagcgtatttgtcccccgaatccgaatcttggccgattcacccggacgaccggatttagccacgatactcacaccagccacctgtccctgcaataattgatcgatcgatgtggggactttattttcaaacacctctctgcctaccacggccacggaacccgtggttcttttttgagtcgtctgcgtgtatcccgtggaaacgataacctcatccaactgtcccacggccatcttcaacaccacattcacttgagtatccgtaccacctagcttaacttcttgagtctccatcccgataaaagagaactgtaaaacctgatacccatccggcatatccaatacaaaattcccggcagcatccgttgagacccccatcgtcgttcctttaatcattaccgtgacaccgggtaacggcgccccctcctcgtctttcacatttcctctaatcaccttaaacttctgtccggatgattcttgtggagccctctccaataaaataatccggtcttgaattcgataacgcaaccccgttccctccaacacttccttcatcacgctatccaaagaaacttccttgacatcaaccgttattcccccaagatccttcacgaatttctcgttgtatacaaaattatacccggattgttttttaatctcttccagcactttaaccagtttctcgtttgtcaccttcatggttatcttttccggtgaatgccctgcccagagcgtgcccgatgcgaataacagtagcatcaaaaatgcacaacacttgttgaatttcctgaaaaaaaacttttctaccatcatttttacctatatttgtgtgttatgtctatataacattttgcgttaaagagattaggaaagaccaattagcctaatctcttttcttgtgtacatagacgattttgcgttctactttaaatgacacggaagttgaggattcaataacggcaagcaaagactctaacgacacatcgcttgacacatctcccgtataatactcttcctcaaatacttgttctcgaataacggttacatcataataccgggacacccgcttcaaaatttccgtcaacgaagcattcctaaaactgaaattaccattcttccaagcaatataatgctccggatcacatttcgaaatttgaatcttagcctgtacatcatgcatattcacctctgccatatatcccggggtaatgatccgggattcccctttccctgctgatacttccacaagaccttcaaccaaaacgacaaaactcttcccctcatcctcgtacgtgttcacgtcaaaagttgtccccaaaaccctcacatccattttatctgtactcacgataaaaggacgtgtactatcttttgcaacctcgaagtagccttccccacgcaaactgacctcccttttatcttgaccaaaagacaccggatattttatttttgaatccgcattcaaccacacttttgttccatccgaaagaaccaaatggtagaatgttcctttcggaatgatcaactggttaaattccaactctttcttatgcaaagaatcaggtcgaacatattccaaacggttcccctcataaagctttgttcccttatccaattttacctcctcttgccccacattcgaaatatccaccatttctccggttgacaacacaaggcaaacattattttgtcgtccctgctctgccagtacaacacgctcctctcctaaagttcccaaccataaccacaacccacttgttatcaacaaacaaatacttgccgcaacagccacacccatccttatatttctctttctctgttgttgccgtttcttgaaactctcccatttcaaatcaacatccaccttgtcataccgtttttctaactcttccgtggaaattctttgcaggtctaaaaagacacgttccctcttcccagattcattcctccatgaatccaaccgctttttctccgaatcattcaacccggcaattcgttccttacagattaatttagctataaataaatactgacttatctctttcatctaactctcgtttccccaataacgatcgagacaaaaaacagtataggtgaaattttttattttttagaaaaaaactacgacaacatggcaaccattaaaaacaaatgacccaaagacttatttaattctctataagcaactgatttatgaaatttcaccgttgtttcacttatccccatctcctccgcaatctccttattcttcttaccctctaaatgcaactttatcaccgcctgcacttgaggtgttaatgattggatagctttatgaattaaaaaacgactctcttcatctatgattgcctgcattaaataatcactagtttccagctctcttgaaaactcatttgaataacgttctttaattttttcatgacgaatataatctaaacacttgtttcgaagagttcgataaataaaagcctgcaatgacacctcagaatcaaacatcttcaaatgccgagaccaaacaataatgaaagtttcctgtactatatcttcccgcacatacgcatcatcaataaaacgagaagtaaaggcaaaaaatttagagaaatattctttaaaaaagtgcttaaagacaagcacttccccattcaaaaatcgaatatactcaccttgttcctttgtcattaaacgatccttttttgatcttttacattttcaaggaagatgttaaagtcttatggatgcaaaaaaattaagtacctgataattaggttaggctaaaaagtgttatctttgaattaccaataatttcttattgaaaataattgtcaaaaaaggatcgtttaatcattatcaatcaatctcatccatatcgacattatccagcctctgccctaaaagattttcaacaaaataataccggataagattcacataatatggagaacccaagccgtgatctgccccgggaataagcatcaaatcaaagcgtttatttgcctgcatcaatgcattagccaaccggatcgtatgagccatgtgcacgttaatatccatatctcccgttatcaaaagcaacttacctttcaaatttttagctaattcaatcgttgtagggatcttggatccaaacgaatacaccacgctatcccgcttttccaccttcttctcatgcattttcacgccatgataagtttcaccccaccatttcgtatatatattattatcatgattaccggatgcggcaaccgcaaccttatagaaatccggatacgtcagaatagaagccgcagccataaaaccacccccggaatgtccgtaaattcccacccggtccaaatcaataaaagaatatcgattagccaactgttcgatcacgaacttacaatccgccaaagcataatccctcaaattcccatacccgaaacaatggtaattccgtccccgggtaaaacaactgccccgaaaaccgacattaatcacgataaaacctaactgagccaaagactcgtttccattatcatccaacgtgaaagactgtggaacaaaattctcttgcggtcccgggtacacatttatgataatcgggtacttccgtgtcgagtccatatcaaaaggtcgatacatcacaccataaagatccgtaatcccatcagccgctttcacttttattcgttccggcttcctccatcccatctcgtacagcaaacgcaaatcgggacgttccaattccataattttccttcccttcgtgtctctcaattcggcaatcggctcctgatccgcccgggaataattatcaatcagatatttcccgttcttggccagatcaatcgaatgaaacccgtctccgggagtcaacaatgtcaaatcggaaccatcaaaattcactttatagaaaagacgatactccggatttattcccttctcccggccatacccctcaaacacgaaactacgtcccaacgtgtccatctccgtgattctcccggccatgaaatcacccgttgtcaccggattctttaactgcccgtccttgttataaagataatattgcccccaacccgaacgttccgaccaccaaagaatatcctcccctccattcaatattcgacattcaaataattgttctgtaaaatgtggttcacaacgttcgtgaataatttcaaaaacctcccccgtgcgagtatctacccgacaaagatccatttcatcacacgtccggctcttgcgggtaaaataaatatattccgggtatttattaaaatcaaaaagtatcacttttacctcctgatccggatatttcgcaatatcaaccacttgatgcgatcttttttctgcattaaacagatgtaaatcatacgtgtagacatatttttctcccggcatcgggaatttataggttctcaatgtcggacgaggttccgccaaatgatcgatcaaatatccctcacccacgttccggcgatcctgccgcaaagaatagaacaccttagaatccccggaccaagtaattgatgctccttccttcttgtccgtatccttatcccgttgaaaagaataagaataataacgttctccatccgtcgtcaactggtaagaagtcgtgtctcctttttcctgtatatacacgttatgcttgtaagcatacaccatataattactatctggggaccaac

SEQ ID NO: 10824 - DNA, 232 bp, Unknown
  gut microbiota DNA sequence
aacggaggaaggtggggatgacgtcaaatcatcatgccccttatgacctgggctacacacgtactacaatggcaattaacagagggaagcaaagcagcgatgtggagcaaatccccaaaaattgtcccagttcagattgcaggctgcaactcgcctgcatgaagtcggaattgctagtaatcgcagatcagcatgctgcggtgaatacgttcccgggccttgtacacaccgc

SEQ ID NO: 10825 - DNA, 24942 bp, Unknown
  gut microbiota DNA sequence
gcactttttctcagtcataatggatatggttattttagattcttgccgtaaagatacgaaacaattaagaattgaaagaattataagttgtaaattatcatattctgattatttttgtgtctatactgaggatttgaaacttgggatcagaaatacgaatttataaaatagaaacgatcgtgaaaaagttgttgttgttaacgagtgtattggcttggatatctggtgtttctgcggaagaaaaaccgaaattgatagtgggagtggtgatcagccatttttatccggaatggatggatatgtatggtaacgaattgtctgagaatggtttgaaacgggttatgaaacaaggaacccgggtgaatgtgaattataactatttttacacgcaaaccggggtggatcacgcatcgatttacacgggtatgttacccacggaacatggaatcgtgtcgagggcgtggtacgatcgtttacgccggaaacgccagtattctacccaatccgatcgttatacagagatcggtgatcaacaggcggatagtataaaaagtttgtctcccgattatttgcagacgatgagcttggggagcgccatgaaatggaataatcccatgtctcgggtgttcagtgttgccatgaatggtgacgaggctgtcctgagtggaggaagtagtgccgatatggccatctggttcagcgagaaaacgggtaaatgggtatcctcttcttattattgttcggaattgcctgaatggttgagaatgtacaatacatgggtcgagagcgatcatttcgtgaataaaggatggatgatgttgtctgacgaggataagtcggctgcccgaattcgcctgacgaatcatttctattatgatatagcccgggcaaaaaaggaatataatacttaccgggttttgaaagccacgccttatgcgaatacattggtacgggtgttggccgaaaaattgattgacgaggaaagattgggagtggataatgatccggatttgctggccttgaatttttcctgtttagactatatgtcccgggatttcacgatagattcgagcgaggagaaggatatgttggtccgtttggatatggatattgcggcattggtgagtaagttggatgcccgggtcgggaaaggaaactacacgctgttcgtgactttttccgagatgcgggagttgatgccggaggatttgcggaaaattaaagtgaattctgattattttagtatatttaaggccgtggccttgttgaagtcttacttgggattggtttacgggccgggtgactggatttccgattatgatcagggacaaatttatttgaaccgggagctgatcgagcaaaagaagataaatctgaaggaaatgcaggataaagtggctgattttatgatcgagttcgagggggtagccaaagtcatgacagcttattcactgacgcatacttcttttccggagggggtaaatcgattggttcagaactcgttctcgcataagcgtagcggggatgtttttttctgtatccatccgacttgggtttcggaattgaaagagttggaagatacttatttccgacatacgaagcgtccgattgttcccctgtatttatacggtgcgggagtgaagaccgatttgaaagggaactacacgatgtcggatttgttacctactttgtgtaagatattagggataaatgctccttacacggcacacgggaaggcgatgttttagtgggggattaaaagtgttcgacgaacgcccctttgtccgcctttggttatccctttctccgtcgatagtctagcacatgaatatagcatgaacatagcatatacataccatgaacactaaccagtgttcatggtatgtatggggtgtgtatttgtagggtacttgtcctagcttatcttcggagcagtcataggcgagagagggagttgtccggtctttttgtattgaatttttttgattcgcctgttgtcaacttcgagtactttgaattgatgttctttgtatgtaatcacctcgtccttatgaggaagttcccctttaatttcaaggatcagtccggccaaggtgtctgcatcaccctccacttcttggaaagaatcctcctctatgtccgtgatcttgtagaaatcgttcagtagcgtggaggcctcgaaaatgtatgccccattcttgtcccgcgtgtaaacaatttcctgttcgtcgtattcatcattaatgtcgcccacgatctcttcgataatgtcttccatcgtgacgattccggtggttcccccgtattcgtcaacaacaatcgccaagtgtacctttttcgtttggaactcttccagtaggtcgttgatctttttggtttccgggacaaaataagccggacgaattaaggtctgccagcgaaagtcctctttctcatccagatgttgtaataaatctttcacgtagaggattcccgtgatgttatccaagttttcctcgtacacgggcatacgtgagtagccgtgttccgtgatgatctctttcacttgctggtagcttgaactcccgtcaatagcgattacattgatgcggggacgaatgatgtcaaccgcatcaatattaccaaaacggacaatgccttccaaaatgtctttttcctcgttgatagccgtgtccttggttaattccaaggctttggataattggtcgatggataaattgtcttttttatccatgcgcttgctgataatagaggtagagccgatcaacagggcggatagcggacgaaataggtgagacaggaaggtcagtggacctgccatgaaaatcaccatgctcaactgggaacggttggcgtataatttaggaatgatttctccagccagtaagatcacgaacgttaccacgatcacttggataatgaaacctagcgtgggataagccgagaaatcaaataatgaatttaccaggtaggtggacaacacgacaatggccacgttcacgaaattgttggatattaaaatcgtggcgagtagccgattgggtttctgttgcaggttgcgggccttctcgtatccgttgtcttccaagtatttcaattgcgagggagaaagtgagaaataggcaacctccgaaccggaaattaatgccgagcataacaataaaagcaataggataatgacgaaaattaaatcgatgagggtgaatgcacctgtaaaaatctgcccggcaaggggaatataatctgtgtccaaaatttatataattggttaaacttaaatatcgccgaaagatacatataaaaactaaaagataaaagataaaaactaaaagtttgaagtaaaagattccaaacgtaatggatctggctttaaacaattagtttctgtcttttatttttatcttataacttttatcttttagtttagaaagggagatcgtcactgtcgtcaccgccgcttaaatcgggtgcttgtggcatatgcgtgtcttgaggtttatccccgttatcctgtttccgggataacatctggaaattatccccgtaaatctcggtcgtgtatctttttaccccgttctggtcgtcccaggaacgggttctgatacgtccctcgatgtaaagcatcatccccttacgaacgtatttctcggctatttgagccagatttcgccagagaacgatattgtgccattcggtttgagttacgcgttctccgtttttattattgtacacctctgacgtggcaaggctgaatcttgccacggcaacacctccttcgagatattttacgtccgggtcagccccgacattaccgataagaataactttgtttaccatgtataatatgtatggattaaaatttgtcacaaattacggaataatttcggagaaaaaaaataatcccaatgccatcttgttatgattcgtgatttattcccgatcatagaaagtgataactttgttgttaccagtttaaatgaggtgcaggcaaggtaaaggcttgttggaaaaagtggtgcagggatgtgtccgatgttgacaattaaatatatagaacacaaaaaatattgacaaaaatgcggtagtttgtttcattgtttgtggaaaagatatatatttgcagtctgaaatttagaagaaatgaaatataatattgaatactaaatacttaaagaaaatgacaaaggcggacatcgtgaatgaaatttcaagaaccactggtatcgagaaagctgcggtacaaactacagttgaagcttttatggaagcaatcaaaggttctgtgattgatggaaaaaatgtatatttaagaggttttggaagttttgtagtgaaaaagagagctgagaaaaccgctcgtaatatttctaaaaatgtaacgattaaaattcctgaacactttattccttcgttcaagccttcgaagagtttcgtcaatcaggtgaaagatcaagtaaaataagaaaggagtgaaattatgccaagcggaaagaaaagaaagagacataagatggccactcacaaacggaaaaagagactgagaaagaacagacacaagaagaagtagtcatcgtttgtgagttagagattataaacctaagggctatgcctttaggtttattttgattaatacattaattgatcaggtagtgaatactgagttagtcatagatgtaaaagcggaagaagtagtaatcgccttgttaaaggacaagcggttggtagagttgacaacggagaagactagcgttaaatttgcggtaggtgacatctattacgggaaagtgaagaaaatcatgcccggtttgaatgccgctttcgttaatgtcggttatgaaaaggatgccttcctgcattaccttgatctcagtccccagttttattctttggatagctatataaagcaatgtatagcccggaaggggatgcctgtagccaagttaaaactggagccggaaatcagtaaaaacgggaagatcggggacgtgctttctgttggccaatatgttgccgtgcaggttgcgaaagaacctatttctaccaagggaccgcgtttgacctccgagttaagtattgccgggcgtcacctagttttgatgcctttctcggaaaaggtatccgtgtcacaaaagataaaatcggttgaagaacggaagcgtttgaaaagactgattgaaagtatacgccccaagaatttcggggtgattgtgagaactgtcgccgaaggcaagaatgccgagttattcgatagtgaattgacggaacttgtagagcgttttgaaactgcgttcaaacatcttcgggatatagagcctcccaagctaattttgggagagatagaccggaccagtgttattctccgggatatattgaatccctcgttcgagaacatttatgtgaatgatttagcattgagtaaagagattaagcgttatatcagcacgatagctccggaaaaagaaggtatcgttaaatttgtgtcaaccgaggtgccgatcttcgatcattttggggtggacaagcaaatcaagtcttcgctgggacgtactgtttcgtttaaaaatggagcatacctcataatagaacacacggaagcttttcacgtgatagatgtgaatagcgggaatcgtgtgaaattgggcgacgatcaggagtcaaatgctctggaagtaaacttggctgctgccgacgaggtggctcgtcagttacaattgcgagacatggggggtattatcgtgatcgactttattgatatgcaacaggcggaaaaccgccagaagttgttcgataagatgcgttcggcgatggaactcgatcgtgccaagcataccatacttcctctgagtaaattcggattgatgcaaatcacgcgccagcgtgtacgtccggaaatgaccgtgacgaccacggagacttgtcccgtgtgtcatggaaccggtaaagccgatgcggccgttttagtgattgataagattgaggaccagctagagttcttggttgaggagaagaaaatcaagaatctggtattgaaagtacaccctttcgtggaggcgtatttgaaaaaaggtttctggtctttgcgtaggaagtgggcttttaagcaccatatccatttaaaggtgatcggagttccttctttttatatttacgaatataagttttttaatcgttttaatagagaaatagaacccgagtaggtgtttttacttacagttttgtcattccatcttaaaacgatgttaaaatagtaccatgaatttgtgtgagaacaaattatatggtacttttgcgtccactgtgtgataatgcatacgatttcgagaagcatgcaaattgatgttttattaaataattttttatgaaaaagagactattgacgttgatctttacgttgttcgtgggaaccttttcggttttcgcccaaatgtctgacccgacaagttggacgttttcccagaagaaaaccggggataacgaatacgctttaacctttaaagcaaccattcaatccgggtggacggtttactccatgtcaaccccggcaggtggtcccatgcctacatcaattactattgagaaagtgggagagggaatcgaattagtgggtacggccgaggagagtgaaccaagtaaaaagcatgatgatgttttcggagtcgatgtgtggtattattcaaataattacaccgtaacccaaaagatcaaagttaccgatccttccattactaccgtgaaaggaagtgttgaattccaggcttgtcaggaaggtgcttgtgtgccgggagagaaggattttgcgattgagttgggtaacaaaggtgccgataaagctactgttgctgttgccgatgaaacgaaggatgcaaccgaggatgattccttgtggttgttcttctgggtcgcttttggtagtggattattggcagttgtgatgccttgcgtgttcccgatgatcccgatgacggtgtcattcttcatgcatggtgatagcaataaagcaaaagcaaaggcaaaagctattttctttgccttgtctatcgtcggtatttataccgctttaggattgatcatttcgttcttgttaggaccaggatttatcaactggttgagtacgaactggctgcctaatatttgtttcttcattatattcatgattttcgctgcatccttttttggtgcattcgagatcgtgttaccgtcttggttggtaaataaatcagacaaacaagctgataaaggtggttatatcggagctttcttcatggctttcacgttggtattggtatcattctcttgtaccgccccgatcgtgggaaccgtgttggtagaggctgcacgcggatctgtattacgtccgatcatcggtatgttaggattctctatcgccgtggcgttgcctttcggattcttctctttcttcccttcaaaattaagtaatctaccgaagtcaggaggttggttaaatgcagttaaagttgtattaggattcgtggaggttgctcttggattcaagttcttgatggtagcagaccagacttaccactggggattgttagaccgagagatttacatcgctatctgggtagccgtgttcacattacaagcattgtacttgatgggtaaaatcaaattcgctcacgatagtgatttaccatatatcggagtgccgcgtttgattatgatcattattaccatgtcattcgtgatctatttgatcccgggtatgttcggggcaccgttgaaagctttggccggatatttcccgccacaagaaacgattgacttcgatattaaccgtattgtgcgtgacaacgcaaaagagatcatgaagagtggcgtgcaggtaggtggaacacaaggtgccgctagtgctgcatccaacgagcctgtaaaatactctgatttcttgcacttgcctcatggtttggacggatattttgattacgatcaagcgttgaaggctgcacaagctcaggataagcctttgttcattgacttcactggtcacggttgtgtgaactgtcgtgagatggaacaaagcgtttggtctgatcctcgtgtacttgaaatgctgaagaatgattatatcatcgtggctctttacgtggacgataagaccaaattgcccgcagaggaggtatacgtgtcagagtatgacgggaaaaagaaaaacacgcttggaaagaagaatacggatttccaaatcaagcaattcgagtcgaatgctcaaccgaactatatcttgttagatagccgtaaaggtaatgataaagtattgaaaccgcatgtattacaacccgccagaggttataataaggatcgggatgctttcgtgaaattcttacaagacggtttgaaagagtataaagctcgtgccggaaagtaattctttgaattgattagatatattgaaagccacctttttcggggtggctttcttgtttttacatgattggggaaaataggattattgtttctttactatggccgtttgtaagataaatatgcatggcgttttttgtgaatcttcgggaaaatatttattttcgcctttcaatgagaaaaatgatggaaaaggtaggcttggatcgaaaggggtttgatacattatttgaactttattatggtgaactgacgtattttgtgtacagttttgtaaatgataaagaggttgctaaggatctggtgcatgatctgtttttgaatttgtggcaaaacaggaggcagatagatccatcattgtctgtgaaatcttatcttttccggatagcccgtaattatgctttcaattatttgaaacatttgaaagttattgccacaaatgagcgggatgtgattgaaacttacgaattggcagggcaagatacggaagagttggaatctcgtttagagcgtgtacggcggctttttgaaaagttgccggaaaagcagaaagaagttgtgtttaaatgttgtattgaggggaaattataccgggagacggcgcaagaaatgcaaatctcggaaaatacggtgaaaactcatttgttgagggcaatgaagtttttccgtcaagaattacggggagatattcttttgcttttcatgctggtgaagcgtcgtttgaaataaaaaagagttttttggaaaaaagttgttttttgttgtcacctgttttctatgggtcgttgtattgtgtaaaaacgataatagatgatagagtatacaccagaagattatgaatttgcccttcgcattttgcatcatcgtgaagatttgaccgaggaggaggtgtcgcgttggatggatgaaccggaacatttagagttgttgcgagagatggcgtttgttcggatgtctcagtatgaagaaaatcgggaagagatcattttaggaaagaggaggttaaatagggctttgcatggtacccgtcgtttatgggtaatgggttcggtcgcagcttctattttaattattttaggggggctgtttcaaatagggatgataggaggaagattgcgtggatccacggaagttgccgcgattactcccggaagtaataaggctcaattgattttatctgatggcgcgatcgtggatttgcatgcagcggtaagacaattacccttgtctgttatcgggattattcgaaatgattcgttggaaggtttgaaatactcgggagctgtcgggatgaaagaagagtataacgtgttacaaacaccggttgggggtttttatcatttagaattgtccgatggtacccgggtctggttgaatgcttgttcagaattgcgttacccggtaagtttcgtgagaaaagaacgtcgggtagagttgaaaggggaggcttattttcaagtgagccgggattctttgcgtcctttttacgtgcaaacttcccgccaaaatattcgtgtgttgggaacttcatttaatgtgcgttcttattctgcaaatcaagagtatacaacgttggagtcggggcgtgttagcattcattgtttggggcaagattgtcttttaagacctggagaacaattgcgtttgtcggatacatctgttgttattgttcctgtacgttcggaaagttatatcggatggaaaaatcaatgttgggtttacgacaattgtgtgttgaaggaagttttcaaggatttggaacgatggtataatgtccagattgaattggaggatgaatctattggtttacggcacttcacggggaatttcagacggtatgataatatagatacagtattagaaatgataggattggttgctcatgtgaaatacgaggtgaaaggacgagagatcgtgttttcatggaagtaatcttgtctgtgcaatagtaaaaaacagagggaaactggtaattcccctctatattcgaaatctggtgcaaacagatttctattgaaaatttaacaccataaaattatgaaaaaaaaagaacaattcagatgccaagcaaagaaaagtatctttaaaaaaacttgcctgttgtttgtcatgtggtccggattattgattggaaacctaagggcacaatccgtgatcgcagacaatcctaacgtgacgttgcagctgagtaacgtgacattgattgaattttttaataaattgacagaggttacaggaaaaaatttcgtgtacagtgccgatattttggaacagaagggacgagttagtgtgacggtagaaaacgagcggttggacaaggttttggatagatgcttgaaagaaaaaggattagggtacacgtttcaagatgatgttatcttgatttatcttcagaacgagaaggtttccccaggagagaaggtgaagaaacgacttgtacgaggagttgtaagggatcaacagggtgaccccttggtgggtgcgactgtagttttgaaaaatacccacatgggggtggctactgatgtggatgggcgttttgagatggaaataatgccggagaccgaatatttagtattttcttttatcggtaagaaggaaaaagaggtaagtgtaaaaaagcacaaggaattagaggtggttttagaggatttgatggagaatttggaagatgttgtaattaccgggtatggtaatatcagcaaatcaagttttacgggtaattcggtgagcattaaacgtgaagatttgttgaaagtgtcgaaaagtaacgtgattgcggctttacaaactttcgatccttcttttcggattcaagagaataatcaatggggatcagaccccaacgcaattccggagatgtatatccggggacgttcgggtgtgggaataaaagaattggataaggatcaattgagtaaatcacaattagagaataatcctaatcttccgctttttattatggatggttttgagattagcgcccggaaattgtatgattttgacccgaacaggatagagaatgttactattttgaaagatgccgcggcaacggccatgtacggttcgcgggctgctaatggcgtggtggttatcacgacgattgccccgaagcctaataaaatcatgattacctataatatgacgggaactgttatgatgcctgatcttagtgattacaacttgatgaatgcccgggaaaaattggaagcagaggtggcaagtggtgtgtatcagggatcgaatgctttcggacaggatttgttgaaccgggagtatcatgctaagttgtcaaatgtattgcgtggtgtggacactgattggttgtctcaaccgttacgaacggcttttaatcatcaacacagtctttatttggaaagtggcgcggagaatttgcgtttcggggtcgaattgaattacaataataatgacggtgttatgaaggggtcgtttcgtgatcgggctggtgtaggcctttctgtagattatcgaatcggagattttcaaatccgtaattatttttcttatacatcggtaaaatcgaaagaatcaccttatggaattttttctgattatactaaaaagttaccttatgatgagatgaaagatgaatatggtcaatggttatgggaaacaactacttggcacgacaataccgggaatacgacagttaatccgttgtatgaagctggattgaaaagttttgacaagacggagcaagaggagttcgttgataatttgaatgtgaactggtatgtaacgcctcatttacaattgaaaggacaggttagtgttattaaaaccggttcggaacatgagaagttcgtggatccgaaatccagacataatactcgaccattgtctaatagtaatgtttcttccggggagttacacacgacatcaggagatgaattatcatggaatgctaatgtatttgcagcatataattattttttgaatgagcataatattaatttgaatgtaggttttaatatccgcacttccaacacggagtctttgaatgctttttaccggggatttccttcgggtattttgcattcaccgaattatgcgcaagaaattgttactaaacctactgctaatcagaataaaacccgtttgttcggggtggttggtacgctgaattattcttataggaatatttggttattagatgttgctttccgttcggacggttcgtctgagtttggtagtgatcggaagtttgctcctttttggtctggaggagtaggaatcaattttcacaattttgcttttatgcagcaaacgggatgggtgaatacgtttagactgaaggggtcttacggggtaaccggaaaagtgaattttgcaccttattctgctcaaacaatttatcagatacaaaatgatgagtggtataaaactggttacggggctactttgatggccttgggaaatatgtccttgggatgggagaaaactcgtaagttgaatattggggcggatttggaattatggaaaggggctttacagctttctgcttcgtggtataaggataaaacggtggatttaattaatgatgtaacgattcccgcatcttccggtttccggacgtacgtggataatgttggagaggtggtgaataaaggagttgagattaatttgcgtggaagggtttaccagagtcaggattggatggtgaatgtgtttgccaatttagcccataataagaatgagatattgaaagttgccgagagtttgaaggcttataacgagcgggtaaatgagtatttccgggaaaacatgtataatagtaccagtttggagccttttacgcaatatgttgaaggagggtcattaacttctatttatgctatgcgttctttaggtattgatcccgcgacaggggaagaattattattgacgaaaaaaggggatattacgacggtatggaatactaatgaacaggtgattgttggtaataaagaaccgaaagcgcaaggtacgttaggttttaatgtaagtttcaaaggtttttctttgtacgcgacttttttgtatgaatttggtggtcaacgttataatagtacattggcagaaaaagtggaaaatgtagatgtttataattacaatgttgataagcgggtgttgacgaaacgttggcaaaagccaggtgatcacactaaattcaaagctttgcagaagagtgcactttattctttaaaaacgaatccaacagagcgtttcgtacaagattataatgtgttgtcattgaattcattgacattaggttatgatttcaaatcagagatggtgaaaaaatggggattaggggttttgcgttttgaagtgggcgcaaatgacttgtttcgtttgtcttctgttaaagccgaacgtggtttgagttatccctatgcaagaaatatcaatttctctcttagtgttagtttataatatttgttgttatgagaatagttggaaaatttattatgataggcctgttattgggcttggccgcttgtagtgattggttgaatgtttctccggatgatcaagtgaacgaagagacgttgttcactgatggtgatggttacaggaatgcattgaacgggatatataaggatttggcagatttcgcattgtatggacgggagttgacatggggtatgaatgaggtgttgggacagacttatcatttgaattatataccttctgatcatgcttattattatatggcttggtcgatgtatgataatgataaagttgaagcaattttgtcgtccttgtgggaacaggcttataatgcgattgcaaattgtaataatttgatttcccatatagctcatgccgatgcgacattgttttcaggcaaggatatggagttgaatatgatttatggtgaagctttggctttgcgggcttttattcatttggatttgttgcgtctttttgctccggcaccagttgtggctgaccagaaaaagtatattccttatatggaggattacggtacgttattcggtgatagggaaagcgtgaaagattgtatgaataaaattatccgtgatttgaaacaggctaaaaaattattgtcagaggtggatattataccggaaaataggatatggagtaagacttattatcggatagaaggaggacgaggtgttgtggatgacaatcttccgcgggatatattttatatgtaccgtggttacaggatgaattattgggcgacaacggctattttagcccgggcgtatatgtatgacggtcaacaagcgcttgcacgggaacaagctcaagaagttattgaagccacgtatgaagaaaatggaaggacctataactgtttttcttttacttctcccggagattatggcgtgaatccgaaattgtacgatggggtgatttgtggtttttccaagtctaaggtatctgaagaatatgctaactggcaaaaaggaacgggaggtttgtatttgtgttcttatttaaccggtatggatgctgaagattggaggaaagatctgtttaggacagtgaattggttttatagtatttctgtgaaatacgacgaggataatggagatacttatggtagtgatcttttaccggtaattcggttaagtgagatgtattatatcgtcagcgaatatttgtataagaatggagatacggaaggaggagtgcagaaattggatgaggtgcgtatggaaagaggtattgcgggaggaaaattggatattcgttcggttgatgattttgagaaggcgttgttggcggatatgcgtaaagatttttatggagaaggacaggtgttttatcaatttaaacgcttgaatcgagaactttcaagtaataataaaacagagtttgttctcccgattcctaaaatagaattaatttattaatttaacaatgtaagatcatgagtaaatatatattattcttctttttgttagccaccttgggaagttgtaagaatgatgagttgatggattataactcgggacattttctccaatggacgatggctgatcgtgatagtttgaagttttctttttctcattatccggagaatgacgaattggaagtgaagcttgaacttcaattgaaaggcgatcttttgaaaaaagcgcaaagttatcggatcgaggttgtcgattcattgacatcggctttaccgggaaattatagattaccggagaatcctttatttaggccggaacaggtggttgatacattctcttttgttctggtgaaaaacgatgcattgagtgctcctgtcgtgttgactttggctatcgtgactaacgattattttatgccggggatggagacttacaggtatgcctgtattgtatttaataatgtaccgactaaaccgttgtggtgggatgatgagatggagcgttatttagggacttattctcccttgaaatatgaacaattcatattatgtacgaaagttaatgatttgtcgggagttgatccggttaccttgagaaaatacgcattggaatttaaggcatatattgctttgaatggtataacggaagcgaatggtgatcctatggaaattcctatttattaattgttttatttggaatcttatgaaaatgataaatatattatgggtgatcgtggtcggattgttgctgacaggttgctatggagatgaaggtaattatgattatcggacgatgaatggtataacggtggattttaatcaatcgttttatagtgtaccgattgagacggagttggagattagtccgattttccattttgcaatggatagcgtggaagatcatttggcttacgaatggtcgtttttggagaaagttatttctactgatcggaatttgaaatacgttttcgatacattggtttcggatgtgctttatttgaaagttactgatcgtacgagtggtgtttcctattttgggaaaacgaatttagaaattaccgctgaatacgggcagaacggttgggttatattgtcagagaaagaaggaaaatcgagtctttcattcgtgcgtgaatatgcagatcgggatcctgttagcggggtaacggcatatacttacgaagaatttccggatgtttggaaaaaaatgaatccggacgtggaattggggaaaagtccttggcgtgtggttgagcatttttgtgcaaatcagaatgctttaagtgctttatgggtgattcaacgtgatccggaagactgtgtagatgtatccggtcagagtttcaagaaagatattgcgttgaaagaggcgttttataatcaagtttttccgggagattttcgtcctatcgagattatggaaatgaaaaatatttcgttggccgtgtcgcaagatggttcgatttatacccggaagaaaactattccagcgttgtttaattccggtttttatttagatatcccgatggattatgaaggtaaaaaattgaatgggaaaggattgttgaataatcgtgtgaagcagatgatgttcaccgtgttgtatgattatgatcagcatcgttttttggcaatcagtgattataatatgaccgaggcggggaaggtgatgccgattaatgttagtgagaatttgtataaaacacccgggatggctcgtttggataatacgggagatatggaagtgctgcatatcggggcttggtatggaaatggaagtatcgagcaggggtatcaggctttgatgcgttccccggaaaatgtatattatttatatcgctttactttgagttcttttatgctgtttggaccgatggcagttgctagtagcgttgaacaacaggaagtgaaagggtttgaaaattgtatcgaggatccatcttcatgtttgttccgtacgttgtatgcgagaaatactccttattttataatagctaatggtaatcggttgactcttttcgattggaaatctggtgttttgcaaacggattattatacgtttgaagctaatatttctgcaatagatacagaaagttttggcaatgaatgtgttggtataggcttggctaacggttctttctgcgtgattgattttagtcgagatgccgtgaacgctctgagaacgagattgatttataagagtgagaatgatttcggtaatatagtggatgtgtgttataaaaagcaaagaggtgcagactggactttttaatggcaaaatgaatagaattgtaaaggtatgagcgaaagcatattgaaaatagagcatttgtaccatcgatatagtcaacaatgggcggtggaagatattaatttggagattggaaagcgaggtgtttggggattgttggggtcaaacggggcaggtaaatcgacaacaatgaatattatttgtggggtgttgagtccaacccgtgggaaagtttttattaatggcgtggatcttgcggaaaatcctatcgaagcaaaaaagtatataggatttttgcctcaaacacctcctttgtatactgatcagaatgtggatgaatatctgggattttgtgcgagattgagaggaatagccaagaaagatgttcacgatgcggtggaacgggtaaaagaaaagtgtggaatcgcacattttagtaagcgagtgcttcgtcatctttcggggggataccaacagagagtggggattgctcaagcgattatccatcaaccggcattggtggtgttggatgaaccgactaatggattggacccgaatcaaattattgaaattcgacatttgattaaagaaattgcacgcgaacgttctgttttgctttccacgcatattttgccggaagtacaggcggcttgtaatgagatcaggatgattgaacatggcgaggtggttttttcaggaacgatagaagagtttaataattatgcacgacctgattcttttgtcgtgacgatgggtaatttgcctaatcgagaagtgttggaaaagattccgggtatagagcaggtggaaatgctgacggagaattgttgtcgagtgtttttttccggttcgcaagatattttggaacaggtggttcgggaaagtgtattgcaagaatggcatttgagggagattaccttggagcgagaatctttggattctgtttttgcacagttgtcaaataaaaaattaaactagaaagcatgattttccaaatagcaaaaaatgaattgaggaatatgttctgttccccgatagcttggcttgtattgtttatatttgcagtacagaccggaattgaatttacgggaagtatggctatggaagttcgggacagtgttatgggtgttggtttatatcgagtgacggcaaattgttattccggtataaggggtttattttcttcgttgcaaggttctttgttcctgtatgttccgttattgacaatggggttaatgagccgggaaaggagtagtggttcgattaaattgttgtattcttctccggttagtaatagttcgattattttagggaaatatatttctctgttgatttataatctaatactgatttgtattttattgatttatgtatttctcggattatgtattattgaaaatgtagatttttggttaccgttttcgggacttgtcggtttatacttgatagtttgtacttatgcggctattggactgtacatgtcatctattacttcttatcaagttgttgcggcattggggactttagccgtgttggcgattctgaattatttgccgtctttaggtggaaatatcgaggttgtgcaagagatcacgtattggttttcaatttcaggaaaagctaatcaaatgatcgatgggttgatctgtagtgaagatttattttatttctttattgttattgggttgtttctgtctttatctgtattgaaattgcattctgaacgaaaagtgatttcaaagtctcgttgtattgtaacgtgtattggtattctgacgtttgttcttttattggaatatgtttgtactcgtcctgcttgcatgtggtattgtgatgtcactcaagataagtcgaggacgcttagtaagggaagtcaagaggttatgaaagcattagacggaggtttaacaattacaacctatgtaaacttgttggatgatcatcgttggcaagggttacccgctaatcgtgtgtatgatgttcgtggttttcggcagtttactcgttttaagccagaaattcagatgcgttatgtctattattatgatcaaacagataatccgatactggataagttgtatccgaatttgagcatggaggaacgggcaagagaattggcacgagtagaagatttggattttgataaattcctttctcctgaagagattcgggagaaaattgatttgacttcggaaggtaatcgttttgtacgtttgttggaacgggaaaatggtcgtaaaacatttttgcgaatttataatgatggacaagctaatcctggcgagagggaaataattgcagctttgaagagattaacgattgttcctcctaaagttggatttttgacaggtcatgatgaacgtagtattcggcaggttggcgaatgggattattcggcttttgccgcaaatattggtttccggtattctttggtaaatatagggtttgatgtcgaggaggttgatttaagagatacgatacccggagatattcatgttttggtaattgctgacttgaaaaagccgttgacagatgacgaacaagagtatttgcaacgatacgttgataaaggagggaatttatttattttggcaacagccactaggcaagaattgttgaatcctgttacacgttcgttaggtgtttattttgagcctggaattttggtgcaaaatcataaacagcatcagcaagatttgattttaggagaaattacttccgaggcaattcatttttctccagaatttttttctaataaagctagtgggaaatgtatcacgatgccaagagctgttgctataaattgtaatgggcaatccgattttcggataacaccaattttggaaacatctgctaaaagctgttggaatgaacaggaaacgatagattttgttaatcaggtagctacattgggaccgggagaacaagagaaaagttatcctttaatggttatgcttgatcgagaggtcgggagtaaaaaacagcatattttagttgttggatgtgctgattgcatcagtaacggggaattaactcgcacgagaaatgatgttaactctaataattattctttaatcatggaaagttttagggtgttgggagatggcgtgtttcctgtagatgtgagtcgtcctgcgcctgtggataatgccattaaaataggagaaacaggtttaattgttttaaagtggttcgctttgttcattttgcctctaggcattgttatggggggcgtatgggtttggagaagaaggcgtaaatgagcgattataatattgtaatactttagtggagttcttacccaacggattgaatgtgtataaagtatttgttaacaaataattaattattgattcgtaattacatagagtagagaattgtcggtatacaagtttgttgattatagacttgtataccgatagttttttgtttttagatatttctggtattcttgccaattgttagcttcccaacttgtaacaatgacgggatacagaatgacacaactccgattgcgagtaccacaaaaccaccaataacgaaagtgtttgtgatccccacgtgatcggcaaggaatccggtactcatcaatccaaacatggcgggaagcatatttaggctcatgtatatggaaaatactcggccgaggatagacgggttgattttcgtttgaataatggccgtgaaagaagcaaagtatattgatccgataatgccttcgaatgcggtaaacacgacgaaccagacgaaagcattgggtgagagtagaccagaagcagtgaatccggttcccaggagaatgtacgttaggttgatcaatgtgattttattgattgtgtactgcctgatacttaaagcaactcctcccaatagagatcctacaccccaaatggcttcaattaggctcatttgaaaagcatctcccgaaaaatgattaagggtcattaaagggaagagtacactgacgggcatgataaagaatgtagccatgatcgagagtattaataataacgacattccccggtggctaactacttccctctgagcttcttttaagtcttgaagaatgttatttttttctgcaagttcgctaggaggagggtttggtattttgacgaaagctaacgaggtacatgcaagtacagcaccaattacgtcaagcataagcacgacaggcatggccagcgtggtaatggctagggcgcctaaagctggcccagctatattacaggcagaattgatcatctggttgatcccggcgatccgtaataattgagattctggagcgagtaacgggatagatgcttgcattgaaggagcatggaaagccgaacctatcgatcgtagtgctaacaatagatagatttgccaaacttccgcttgttcgaaataaaataaaaaggctaaaataagtgtgcagaaagcaatgaaactgtcagacaggatcatgattttcttcctgctccaccggtcgataaatactccggaaaacatacctaagatgccttgcggtaacatggcggcaatcgtggcgaaagccaaagtttctgccgatttagtttcaaaggttagccataaaatgatggcaaaattaacgagagaactggtcagtatggagaaaaactgtcctgtccatataattgcgaatacctttttccagttattcatggtaattttatatcaatattaaaagtgagaaaacaataccttgatgctttccggttaggaggaaagttaaaaaaaagtccggaggaattttcccgggattaaattaggcacgaacccgatacggaatgcccatgatgaagttttgaaatctcataaatggtattgtatgtaatttctacaaatatatgaatctgtaaagaataatcctaaaaaataatcgaaaatatcaagaggtgtacgtgattgtgtataattgccgtgatacgaatagattattttcatacctttgtgcgagttgcgtgtctgtgaaggccgaatagaatgataattcgtgtaaaatcttgattcatggaaagtaatcctcaactggaattggcgtatgattttttggaatatacgggagtgaacgtgtttcttacaggaaaagcgggaacgggaaaaactacgtttctgcgagaattgaaacggagatcacccaaaaggatgattgtggttgctcccacgggagtggcggcaattaacgcgggtggggtgacgatccactctttcttccagttgccgttcgggccatacgtaccgggaagttcggatacggtggagcgaggtgaaaaattgcaatacacgcacaagttcaaccgggaaaagatcaatattatcaagacgattgatttactggtgattgacgagatcagtatggtgcgggcagatttactggatgcggtggatgatatgctgcgtcgttatcgttccaagaacgagcctttcggaggggttcagttgttgttgatcggtgatttgcaacagttagctcccgtggtgaaggaggacgaatgggcgttattgaaacagcattacgcctcggcgttcttttttcatagtaaggctctggcggcaacccgttacgtggcaatcgagttgaaacacgtttacaggcaacaagaccgggagttcgtggacctgctaaatcgagtgcgagagaaccgggtggatgccacggtgttggggatgttgaaccggaggtatgtaccgggcttcaagccttcggatgatgaggggtatatcacgttgacaacacataatcaccaagcacaaaggattaacgacgtgaaaatggcagaattatccactagggcttattcgttcaaggcagaagtgaaggataatttccccacttattcttatcccacggaggagacgttggtgctgaaacaaggggcgcaggtgatgttcgtgaaaaatgattcatcaccggaaaagcgttactacaacgggaaaatcggtaaaatcacggctattaatgaccgttccatcgaggtggtaggaaaagaggatggtctgaagattcaggtgaccccggaggaatggacgaacacgagatacacgctggacgaggagacgcgggagatcacggagacggtggagggaacgtttaagcagtacccgttgaaaacggcgtgggcgattacgattcataaaagccaagggttgacgtttgaacgggcgatcgtggatgccaatgcagcatttgctcacgggcaggtgtatgtggcgttgagtcgttgtaagacgttcgaggggcttgtgttgagttctccggtaaccatgcgttcgctggtaagcgatggggcaatagatgaattcgtgcgggaggcggaacagaaggtgccgaataaggaggaattgcaacaagcacggcagtcttatttcagggaattgttgctggaacaattcgattacgaggcgatccggtggcggttacattatttgtaccgggtattggatgagcagttgcgtcggttgtatcccgattgggtggaacgttaccgggtggcggggaccaagtgtgcagaggaattgttggcggtggccgaacggtttcagaaccagttggaacggttgatgccggaagaagggaattacgaggcggacccggtgatcgcggaccgagtgaagaagggggcggaatatttccgggaacatacgatggctattttgggaaaattcttggaagaggctatcccggagattgataacaaggaggtgaggaagttggtggaacaaaatatggaacgttttcggggagaggtgaatttgaaactggaaacgttgaaagtgatcgggaacggtttttctgtaaaagattatttgcgggcgaaggcgaaggcgttaattgatgccccgaaggtgaagattaaggcgaaacgtgccggaacggaaaaagtggagattgcccctgatatactacattcgaagttatatgaaactcttcgagcttggaggaacaaggaagctgaacgattgaaattacccgtgtacacggtattacagcagaaggctttgttgggaatcagcaacacgctacctacaaattcaaaggaattgctggcagttcccggggtcgggaaaaagatcgtggaacgttatggggcagtgttactggatatggtggatgagtttcgctttcaacagaagtaaggatatagataaagagttaagtttgcccattattttatagagtgtttctatatttccgggatttttattttgccacctcttctagtccctattatgataattgcctagtgttgaaaaatgacggagttgaaaagttgagtctttggttaatgattataaaaatcggtatttctcaaaatattcgtttggggaaataccgatttttcatatcaattgccttcttttgtatatgcattttatgactaaatacacgtgatgatgaatgatattatcg

SEQ ID NO: 10826 - DNA, 2071 bp, Unknown
  gut microbiota DNA sequence
ccttgaatgaactgaagaaaattttggatattgaaggattgcttgaaaagtacagccggctgtttgaagaccatgaaaatttaagcagtggttatcctaaaaatgattacagcggactgaactcgctcagggcaaggttgaagaacaggcgttgggatggcaagtcgcctttgtccaatgacagccttgcggtttgttccggaattgccaatgtgaatgtagatgatagtggaaattcaaatgaagtccaatcggacaatcttgccaaagctcaggaattgacaaatatgggcggagacagcattgccacctataaccactcggattatctgtcctttataaactccggcaacgagtgcatcggttctcccgtttatttcttctttgaactcggcacagcgaagttgacagacaagtcacagtcggtcaatcttgatgaactggcacgtgtcgcaaagaaatacggattgtcggttactgttgtaggtgcggctgatgcagccacaggggctgccgatgtaaacgacaggttaagcatatcgagagccgattatattaccacagaattggttaagcgaggactggcagttgatgtgattaccaaggtcggcaagggaggaatctcagattacaatcctaccgaagccaatcgacataccaaagtattgctttatatgaaatagaacacaaaagatactttttgcttcatgatttgaattgggagagcctgtccgtgatggatcggctctcctgcattataaagtgcattatcctaacttttgtatttcactccaatagaagaacgcttctgcatttgtcttcttaaatttgttcaacttagttgataatggaggttgtatcgttgtgttgattaataaattcgcttcggacggattataatgttttacctcgtgtattcctttgccgataagtttagcgagataggcggcttttgaagcatttgtgatagcactttccaaagtatagacttcactatgaataaagccacgcactttttttattccatcttgaatcatgtcaaactcttcttgattatcttgtccacgcattacgatacatttagccgtatcataaatatcatccaaaactttttgaattgcatcaggactctcacctctgtattgaagttcaaccatcgcaaacttattgaatgtctctgttgtaatggacaagtcattgacaatatcgaaaagagatgcaatgtcaaatagttgtttgcatatttccattgagcaattcttttctcctttgaaaaaaggaatcccggtcgtgtgaggagcaaatgcagttaatttatcgccaagcaaatcctctttacttggtaactttacaattatggggtctccctctgtttttaacaaccggctttgaataggaagttccactacatttgcataatgaatttcctcgaataatacatccaacaaaatcttatcctgacgtcctcctgccggatatgccacttggtaaaagaatttggcgtgttgtttcggaatatcggtacgagagatacgctctaccaatttgacctctccaaagccatattcttcggaatacttttcaagataatcttcaattcttgttccaggaggacatattatatcaatatcgatagaaagtcgtttgcctgtatcaagatgaagcattaaggacgaacctcccttgaacaaaaatgggcaacccgatcgagccaatgcttccaacaatgagaatgcacggattgttttctcaacgagggttatatcttttatcttattgtctttggcgacttgttctatccaagacaaagtcctgctatcgggatgtatcatatattgattgtattgataatttgttcaactttttgttttcggttgcgacgtgccgcatatctcaataaccttgtttttttgattgcatagtcagagaatgcgtttgaatatatagtatataattcattgccttgaagatgttgtagttctttgtcagatatggcatcaacaagcattttctccaatgtgggaacgggacagccatttataacatctaatggagcctctttaacaagagg

SEQ ID NO: 10827 - DNA, 12971 bp, Unknown
  gut microbiota DNA sequence
aaacgttcgttttttgctataaaaaatcttgtggagttatgtcccggtaacgaggattttctgagggaatttctatccgatagaactattattctgtgattaaattgttataatagacttatcctagtgttaattgttactattatattacaataattttttaattttaataggaggggaataggagcggaatgggaggggaatgggagcggatcacaatatgataacaataatatagcattttgataacactattttacattaatttgaattcgatttttattgaattcgaattaatgcgtgactgttgaaacatgggcttaaggtaatagacgggctttcgataaatgggttgtttaaagggatgattttttcttttagtcttccagctcaattttcccgttaagtggcgagaaaaggggaattttaggtttgtcttttaataaatctttcacgtcgtcaagtgatagttttggggcgggttccggtcctgcaattcttcccactcttccttgaaggtagtatttttgataggaggccgggagtttgtcgttgatgtaagcatcgagaaggcgttggtattcgatactggaatgaaggactctctcttgtattttgaatagcatatcatgtgatataaaggtgcggaaggtgtcgagaccattctcgcaaattcctagggcaataccgtcagtgaggcaacacgtgaatcttttttcttcatcgggtttggggtaaaaataactgctgttgtggtccacgtaatatcggattacatccatcccgggggtatggagattgttgggaattaaatgacgtgtgcggtaacggctgaaaaagtgtcccgtgtacctgctgaaaacgagttcttcggtttttatgttgtagactggaaatataatgcccgtgccacagtgggtttcgtaagtggagtagtaatgaacgtccgggttttcccgttcttttttgttattgcacgtgatgataatgtgccatttgttgtatgtgagaggggatttccattcgattcggtatgatacgggaaatttcttggcaaacaggatttcccggcgatgcgtgttgatgaaaaaatccctcttgttctgaatcgcggtagtatcgcgtcttgcctctttgataatggcttccggtgacatggtgtccaaaaacatagtcttgcaagttttaagttaacgggtgatagctgttcggatggaatcgaatgacaagtccggtagcgagattatcgtgaaaactttaccgatgtcgtcaatgtaatgtgcatcggaagagcggatgaatttatacccggataagtacgcgttttgttgaagaaattgttcccgtgtcgtgtgaggactgagttcaagagcctcacatttcaagtctttggggacgaatccgagttgcgagagaatactgaaacgggatttgtcaatatgggctgggatgaagatgccatccagtgcgtgaacagtacgttctatcgtgtttatatcaacatccagggccgtgatcagtagccgttcttcttcgtatgtaatctgttcctcggcatccactacaacctggtaaccgaatttgtccggattgttttttatatccgggaggtggagatcgaggaagtgctggaatgcggtaaggcgttccaaggtggggaagtatgcgagggcgtgaacttcttccgccgtgttgatttccgtcccacaaagaacccgtagcccttgtcgttcgcccagttgctggattacaggggcctgccgggtggagttatggtcggaaatcccgatgagggacaggcctttctgtaatgccataccgatgatgtttgcgggactcatgtcaagatccccgcaaggtgacagcacggtgtgtatgtgtagatcggcccggatttccatggaattcgtgattacgggtgaagtagtttgtacaattgtcccgtgatttcgaaagtctgtaacgggctggagagaatggggatgttttcgttattgctttcttccagcgtatcttcttccgggaggtgtcctttgaccagaatgatggccgcgatttctttcaaggaggcgatagccatgacgtttttgtgtgtttgtagggtgacccatacatctccttcttgggcatgtcccatgacatcacttaacaaatcggacgtgtagccgcctttaacttctcgttgtaaaccttcttgtccggaacataccgtgaggtttagctgggaaacaatgtcttgtactgtcataatttgtagtttgtgtttttcgtgaatatattttatcttgtttattctccaaatctttttaatccccacgttttttctgaaagttcgagggattcttccggtgtcatcaaggcttcgttgcacaagattttttgcatgaacacgcattgattgagttttgcttttccttgaacgacgtcccttgctagcgtgtgacaggccggggcaccgcaggccccgcagtcgatttgcgggagaacgctcatgatgcggtttaatttttccatcttttccatggcgacaagcatattttcgtcgagttgttcgatggatcgtggtgggattttctcgcggagtttaccttgtttgaagaggtaggattcgtattcctgtatgtcatcgaaatcgggttgctgttgttcgtgtttgctggcttgcatccgtttgcgcaggcgttcgatggtcaaaaatcggttgttcacgacaagcgcaccgccggcgcaggagtggtcacaggctcgtagttcaagaaaatcgatgtccgtgagttcatcattttctattttttcgagtatgtcgatcacgttgtggatctcgtcaatggccaggcagcgaccttcaaatttagaggcctcaccttccgacaagtcccaggcgatggattcgggggagaggtacgtgcgttcggttacccttcccacgggttgatcccggtgttgcgtgaggcccagttgtattttgttataaatgaaattcaagttgataactccgtcgatgttggattgatcgtcgccaaccgggctttttactgccgcgatttttgcggcgcatggagtgacgtagaatataccgacttcatccggcgaaatccccttgtcgagatattttttacgggcgaaaatggctgctaggtccatggcttgttttaacgggacaatgtggtctatcagcgaggggaaacgtacctgtattaagcggacgattgccgggcagaaggacgagatgaaaggacgctcgtaagaattcttttccatgtagcgttgtatggcttttgccaagatgcccgatgcttgtgccacctcgattacttccgtaaaccccatttgatggagttccgcgaagatttgttgttcagtgatttcttccgagaattgtccaaaaagaactgtcgggagaaggatgatccggtgtttgaaattgaatatttggttgaaatcgtcctgctccacgtatatcgcatgttgcggacacgacttgaggcatttgccgcagtcgacgcaagcatttttgtttattgttgccaaaccacctttaatgcggatggcctgcgtggggcagaggctcatgcagtgcgtacatccgatgcaagcagtactggcaacttttaaggcgtggtaaaacggttccatggattaattttagattttaaattttagattccagctgcgcgaggccaacgctttttgatttcctacttttagcttttaatctttaacttatagcttttttaatcgcctgtggcgattaaaaaaaagtggtcatcgtgactttagtcccctcgtttactttggattcgatggttagtttatcacagtttttctgcatattcgggagacccattcctgctccgaatcccatttcccggacttcgggggaggcggtggaatatccttcctgcatggctaggtctatatccggtattccgggaccccggtcgctgatgacgacggtgataacagtgggatcaattgacacttgcatggttccttcgtaggcgtgagcaaccacgtttacctctgcttcatagagggcaaccacgattcgttttagaacggcagggttgacgttaagttgttttagtatcttttttacctcgcttgaggcagtaccggcacgtgaaaagtttcctccttcgatgttgtaattgaattccataatgcttgtttttaataaatgggctctagccctgcttcgtacagaagtccgcagactttgaacatactctgcttgctttgtaagatagcgatgttacactctttggctaattctaccatatcgggggaggcttgttttcctcgaacaaatagaatgaaactgatgtcagacatttctgccgtgcgaatcacctgtaagttggctagtcccgtgatgagaatcatctcgctggtgtctaaccggaggacgtcgctcatcaaatcggcagcgaaagcatgacggatgactttgtcgagatggccgttttcgtgaatcacccgggcatttgataacgcagcaatttcctttagagtcataagtttgttttttgattgctcctaaggtaatcaaaaaaaatcggattctcaaagtttgggaatccgaatattttgaatctatcaaatggtgaaggccaccgagaagagcatatcgacaaacatggagttgctttttgtttcgtatccggttctgaaaccgatgtttacagggaacgggagacggaagaaatgggtgtcggccgaaatttccacgccataggagtgataggttttgttccaatagcgatttttctcccaaccggtatcaaagaagggttctgctgtgaaccgtttcatgtagacaagcggtccgatgtgggcatccgggtaccagaacggcaaggcgtaagagattttcaacgttgacaggttgtacccgtagagggaggctccccggggagagtaaatctggttcccgtagtagttggttgttttatccgattttagttgatggccgaagtagagcgtccaagagtgatgtttccagaatccgggaagatacaaacgtccttcagcccatttcgtatcaccgtagtccaatccgtcgaatggcgtgtgggcatatcctatttctaggcgttgtccccagcggggatagatgtcccgttgacttgtacgggtttggttgttgaggacaagcccgtagcgcatgatctggagttttacatcatccgggtttgcgagtgcggagttatacggtttgttggaggggaggctggtccatcgattgtggtccaacaggtaagaacgcctctgtgttatcgaatgtatggcttgaatttcatatttcacgtaagggatgatataacgagaatagtttttccgggaaatgttgaacggaaattgtacggtggctgttcctttcgtgcgttgtgatttataaatggtacgaatcgtgtcgatttcttgggtttgaacgatttttatcgcgtaatcttgcatgaaatcgtcattgcgtccgctcttgaattccagttgcagggtgggccagaatcctttgtaggtggcttttacctgccagttgccgtgttcgtaaccttttcctctcacgaatcctgcggtcaggaacagggtgcttagtttgttttgcgagctgaccgctaacccgaaatcgatgtccacgtcttcggcatccggaaagatgggcccccagctatggaagttgaataggtgggttgttttgttgtatttccgactggcataggtggagtcggcggttagttcgaattgccagttttcttgtcgtgtcacgctgtcggcgatacggaaggtctggggattaattattttgttttctagttggcttatggcaattttacccggtttatacccgtcggaagtataaaacgagaataaaagtgaatccttgttcggggaaacgatcgggtagcgcaggccgaatttggagttaagtatgtttgcaccgaattcttgcggttgggtttgtcggtagaacgagttgttggcatcgaaagctccccggtatataatctggtcgttcacggtaaccggattgtcaatctcgtaaggggtgaacgcggtgatcggggtacgtttgcccgtgtgaatatcgatggattcgaggtgtttgcctttcgaagataccaccacggtgacgatattgtttttcccgtcataggagggatgtacgaatagctcgtctccggagccttttacccggaatatttctttttggaacgtgtggtcaaggatcacgatggaggcgttgtcttctttgtcaacttccacgaatccccagtttccctccacggcaaaaggggcatacctgttttgccgggtggggtaacggtgatattttttatggcgtaggtcatagctggcgagaaccattttacccccgtgttcccagcggggatggtatttatactcggaccacacgagcgtttcgtcctgataggcaaatttataatcatacatgattcccgttcgggtgatgatctcgtccttgtccgggtgtaggatgaccaaggctccttcttgagccaatccttccttgtaggcaatgatttgtccggttggggtggctgtcgggtaatggtagttcgtgtatatcttgtttgcggtcgtgatggtatcgaatgagtggggtacttggtcggactcttgtttccatatttgttggagttcgctgaagttatcccggtagagcgtgcgtttggcatcacaatgggtgttggcttgtttcacgctgtcaggattgacgaaaagggactggaaatgacgggatgaccagatggagtctcgtttttcgttcatcgtgagtttgaggctgcgggcaaaaggcgtgatcccgtaaggacgttttccaacccgggagagggcatcttgccagatgtcgggaccgtagtgaacacggctgttcccgaccatgtaataaccaagggcgtagtggttgggaacaaaatccttgtaggagccgaggacggccttgtagtaggtgtaaatccctttttccgtgacctgggctttcatttcattgagaaattcgggtgaacgtccccgtccgcttttcccgacagaggtttcgaatacggtggcatccccttcgaggaaccacatgggtacatataccccgatgacagccatcgtgatttgctccccgaagatgtaatataatgctttggtgaaaccttggttcaccttgtcgtattgtacaatgtgacgaaattcatgaatacacaaatgttccagccaagcgtcgctgacatcctgcgggggagccgtgtagagttcactctttttgggagcccagcccgcgttcccgtttgatacgccaccattagcccgtacgatcatggacattcttttgggtttgatgccgagggtattggcgtgggcgtatagtttctcgtaaatatttgccaggtattgtgcgttatcctcgaagaaatcagggtagatgatctggaagttatccgttttgatttgtcgccagcgggtactgcacgggtcttgcccgagatcgacaaattgggctttaccgggagtgacaagtgtgaatataagtaatatgcctattgtcagggaatttaagaaaaacgaggtatgtttgtgtctcatgtgtagtagcttgtagtttatttttttataaaattattccgctaaaataattattttttcccacaatctccatcaagaacgattatctttgtacacgatgagagtattagaaaagtttacgataagaataacgacctcccctgttccctccttgcacgggagggaaaaccgcttggtaattagcgttcctcttgtgtaaagaggagtggaggggaggaggcggaaagttgaaaaaacttgtaacttgaaactgtttatggatagaattgttgagttgagaaagttgttggagtattacaactacctgtactatgtgaagaatgagccggtaattaccgatcagaagtttgatgagttaatgcatgagctggaacgcttggaggcggagcatccggaaatgtttgatccgaattcaccgacgcagcgggtggggaatgatacgacgaatgagtttgtgcaggtggcgcataaatatggcatgatgtcattggcgaacacgtatagcgaacaggaaatccgggattttgatgaacgggtgcgaaaaggtatcgggggagatgacgtggagtatgtctgcgagttaaagtatgacgggacgtctatcagcctgcgctatgaagatgggaatttgcaggtggcggtgacgaggggtgatggcgtgaagggggacgatgtgacaactaatgtacgaaccattcgaacggttccattgcatatgctgggggaggattatcccgcggagttcgagattcggggggagattttaatgccttttgccgtgttcaatcgattgaacgaggaacggctggaggcgggcgaggctttatttgccaacccgcggaatgcggcagcgggtacgttgaagttacagaattcttccattgttgccaagcggcagttggattgttatttatattacgtgccgggagaaatcacgctgaccccgacacattacgggaatttaatgaaagcgagggaatgggggtttaatattcccccgtatatcggattatgtcacaatatagacgagattcttgattttattcacaaatgggatgtggaacggaagaatctcccggtgccgattgacgggattgtgattaaggtgaacagtatcaggcagcagttgcagttgggatacacggcgaaatctccccggtgggcggtggcctacaagttcaaggcggagcgggtggagacccggttacttagcgtggattaccaggtgggacgtaccggttcgattaccccggtggctaatctggaacccgttcatattgcggggactaccgtgaaacgggcctctctgcataatgaagatattatccgggaactggatttgcacctacacgatatggtgtacgtggagaaagggggagagattatcccgaagattgtgggggtggacgtggaaaagagagtggcagatgccccggtaatcgagtttattacgcattgtccggaatgtggtactccgttgattcgtaatgaaggagaggcaaatcattattgcccgaatgaggatcactgtcccccgcagatagctgggaaactggaacatttcgtgagccggaaggcaatggatatagagggaatggggggtgaaaccattgatttattgctgacgaaagggtttattcgggatgttgcggatatttatactctgccgtcccgtcgggaggagttgatcgggttggaaaagattctttacccggagagttacgtgatgaccagtattccgttggggaaagtgatttatgcttttgagatcgggatgaagaatatgtctgccaaaaatgcggatgttttggcagaacatttcggtagtctgacgaaattggccggggtctcgaaagaggagttgatggctgtcggaaacctgcaattccccggtgaccgggaaaagaatatcaataaaatgctggagtatttccgaatgccatttaatgaaccgctggagcgtttaaagcaggccggagaagtggatatgctgccgttggatgtggtgatttatgcgttggatatacccgggattgattttcataaggctgaattactgtctgttaagttcgactatgtttatcgtctttacacggcgacactggatgagattgcggagactgacgaaatgtcacgtgaggatgccgagcgagtgtatcgttttttacagggaaaagaaaagtttatccggaaaatgaataccttgagcgtgtatcgtttacaggaaaagtcggtggataatcttatcgccggaatcgagaaatcgaaacaacggaatttgccggaattcattaatgctctggggattcgctatatcggggagactgcatcgaggaatctggcccgtcattttaaggacatccggaagttgatggacgcaacgtttgaacagttgacggaggtcgaggatattggggatcagatggccggtagcgttctccgttatttcgaaagaacggagaaccgggagatgatggaacgctttttgcaatatggtattagcgggacaatacagggggaagagggtgaatccgatcaattggccggcacaaccttcgtgatcacgggaactctttcgttgccacgtgagcattttaaggcaatgatcttgaaagctgggggaaaagtcagtgattcagtgtctaataagacgacttatcttttggcgggggagaatgccgggagtaaattgcaaaaagcgcagaagttaaatgtaactattttgaccgaaaaagagtttaatacattaatgggttcataaagattggtatattttatacgttgtaaatgcttgtgggcttattttgaatattaaagtatatagtttatctttacgataaataaaaaagtaacaagtaaagccgtggaagggcggcattgaaaatatgggaaaagaagatacgagacgactaaaacagatcatgacttcggcaggagaggaagcaaagcgactggggaattctaaaatttatccagagcatttgtttttgggattgttgaagttgagaagtggaagggcgattgatatattgatgtctttagggctggatttttacgaggtgaaagataagatagaacaacgcctggaggggaaacgttataaatccgataaagtggaaagtcttgactttacattagcggcgaatagcgtgttgaaacgtgtgtccgacgaggcgtgggatctgggggatgatgaactggactcggaacacgtgatgttggcaatattgaggaatcaagcgggctttgtgacgaagttatttaaaacaatgaatatagattacgacatctttaaagaggccgtgctaaaagagaagatgcggatgcaatccgaatttaatgacgagggggatgatccggaggacggagacgatgaatcttccatgtataatccttatcgtcagggaggtcctgtttcttccaaatccgatactcccgtactggataatttcgggaatgacatcacgaaagccgcagaagagggggctttggacccgatcgtgggacgtgaccgagagatcgaacgtctggcacagatcctaagccgtcgtaagaagaataacccggtgttgattggtgatccgggggtgggtaaatcggctattgccgaggggcttgctctgcgtatcgttcagaagaaggtatcacgggttctgtttgacaagcgagtgatttcgctggatatagcttctatcgtggcaggtacgaagtaccggggccaattcgaggaacgtatgaaagcgattcttgccgagctggcgaagaaccggaatattattttgtttattgatgagattcacacgattgtcggggccggaggttccgggggtaatctggatgcggccaatatgttgaaaccggcgttggctcgtggagaaattcaatgtatcggggcgacgacgctggacgagtatcgccagaatatagagaaggacggtgctttggaacgtcgttttcagaaggtgctggtggaaccgacctcgtttgacgagacggtggagattctgaataatataaaatctcgttacgaggatcatcataacgtgcgttacacggacgaggcgatcaaggcctgcgtgaaattaactacccgttatatctccgaccgggctttgccggataaggcaatagatgccttggatgaggctggatcgagagtgcatatttccaatataaacgtaccgccgattatcgaacagttggagaaggatgtggagaaggtgaaggaaaagaagaaggaggccgtgaaacaacagaatttcgaggtggcagccgctttccgggataaggaacggcagttgttgaaacaattggaagaagagaaaataaattgggaacgggatttgcaggaaaaccgggtgaccgtgaccgaggagcatattgccgaggtggtggccatgatgaccggggttccggtgaaacgtattgccaagaccgaggggatgaagttgttgcagatgcatgatgaattgagcgaaagtgttgtcggacagaaggaggcgatcgagaaaatcgtgaaagccatacacaggaatcgtgccgggctgaaagatccgaatcgtccaatcggttcatttattttcttgggtccgacaggtgtcggaaagacacagttagccaaggtgctggcccgttacttgtttgataccgaggatgcgttaatccgaattgacatgagtgaatacatggaaaaattcgccgtgtcccgactggtaggagcgcctcctgggtacgtgggatacgaggaaggcgggcagttgaccgagaaagtacgtcgtaaaccgtattctgtcgtgttgctggatgagatcgaaaaggctcatccggatgtgttcaacattctgttgcagttgttggacgacgggcagttgactgatagtctggggcgaaaagtggatttcaagaacacgatcgtgatcatgacttctaatatcggtagccgtcagttgaaggatttcggccggggaatcggttttggttcccagaatatggaaggaaatagcgagtatgccagaggggttgttcagaaagcgttgaaaaatgccttctcgccggagttcttgaatcgtattgacgatattatcatgtttaatcctttgaccaaagaggatatttacaagattattgacatcgagttgaagagtctgttcaagcgggtgaacgatctcggtttggtgatcacgatctcgaaggaggcgaaagattttattatagagaaaggatatgacccgcagtatggggctcgtccgctaaaacgagctattcagaaatacctggaggatgaattagccgaggtgattattaaaggtattgcggagggaacggaactggatgtcggttatgataaggagaatgataaattgattattacc

SEQ ID NO: 10828 - DNA, 63133 bp, Unknown
  gut microbiota DNA sequence
ataagtaaatagccgattgcaacttttagtacaatcggctatttacttataaagtaagaagatttattttttaattactttctgtaaagcatgaagcatgggttccacgctgaggtcgttgcccgtggcttggatcatccattcgttgggagtaagacggcccagacggtaaatgcggtcaacttcttgtgcgaaattcttaccgttaagatagtcttccagctggaattcgatgatttgaccgaaggcataagctgacaggtacagcgggtagctgatcatgtgggaatagattgctagaaccgtttcgtctttttttccgaagacaggggcatagtatttattccatatttcttttgataagttgatcgtggcttcttttaactgttcggctgtcgcattcgggtttgcgtacaaccattcccagatggagatgtcgagcatagagactcccataatttcgtacaggctccagaatttatcaagaatgtccatcttgtctttttccgggtcattattttcgatgcccagtaattgtagatcccgtttttggaacacgaaggcaagtgcctccgtgaaagccgtgttcggaactccggccatcatgaaattgtctacattgtacatggaaatagtttgttccacgttgtgaccgaattcatggacggcaatgttgtatcccttgtaattcataccttctgccgggattcgagtgcggaggtgtgattgttggcctttcatggcggctccccatgcatgtcctgaacctctggcggcatccacggctattttgtcacaaatttcgtttgctctctcgggggtgaaacccagatgcgtgagcagggagggaagccctgctttaaaggcctctgcatttgggtaaagtttttgtatctgggagtccagtttggtttcgtccagattgctgcggggtttgaatccgtcgtaccagatatcataagcttctagcttgcggcccaggcgtttggagatgatcttaccgacttctttcagttccggagaagtgaggaattgggtgaaaagagcttttacgtcttctaccgacacttccatttctcccgaaaacttccttgcaatgaaatttttgccggcataagggtcgatggctttcatagcgtggaagttatttaacatgcgttgataacgttctgttgcctccggggtgcccgttgcggtttgttcgttttgggtgagcgtgttggagtaaggattccagtcgtaagctccggaattgatgacttgcacggggatctcctgcgagataatccgtttcatgacctcataaacggtacgttgcttgtccaaaccttctttccctttgttgtagttggccttgatttcgtctcttaaattccaatgagtaagcaaaattttatcttcggggaaaagcttttgtcctttggcgtttagcacgtggcccatataaatgttgtaacttgaaatatacacgtctgcatcactttccgctttcacaccagcttggattagttctgccggaacccgttgggtaaacacgtcaccgaggcgagcataggcccaagccatacggtcgttacctagtttttctttttcctgtaaaggtacttccgggaaattgagggcaatgataaagccgattttattgttgtaaaaatcattaatcaaatgagagccgggactgtaagctccgaacatgggatctatgtcgtgaagagggccgttgtcctgatgcaagtttaattgaagttggagcgtgatttcgttaaaatgtccccataaagcctcgaagtaatgacttaccttttggaatacctgttgtttttgttccgggtcggtgatatagtttttcacgcaaaattcttggaattcggagtcggcgccatcttgtggttgccaaaggtgggcaacttgtcgtactccggtttcgatggcggttgtgttagtaactccttttgcctgaatgttggtaatggtggcttgaattgttttctcagggatagcagcttttgttaagaatcccgagaataggcatactagtaataacgagtgtttcataaccgtttaaatttataaatttaaggggctgtagttttacagcccctcgatttggtttattgatttagtagttggaaatatacaatgtcttcccagccatttccccggcggagccagtttttccggtatccggtctgtacaaaaccgagtttctcgaaaagtttgcggctaccaatgtttccgctggggacgctactgtaaatctggtttagtcccagtgtttcgaaacaatagtcgatcatcagacggatagcggctgttgcgaacccctgtttttggttttcagtattgtggatcatgattccgataccggcacgttgatgatatggatcgaaatcatagagatcaactaatccaatccgggcatttgtatccactctttcaatcatcaagcgaagttgcttggtggtatatatatccagatgacaagtttcgatgtatttctttaacgtgaacagggagaagggggtaagcgtgtcactgacttcccataaatccatatcattttcccattgatacagacattctaagtcttcaggttctaaagctcttaagcgaatgatgtcatcgtttatcatagttgctgttttataatttttttgaataagtagtattatttgtcgctttcaaatataacactttttggtattagttggtgttaacacggtgaaaaaaataggtaggaagataaatcttgcgacttttaaaactatctttgtcgggaaagataaacaggtatcatcatagagcaatattcatgtataatttactgaccatcttaggggctacggccacgggaaagacctctttagcggtacgtttggctgcagaattgaaaggagagattatttcagccgattcgagacaaatttatcgtggtatggatctaggtacggggaaggacctagacgagtatgtccacgaaggtacgtctgtgccttatcatttaattgatattgccgacgctgggtttcgttttaatctgttcatgtatcagcaggagtttttaaaagtgtggcaggattgtgaacgtaggggtgttttccccgtgttgtgcgggggaagtggtttgtacgtggaatccattttgaaagcttaccggatgactcctgttccggaaaatcccgaattacgggaacgattggcctgtaagtcgttggcggaattatccgatatattgtcttcctatcgttccttgcacaacacaacggatacggacacggtaaagcgggcgattcgggctattgagattgccgagtattatattacacatgaacccgtgaaaggggagttcccggagatccgatctttgattgtcggggttctgtttgatcgtgagactcgtcgaaagcggattacagaacgtttacacgcccgcttgcaggcaggaatgatcgatgaggtgaaggggttgcttgatcggggaataaaaccggaagatttgatatattacgggctagagtataaatatcttaccttgtatcttaccggagagttgacttatgacgagatggtggagcaattgaatattgccattcatcagtttgccaagagacaaatgacctggttccgtaaaatggaacgggacgggttcgagatcaaatggctggatggaaatatgccattggatgagaaggtcgaacaggtgaaagagtggctttattaattttagattttagattttaaaattttagattccagctgtacaacctgtaacctgccaacctgtaacctgccaacctgtaattctctgcaggctaactaatcatggcaatgacaactacaatcgtggtcgtgatgatgttcttcttcatcctcttcatcttttttgaggagcatttcttccaagtgagggatggtgccttctaataagaaagcgttgtcttcgttactttcggattttaaacgttgaatggctatatggattttttcttcagggatgttaccgtgtaggttttcaatgacggtggaggcttctaatgctgcgatgaagtcttcacgcaataacatatcaacgaacacatctagatattctgaaaaatcgatagctgattcccagcatatgcgtaataaattggcttttccgctaccttcgggagcgttgatcaatttgtccattaagaccgttttgaagtccgattctttcacgtccgagagtaaggccgtgaggttggtaatgatgttcgtgtcctgattttgtaacaggatgtccagtaattcggggacgatggaaatatcaccttcttgtttgatttgttcaatagcccctctaacgatgtccatgtcattgctggacaattgtttcaatatatcttgtttgttttccatgtgtttctaaatatttgtatccaatacttttcgggtattggatacaaatataaggatcatttgcgggatttcttcgctctggggtggaaatttgtgattgtatcccggagatatgagttatccaggtgcgtgtaaatttccgttgtcagaatagattcgtgtcccagcatatcttgaaccgtgcgaatgtccgcaccaccgtttaccaagtgagaggcaaatgagtggcggaaggtgtgtggggataccactttgttcaagccggcacggagtgctgtttccttgataatattgaatatcatcacgcgggaaagagattttcccatcttgtttaaaaagagaatatcctcgaaccctcttgcttttttcattttgtcgcgatcttttttcaaatagcaacggatctcgtcttttgctttcgctcccagtggaacaatccgttccttgtttcctttcccctcgattttgatgtatcctgttcggaagttaatttgtgataatttcaagttgacaagttcagatactcgtaaaccacaagaatataatgtctcgaggattgctttattacgttgtccttcttgtttggtcagatccacagcgttaatcatggcttcaatttcttcgacgctgaggacgctaggaagggtacgtccgatttttggtgcatcaagcgagtttgccgggttaagcccgatggctccatcgtataacaaatacttgaagaaagatttgatactggatatacttctagcttgagtacggggggtaaccccagtgtctttcaaggcggaaatatactcgtttaatacgtcataggacacttctttcggattcaatgtaggtgtccgttgttcacaataggctcccagctttctgatgtcattcaaataagcttccaccgagttggttgatagtgatttttctaaaatcaaataagtccgaaaactatctatcgcttcgttccaagtcatttttagctgtgttacaaaataaataatacaaattctaattcaccactttaaacctatctcaagagtattctgatagatttttgccagataaagatataagttttttctttgagttgtaacagttttgtcaagtttaacactcataatttttattattagaccttgtaatcgaaatttaatacctaaatccggcttgaaatgtccggtctcatcgttttttttgttaattttgtattgagtaaaaacggtgaatatgaagatattgattttaaacggtcccaatcttaatcttttgggaatcagagaaaaaaatatttacggggaaacctctttcgaggagtacttgtcggggctgagagatttctacacgatggtcgagattgattattaccagtcgaacgtggagggggagcttatcaataaaattcatgaagtgggattctcctatgacgggattattttgaatgcgggagcttacacgcatacttcgattgctatcgcagatgctatttcggcgattccctgtcccgtgatcgaggttcatatttctaacacggcaaaacgggaaatattccgtcatgtttctttcctaacacctgtttgccggggggtaattgccggtttcggattgaaatcctacgaactggcgttacaggcttttatgtgagcagtttcgccacattacaagttggggaaatacgcaaagaataactattattattaatgatatgaaaaagactaagattgtggctaccatatctgacaaaagatgtgaggtagagtttttagagaagttatattgtgccgggatgaacgtggtacggttaaatactgctcatcaggatatggagcaggcgttgaaggtagtggagaatgttcggaaagtttcggataatatagccatcttgatcgacacgaagggaccggaagtgagaacgatgcttatggatgaaccgatgcatgtagatcggggagaaacggtttatttgacaggagatccagagttgaagatggatgggaaattgattcacgtgtcctatccttattttgctgaagatataaaagtgggagacaaggtgttggtggacgacggggatgtggagttgattgttgtcgagaaaaaagatcattatttgaaaatgatggtgaccaatgaggctgtcattaagaatcgtaagagtataaatgtaccgggagcttccttgaaattgaaatctttgagtgataaagaccgggcgtttattgattttgcaatagataataatctggattttattgctcactccttcgtgcgcaataaggaggatgttatggcgatacaggctattctggatgcccggggaagtaagatcaaggtcattgccaagatcgagaatcaagagggtgtggataatattgacgagattctggattacgcttacggggtgatggttgcccgcggagatttggggatcgagattgaggctgagaaaatccctaagattcaacgatatattgttaagaaatgtattgagagtaaaaaacccgtgattattgccacgcagatgctacacacgatgattgagcatcctaggccgactcgtgcggaaatcagtgatattgcgaatgccatttacatgggtacggatgcgatcatgttaagtggggaaacggcttacggagcgtatccagaggaagcggtaaccgtgatgcgtgaagtggcagaggagaatgagggaacagttccgccggatgcggggagaagtctggtccgtataaataacgagattacggcggcgttggctcgttcggcagtgaaaacagcattaatgttaccgattaaggcgattgtggttgacacgctttccggacgtacagcccgttatctgtcggctttccggagtgacttgcccgtttacgcccggtgctataatgaacgggttatgcgtgaattggcactctcgttcggggtgtatccttattatactgaaaaaccgatgtcacgggatgagttcatgaatgatctgccggaaatgttgatgcagaatggcattaaggctgatgactacgtggtggttgtcgggggaagtttcgggcatggtaaaggagcctcatttattgaggtatgtaagatcggggaaatccgctaggttaattttagattttaaattttagattgagagatttaagaattcaatcaaaaatttaaaatctaaaattttatcaatgtttgtctttcaagatgtcccggatttcagtcaatagtacttcttctttcgatggggcaggaggtgcggttggtgccggggtttcttcttttttcgttctcaatttattcatgaatttgatggcgataaagattgagaatgcaataatcaaaaagtcgatcgttgtttgaataaagttaccatagttgagggtgacggcttcgaccatttttcccgtggcctcgttcatgtgggctttttgtaacacgatgtgtaaattggaaaaattcatgccaccgacaagcattccgatagggggcatgatgatgtcactgaccaatgatgatacgatttttccgaatgcaccaccgataatgataccgacggccatatctaccacattccctttcagggcaaaagctttaaattcatctaagagtttcatgttctgattcattttataatttaagtgtttgaacgtttaaacatttaaaatgttctaaatttctacggcaaaattacattaattcttgtaactttgtaagcgtttaactattgtcaatggaaaaggaaagtcgagaaaagcaaatatatagggttacaattgtcggttcaattgctaatttttttttgttagtgtttaagttcgtggctggaatattgggacaaagtagtgctatgattgcggatgccgtacattctttgtcagatttcgtgacggatattatcgtgctggtttttgtgaaagtttctgctaaaccgaaggatgcgggacatgattacgggcatggtaaatatgagacactggcaactgcaattatcgggatcgttttgttaatggtcggaacagggattttttggaacgggttgaatcagatacttgctttttatcggggggagaagttgggtagtcccgatttaatagccttgatcgctgctcttgcttcgatcgtggtgaaagaaatcctgtatcgttactcggttatcgtggggcataaggtgcaaagtcaggctgttgtggcgaatgcttggcatcatcgttcggatgcattctcgtctatcggtacagctttggggattgccggggcgatctttctgggaaaggactggcgggtacttgacccgattgcagccgttatcgtgagtattttcatcgtgaaagtgtccattcagctcctgataccttgtttgaatgatttattggagcgatctttgccggaggagaccgagaaggaaataattacgataattaatgaagacccgcaaataaaagatcctcataatttgagaactcgtcggatcggtaatgacttcgctatagaagtgcatatccgcttacggccggatatgaccgttcaggaggcacatgtggttgctaccgggattgagaatcgtttgagggctaaatacggattgcgtactcacgtggctgtgcatgtagaacctgagaaaaatgaataatatcgatgagaagagcggtgtggtattacacgatagtgtgcgtgttgttgatattggttggggcttgtaaggaaaacgaaaagaataaaaagccttttgtttattttaaaaattatcagagaacttttaatgatttaaatgacaggcatctgtcttccgccaagcgattgggaattactcctttgaaggcgtcagaggatttgagtaaggcagatcgggatttaaaagagattaaatcctgtaaattgttccaagtggataaattaacacattcagaaccttatcttgtcccggaggcctgtgatttattggcagatatagcccgaaattttaaagactccctgtatcagaaaggattaccgtcccatagtattatcgtgacaagtgtgttgcgcacggggtctagcgtgaagaaattgcggaaaagtaacgggaatgctagtgccaattccgctcacgtgtacgggactacttttgatgtggcatatgcacgtttcaagaaggacggacgtaaagaagcaccgaaggaaaagttgaaaagtgtgttggcagacgtgttacaggatttgcgtttgcaaaagaaatgctatgttcgttacgagtttaagcaaggttgttttcatatcacgacaagataacataagtaatattactgaaatacataagagactgggctgtatgtattattaaaaagaatcgttatctttgtcggctgaaaaaatgcattccacgggtgtggtgtgctggcaagttaggtaataattaaaatgacaaaaatataatgggtttacaatgtggaatagtcggtttgccaaacgtggggaaatcgacgttatttaattgtttgagcaatgcgaaagcgcagtcggcaaatttccctttttgcacgatcgaaccgaacgtgggagtgattaccgtgccggacgagcgactgaataaattggtcgagttggtacagcctcaaaacgtggtacctgctgtggtggagatcgtggatattgctgggttagtgaaaggtgcgagtagaggtgaaggtttaggaaataaatttttgtctaatatccgggaaacggatgctattattcacgtgttacgttgttttgatgataataatatcgtacacgtggatggtcatgttgatccgatccgggacaaggagacgattgatacagagttgcagttgaaagacttggagacagtggaaagccgtttggcaaaagaggagaagaaagctcagaccggaggggatgcaaaggcgaaacgtctggtcgaggtgttgcatttatataaggatgcgttggtacaggggaaatctgctcgttccgtgcaattaaacgatttacaacaggaggcagcgaaggagttgatgttgctgacgaataaacctattttgtacgtttgtaacgtggacgaggcttccgtcgtgacgggaaataaatatgtggatgccgttcgggatgccgtgaaggacgagggggcagaggtcctggtgatcggtgctgctatcgaggcggatattgccgagttggatacgtacgaggagaaacagttgttcttgcaggatctaggactggaggaagccggggtgaataaattgattcgtacggcttataagttattgaatttgcgtacttatttcacggcaggcccgaaggaagtgagggcgtggaccttcaagaacgggatgaaggccccgcagactgccgggattattcacacggatttcgagaaagggtttattcgtgcagaagtgatcaaatacgaggattttattgctttgggatccgaggcaaaatgtaaggaagccgggaaaatgtccgtggaaggaaaggagtacgtggtgcaggacggggacatgatgaacttccgttttaacgtgtaacgaggatttggttttatcttttataaagatgatattaaagaaactttttggatttgatcccagcgtgatgaaggtaaagacagaaatcatggctggggtcactacttttttaacgatgtcgtatattcttgccgtgaatccggatattctttcggcggcatcgatggatcggggagccgtgttcacagctacagccttggcagcattttttgccacgttggtgatggctatttgggcgaaattaccttttgccttggctccgggtatggggttgaacgctttttttgcctttacgttagtgcagggcatgggatattcctgggagagtgccttggctgctgtttttatcgaggggctggtgtttatcctgttgaccgtgtttaatatacgggagttgatagtgaatgctattcccgaaacgttgagacatgccatatccgttggaattggtttgtttattgcttttttgggattacaaaaggccgggttgattgtggctaatcctgcaacatttgtttctttaggcgagtttactccatcgacgttgttggcggtaggaggaattgttatcggaggtgtgttggttgcacggaaagtgaaaggggctcttttctatgcgattgtggcggtcacgttattaagtattcctttggagattacccggataccggaaggcttttctttagtatcgatgcctcattctctggagccggtctttttcaagctagattttcattctttgttgtccccgaatatgttgattgcgattttctcgctcgtgttcatggatatttttgatactttaggaacattggtcggtacggcaaataaagtagggatggtgaaacctgacgggagtatcccgaagttgaaacctgcgatgatggcggatgctgtgggaacaacggttggggctttactcggaacgtcaaccaccacgacttacgctgaaagtactgctggtatagccgaaggtgggcgttccggtttgacagctgctgttgttagtgggttgttcattgtcgctttgttctttgccccattctttttgttggttccgggtatcgctacagcaggggtattggtgatcgtggggagttttatgtttgatgcggtgaagaaaatatgttttgatgatatgaccgaggcttttcctgcttttgtgaccattattatgatgccgttgacttactcgattgccgatggtattgtgttggggttattgacttatgtgttgtttaaattgtttgcaggtaaatatcgagagttaaatctcacgatgtatatactctcgatattgtgtattttgaaatacgtatttgtctaggttattcaatatcttccagttcccggtttgccacgtagccccgccatttttcaatgagctgttgaatatcctgtggtatttcggaattgaagtccatccatttgcccgttcccgggtgttcaaaaccaagggttttggcatgtaatgcttgtcggggacagagagcgaagcaattttgcacgaattgtttgtacttcgtgaatgtggtgcctttcaggatttcattaccaccgtattccggatcattgaatagcggatgtctgattgatttgaaatgagcccggatttggtgggtacgtccggtttccagcacgcattccacgacattcacgtaacccaaacgttccagcacgtgatagtgagtcacggcgtgtttgccgtagtcgctaccttccgggaatacacccatgatttttcggttagagatactccttccgatgttaccgataatcgttccgttgtcattttccaagtttccccaacatacggccacgtatttccgactggaggttttatggaaaaattgggaagacaatttggttttagcttcttccgttttggcaatgaccaacaggccggaagtgtccttgtctatccggtgaaccagtccagggcggggatcgttctctttgaataacggattccctttcaagtgccatgccaaagcatttacgagagtccccgtgtaatgcccgtaggaaggatgtaccaccatacccggttctttgttaatgaccagcagatagtcgtcctcgtacacgatatttaaaggaatatcttccggtatgacccgtatttcccgttttgggtgggggagcatcaaggtgacaatgtctttgggttttacccggtaattggattttaccggtttattattgacctgtacacattgggcttctgcagcttcctgtatttttgtgcgggatacgttgggtaaccgatcgaccagaaaccgatcgatacgcagtaaattttggccgggatcaacttccagacggaaatgttcgtacatttcttgctcttgttccggttcgtcctcgcccagttcttctaaatcttctacttcttcttctatcatggttgtagctcctcaatggacagggagtccagtgccattattttttctttatctttcgtgaggtagagcgtgatgtctcctcccatcttcatcgtcatattttcttcgaattcaggctcttgctggtatataattgccgtggattggtcagcctcggttttgatcgtgttgtcgggtaggatttcacccacgtttaagaatgcccgcaatagtatggcttttgcctctgccagtgttttccccactaatgatgggatggctacttggtcgttggacgtgttcccgttcccgagtacaatatccactgtttctcctttttgtatcaaactatttggttcgatgatgtttccctcgtatttgaaatcaagtactaggtttttgaagttggaaggaatgtattcgattcttccaacgttgagtcccaagttcttcaatcgttgcaaggattgacggaaggccacgttgcgaaggttcgggaaaataattttttccggggcattggcgttgatggtcagttggatggcccggttgttcttcacgtgggcattcggtgacgggaattgttccacgatagttcccggtttggcattgttgtcatagatagaatcgatgacaaggatttgcaaattcttctctttggcgaaaggtttcgcctcgtcgggagtgagtcctcggagttcgggaacagtaatatagtaaccatgattcgtgtatttctccaatcgattcaacacgatatacccgatcacgaacaacacgatgctggctacggctatgttaatcaataacacgatgatatgtccttttttaaagaaacccatagagtgtataacgtttgtaaatttataaaacttgccgggttcattactactgaacacgggcagtactggtattgaaataccttaactttgcaaaaatagcagagatttttcaattatcactactattttactatttttgctttgaaaataagaagtgataaagatggtaagattcattttagtatttctgttgctgggtttgacgggttatgtcggggcgcaggaaatcaagatagagaaatcgacagagaaaatcgtgtatcagggaaagtcctattatctccatacggtgaaagccaaggaaacgcttttttccatatgtaaggcttatggtgtctccgtggatgaagtgaaaatattaaatgataagagtgacaatgccctttcgatcggggacgtgttgagaattccagtggtcgaaccctttaaatctattgatgataagttttattatcaccggatgaaaccgaaagagacgctatattctctttcccggaagtttaatatcaagatgaaacgaattctgaaagataatccggagtacgatgtgagccgaccgattgcggaaggtgctgttgtgaaattggcattgaggcagattgaccgaaacgtgttggaggctgaattacgctgggaaaaacgtcaggcgaaagaggttcaacaagcccggcgtgaagagatggaaaaatacgagaaaagtcattcaaatacattcccgcctgcccgcgattcattggaaggaatggtgcagcaggttgtgggtgatactgtgtttgttattcccgaagtcgctcgtgagcaacgccacgtgaaagttgctcttatgttgcctttgtacgtgaaggaaaacaagttgcccttatccgaggaggaaattccggtggacacgctgggagtgaatatacggaacgagcattggcgtttatcttctcgtacggaacctttcctgcaattttatcagggggtattgatggccgtggatagtttgaaacggctgggatacacgatcgatttgtatgtttatgacacggaacgtgatcccaataccgtgcaacgcttggtaggggaattgaatttgttatctccggatttgattatcggtcccgtgtatgcgaacacgtataaggcagttgccgaacagctaggaaatcggacgattccgatgattttcccgctttcttcacggggaggagatttaatccgtttcccgaattttgtgcagttgaatacgtctacggtttctttggtagaagagatggcggactggattgttgcgaatggtacgcaggctcatctgataaatatcattccggatgggggggggcgcaccgggggagagagtcgtttaacggatctggtacgaactcgcttacaggcgaacgggatggaagatatgacgaattgtcaatggcggcctcaaatgcatttggattcattacgcaaggtcatgaggctgggggtggaaaatattatcttgtttccaactataaatgaagcggcggccagtcggacgttgcctgtgttgtctgccctagcagatcagttccggatcacggtaattggtttccctgattggttgaaatttacttctatcgatgaggaagtgttgtttaagttgaacgtgaagatgatggcgaatagttacgtggattatcaaggtgatgtggccaaagagttttctgcgaaacaccgggattatttttattcggagccgagtaatgtggtgaaccgggcgtttgacattgttatgtgctttatccccttggttgacatagaacgtgggaatactttgaacgtgttgcgggaaaaggatataagcggagcatttacccgtttccggttccatcccgtgagtggatttggaggtttggaaaatcggggattatacttgattaactatggtcggaatttcgagattatagtgaaaccgatagtcaaataattcagattctttctcggtgatagcataaaaaatgactataacgatacggttttatcttgtgtagcttgaaataaatcaattttgggggcttgcgggtaacctttggtcgggtattgtcgttgtcctgcataattagttgttattatatcttgaatagaatgaaaatcggggagtacggcattttttttgatatgattaataggaattggaatttactaaattaacctgttatggcagaaactacgacatacattactgtacaacaaaaatatagatctttattaaagtcatgtaagaacttgatttcaaccgaggatattcgtctcgtgcgaaaagctttcgacacggcaatgagcagcgaggcaaattcacaagcggttacagagaaagatattcatcgtttgttggatatcggattaattatcacgtccgagatcgggttagggagaacttctattatttgtttgatgttacatcgggcaatagagtccggaacgttgagattggaacagataaaaacggtatttggagagaaagtggcccagatattagctggtttacgggatataagtcatatctatactactcaccgggtggttgattccgaaaatttccggaaattactactgagttttgctgaagatgtacgggtgcagttgatttttctggcggaaaaattgtatgatttacggcatgctgagactttacttccggaacgacaacgggagttagcgcgggaaaccagttatatctacattccttttgcccatcgtttaggtttgtataatatcaaatcggagatggaggaccttgctttacgttatggagagcctgaggtgtacaaggagatttctttaaagctggagggaacacgggaggcccgtgaaaaatatatcaacgagtttattgcccctattgtggaagaattcaataaccggggaattaaattcaaggtgaaatggcgtaccaagacgatagcctcgatcttgaacaagatgcggaagaaacaggtggagttcgaggaaatctatgacatatttgcggttcgttttatactggatagcagggggccggaagagaaggccgattgctggagggcatattcgatcgtggccgacaggtacacgcctaacccgcagcgattgcgagattggatttcagtgcctaagtccaatggttatgaatcattgcagaccaccgttctcggacctaataaccgatgggtggaagtgcagattcgtacggaacggatggatgagattgctgaaaagggatttgcggctcactggaagtacaaggggggaacggcggataaggcgatcgaggagtggctgactgagttacgagagatattggagagttcggaagtcggagccgtggatatgttggatgatattaaaattaacctgcaagataaggaggtacacgtgtttaccccggcgggagatttgaagactttaccggcgggagcgacgttacttgactttgcttatgctatccacacggctgtagggtcccgttgtgtaggaggaaaggtaaaccaacgtaacgagaccttgcgctatgtgttgaagaatggggatcaggtatccatcctaacttcgaataatcaacagccgaatgccgactggttgaatattgccacgacttcgaaggctcgtaacaagattcgtcagtttcttaccgaagattcgcgggctcaggccacgctgggtaaggaaatgttggctcgtcggtttaaaaattggaagttagagttgacagacgaggtgattcatcgtttgcaacaacattataaatataagtttgctattgatctttaccaggcgattgccgaggaaaagttagatatggcggagattaaggagttcattactcgcccgaaagaagaggagcgtacggtggccaccctgagagaagaggtgcaggttattccgtcccgcccgattagtgaggatgtgttattgatcgaccggaatgtcgataacgtggtgtacaagtttgcccgttgttgtaacccggtattcggggatgatattctgggattcgtttctattggtgaggggattaagattcaccggactcagtgtaagaatgctcttgatttgcagcgtcgctacccgtatcgaatcgtgcaggcagcttggacgaatgccggtgcaacttcttaccagacggtgttgagtatcgtgggacgtgaagatgcgggaatggtgactaagattactgaagtgatagcgaaggacccgaagatcacgttacggggattgtccattaattcgagcgagggattatttgacgggcaaatcaccgtgttggttagtgatacggaacacttatcacaactgatttcccgtttaaaacgtatacagggagtcatgcgggtatatcgtcatgactctgtgaaagagtagttttattttgatttttcgtatatttgtatagttctaaatgatggagtaacacgtgataataatatgtcggaacaggatgaggtaaaatggttacagggattaagggttggggatgatcgggcctttaaagtcctgtttgaaaagtattatgcctcactctgtgcgtttgccactaatttcgtgaatgacccggacgtggcagaagatattgtacaggagatatttttcaaactttacacggataaaccgacttttgatgttgtggtggccttgaaatcttacctgtatttggttactaagaatcaatgtctgaattatttgaagcatgcccggatcgaacaagagtatatgtctttcttgaaggaacgggaaacaacgacattcttttttaaccagatcgtggagcaggagttactaaccttgttgtcagaggctattcaggatttaccggaacagacgggacaagtgttccaactggtgatggaaggtttcgataacgcggaaatcgcggagaaattgaatctctccatagattcggtaaagtcacataaaaaacgcggaaaacaattattgaagagtcggttaggagatataacggctatccttttattcctgtcgaattgttaaatttacaagaaagtgtcattcaagtgacactttttttgtacttgattgtttttagatcgtaaaagaattcaagatgaaagaagcatttgaaatagcacgaattattcagaagagtttgaaaggaaaactttctgaatcagaggaaaggcaattatctggttggagaaaggtttccgatgagaatgaacgtgcttttcaacgaatgatttcagaggatttttatacgattggaatggagaagttggaaatgtatgattcccgggtggcctacggacgtttcttgcaaaagaagtaccaacaacgtcgtaaaagaagatttttgataaatatggccagggtagctgccgttgcgttaccatttgtgattgctcttgttctatatgtagggttgaatcgagaagaagaacaaatggtgcgtccttctctagcttcaaatatccttccggggacgagcaaagccgtgttgacattggcaaacgggcaaatgattcctttaggcaaagaggctacggatagcacgattatcacggatggaacacagattagtgcttcgggatcaggggtaacatatgccagtggggtagaaagcgaatcggtggtttacaataaattggaaatacctcgtggtggagagttttgcctgacgctttcggatggaacaagggtgtggttgaattcggaaacttctatccagtatccggtggctttcggggcaaaggaacgacgggttttcgtacagggtgaggcttattttgaagtggcaaaggatgcgaagaaaccttttaccgtgcagttcatgagttcatcggtaacggtgttgggaacttcctttaatatccgggcttacccggaagaaaaacggtcgcaaaccactcttgcagaaggatccgtgaggatttacagccccggtagttcaatgctattgaaaccgggagagcaagcagaggtgagtgcgttatcgggagaaatggtaaagcaggaggttgaagtaaaaaactttacgagttggaaagatgggcgtttcgtatttgaacaacaaccgttggaagatataatgagaacgttggaacgatggtacgatattcgtgtgatattcaaggatgagggagcgaaacgaatttctctgtcgggaaatatgaagcgatatggtgatttctcccaggtgatgaaaatgttgcagatgacgggagatgtgcgatttgaattacatggaaatgatgtatatataactacagagtgaaaccctcgatggccacgaggggaggcaagtgtgtaaaactaactaaattaattaattacattatgaagaagaaccgaaataagtctcttccgggaggtttatggctagtaaagaaccgattaatgatgagaatgacgattgttttattactatttttgtcattcacggcagtggctcagaatgtcactgtgaagatgaagaatagttcatttatccaagttgctaaagaaattcaaaagcaaacggagttgacttttttgtacaatgatgcaaaagtgggtaatattacgggactgaatcctgatttcacaaatacggatgtaaaagccgttttagagtattgtttaaagaattcaggacttactttctcgatcgtggataacacggtggtcgttagtcccgtgaaattaacaagccaacagcaagagaataaacttacggtggtaggtaagatctcggatcaacaaggtctgcctcttccgggagtgaatattattattaagggaactacgctaggattcgtgtctgacgtggaaggaaagttcacggcgatttgttcgcggggcgattcgttgcttttctcaatggtcggtttcgagatgcaaatcgtggcaattaatagcaattcccctctaaacattaaaatgaaggaagccacggaggcattggatgaggttgtcgttgtttcaacgggttacacccgtttaccgaaagaacgtgccaccggttcatttagcgtggttacagctaaagaattggaaaaacgtcctagtccgaatatcatgaatcgtttggaaggtgttgttccgggggtttacgtggatgtcaagaattcggatatgacttttttgtatggttccgatcgtacggatggttatgttgatgagcagacgaatatttccatgaatatccggggaaaaagttctcttttgaacacaacaaggcctttactggttgttgacggtttccccacggatatggaaatgaagaatataaatcccagtgatgttgaatcgattacttttttgaaagatgcggcagcagcctctatttggggggtacgtgcggccaatggggttattgttattgagacaaaaaaaggtaaaaaaggtaaaggaggaacaactgtaaattttggaatgaatgtatcgacttccggttcccctcgttttaataccttaccgatcatgaattctgccgaaatgattgattacgagaaggaaatggtagagaaaggttatatcacgagacccgtgaattccgcctattcggcaggagccccgatttcacaagctgctaaattgattttggacgctaaggacgggcttattaatcaggcggatgcggatgccatactgaatgaattagctggtcgggaggcttatcgtgatgtgaaaaagtatctgttgcaaccttctttttcacagcaatataatttatcttttagtggggcgtctgatcagatgtcttatttcctttccgcatcctatgcaaacgagagatctaatatgaagggtgaagaaggtgatcgtttcacgttgacttccaacatgaattttaaaatattgaattgggctacgttgaccacggggttaagagctactttgtttaatattaaaaataatgctttaggactttccatgatacaggcatctggtggtttgatcttattaccttataatcaattcgtggatgaaaatggtaatcgagttgattactataagacgtacaatgaagattttgtaacggaaaaagaaacgttgggatataaaaattggaagtataattatttggacgaattggataacaaagatgatacccgtaaagagcaaacttttgcgatgactgtgggattgaatattccaattccgggagtaaaagggttgtcattagacggacaattcatgtttgaaaggaagaataccaagaatcgtacttttgctaacgagaatacgttcgaggctagagatctttataacacggccacgacttatgatgcaaatacgggtgcgctaacaaataatcttccgtggggaggtatcttgaacgtgactaatggtaattcccagaattacagtattcggggacagatcaattatgatggggttattgatgaaattcaccaaattacagcattggctggaatggaaatccgtgagacgagagattgggcgaatggggctagatattatggttataacgaaaaaacactgattgccggtagtcagttgccgaatccttatataaatatttggggatataatagttacttgacagatgctagtccggaaaccgattatcaacggcgatacttgtcttattacggaaatttgtcttatactttgatgaataaatacgtattgtctggaagtgtgcgttatgatgattacaataattttggtgttgaccggaaataccgggcgactccgatgtggtcaaccggattttcgtggcatattggtcgggaagattttatcatggataatgtaggatggttgaatcaattgacatttagaacgacttacgggtataatggaaatattgatccgggccagtatcctttcacgaacatatcgttatccacgagtaatgatggttttactcaattaccatcgtcaagtattactgccgcggccaatccttcaattcgttgggagaagacaggtgtattgaattttggattggattttgcagtattgaatcatcgtctttccggttctatcgaagtgtatcgcaaatattcgagagacttgtttgcagagtacacgataaacccgatattcggagcgaattctacccgatcttacacgcttactcgtaatgcagctaaggtggatggaaaaggagtggacatcgctttgaatggaatgattgtacagaaaagcgattttaattatagagccagtttaactttctcttataacacgaatgaagtaaaatcctctccttatgaactatattccagttttgcatctagtggaggaggaagtggtcgtatgatagaagggtataatatgaataacttctgggctactcgttgggccggtttggatgaagagggaaatgctctggtgtacaatgcggacggggaaattataaaatctacggagaatattacgaatgatgatttggtgtatatgggaacattgacaccgaagtactttggtggattttttaatacgttcacttataaaggattgtctctttacgtggggatcacctataagttagggtatattttccagaaaccgacgatttcacaacagcctgcaagtagatacggtggtgctaattatgaaattaatgaagatatggcaaaacgttggagagaggcgggtgatgaagctaaaaccgatgtaccccgtttgggaacggataacaatagttttcaacgatatagaggtgctgatattcatgtccaaaaaggagatcatatccgtttgaaagaaatatcgttgacttatgaactcccatctaaatgggtaaataaaatcatgcttggtagtgctaatatcgggtttactgcaacaaacctgggattgatctggaaaaagaataatgtcggtatagatcctgattttattccgaacacgagagatttgcggatggcgccgacaccttcttataacttctcgttaaatcttaatttctaaaacgtgatagatatgaacaagaaaatatttagtgtaattataggactttcctgttgtttctccgcttgttccgattgggtggatgtcaagactaaaggatcattggttccggaggagacggaaaattaccgttacctgatgaataacacggaaaatttccgctggacactttcttaccatgatgtggcatcagatgatattgatatttctgatccggctcaacaagaggcgatctatgaaacgaataaatttatcccggtatatacttgggccgacgaaatttatagccagtctgaaaatgacacggagatgaacaaagtgtaccaggttatctataattgtaacgtggtgattgatgaggtgatggatagtaagaacgggacaaacgaggagaagttggagattcgggctgaggctcttgtacatagagccgaggcatatttgacgttagtgaacgtgtatggtgttccgtataatgcagcaacggcatccacggatcaaggagtccccttgttaactacccctcgtgtagaaggggctctgccacgtgcatctgtcgaaaaagtgtacgaacaaatttttaaagatttggatgatgctttcgagtatttgcccgatgtggcagaatttaatttctatccgggtaaatgtgctatttatgcattgcgagcaagagcctacctgttgatgggtaattacacggaggcgaaaaagaacgctcaagaggcgcttaaattaaagagtacgttggaaaacctgaatgattatgttgatctggcgagtacagaggaaagtgtgagaaggaaaaattacgtggaaacattgaaagataaggaagttatttttgctaaaatgcccgtaactacattttcgatggcatcatattccacggctggccttgtgttaagtgataatctgttgaatacttttgatcaggaaaaagatttacgttatttttattttactcgttccatgatagatgatttaggtatgacttattccggtcgggtatattttaaggacaattattatccttatgactggaaaaagaacgagggacgtaacatggggccttgtgtgccggaaatgatgctaattgaggcagaatgttgggctcgcgagggaaacacgacggaatccatgaatattgtgaataaattgagagagtatcgttacgttgcgggtgaggactattcgttgagtgccgcaacagctaaagaggctttaggaaatgtattacaggagcgtcgtagagaattaacgtgtcatggtttacgttggatggatcaacgtcgtttggcaaatgatccggattttccgacacagacggtgactcggatattcaagggaacgacttatacattagaacccggtgccgtgcgatatactttcccaatgggagaaaaatatttggaagaaaatccggagatcggacaaattaaataagagttcgtaaggttcataaagttataaggtttataaggtcctttataaactttgtgaaccttaccaactttataaattattaaatcgtattgtatgaaaaaaatcacgttgttaggaagtatcgttgtacttctgttatttacttgtgtggttaaggcacaggatcgtaaaccttttcacatcattccattggtgccggttgccggtcaggatgtgaagttcacgtatgataattcgctgacgtcactggctgatgaggaaacgatttgcggaacggtttattactgggaaaatttgcgttggagggcggaagatttgaagttggtgaagaatgatacggcatgggaggccacttgtcgtgtgcctaaaaattgtgcgttggtatcatgtaaattttacgctggggacaaaaaggatacagggggacggtccacgtacacgacaatgacctttaacaagaacgggcagaatttaccgactgcttatatggcgtggggaatgttgcggaacaagacgttggagtctttaccggaatattgtgacgaggatgcgtatattgatgatgaagttatgcgtttttggctgaaccaacagcttttgaaagatcccggagcccggaaatacgtattctattatgcggcgaagttgttgaataaaatgatgccgggagaaaaacatgaacagatgttgggagacgtggattttatactgaatttaccggatgtggatgaagagacgttgttgaaggcacttgaagttgctaagaatatcgtgaaagacagtacgaaagcggcggcagtagaaacccggattttaaaagattacccgaacgggattttggctagggaccaagagatatggcggattttcagaatcatggatgccgatgcgaaagctcctgaattagacgctttcctgaaacgtttcccgacggaaaagtttaaagatatagagacggaaacatcatccatgtatctgggtaaaatctttcaagcggtagtttatcagcccatcatcaagaaaaatgattatagtttcttgtacaagtaccttcatgatgttccccatctttgtttgctgactttctactggcacatggtacaagtgccgttgaacacgaatcagagaaccccggaacaggtgttaccttttgctaaggttatttacaatgaggtgatgactcgtcctcaagcaggagctgatcaagtgtattcagaacgggagtggaaggattatctgctcacgagggggaaagatatgattctgaaacatgcgttcgtgttggatgctaccggttcttctgccgaggcactggagttgatggaagaaattaaaggaaaatataatttcaaatcggcagaatataacaatcagtatgttcgtttgttggaaaaaaatggctatcagtcgatggtaattcccatgattgtggctagtgttcgggaagatgcggttactcccgaaatgttggaaatcttgcggaaggattacgtgaaacaacataaaaacgataaagattttgaggcttatgtcagttcattgaagtcgcaagaaaaacaacaggagttgcaaaaacatttgcaggaaacgatgattaacgaggatatagagctttttgctatggaagatctggacgggaaaaaggttgatctgtcaaagatggaggggaagattatcgtgttggatttttgggcaacttggtgcgctccttgtaaggcttctttaccaggaatgcaaatggctgtaaacaagtacaagaatgacccgaacgtggcgtttttctttatttccacgatggaaacggctgcaaattttaaagaacagattcggaaattcatgaaggagcataactacacgctgcaagtgctttgtgataatgttaacccgaaaacgaaaaagcaatcggctgtttatgatacttattgcaaggcttttaaattttccggtattcctcacaaaatgattatcgacgggaatggaaaattgcgttggagtattggtggttacatgggaagcccctcggctttggcagaggagatgaatcttatgatcgagatgttgaaagcggaataatcgataagattcatttgagttgttaggatttagaacgggatgaacgaatccctgtctaaatcctaatttttatccttaatccaactgttttcaaactctgataatatccatttaatggcttacagacgagatatagatgaattaaagccgagttccagtcatagggttgttgtttcttttgtttttactgatattcagatctaaaatcgttataattgaaaagcatcacctaaattctacgttttctcgtagccaatcccccatgatttgcaaggcttcctctgaaaacacatcttccagatcgggtatttcttctcgggtacactctttacagtgttggaacatatggttcagaccgggtagttccacgattttgtaccgtgtgtttccacctttgtccagtaattgtttgatggattccaggttttctttggcgggaaccatgatgtctttgtccccgtttagcgccagcacgggtttacgaatgcggggaatataattttccggatcataattgatcatttccctgtaccagcgtccttgtgcttgatgcaggtaacgactgaaaaacatttcgtctcttccgtcattaaaattgacagctttcagtgtggcttcgtcctgttgagctacccattgatcgaaggcttggcgcaagggaatatctaaaggttgttccaaggggacagcgtgtactttgtcaaatagcgtgttgaagagactcataaactgatccacccgttccggggtcattccgggggtggtacgcaagattgctttattttgtaattttagaatctgcaggccatcaactcccacgcccgcgagggagataacgaatgatacatccggggagtcagctcccagcatgagtgccacttgtccgccttcgctatgtccgataaccccgatgtgcttggtgtctgtttccgggcgttgtttcaagtaatcgatcccggcttgagcatcccgtgcaaaatcgcacgtggtagcttcttcgtatattccgttggtttttccggttccccggtcatcggttcgtaacacgatgaatccttgtcgggtgaggtagtccgcgattttgaagaagggtttgtggccggaaaaggttccgtctcgatcttgtttcccggtgccggatataatgatggccgcgggaaaagggcctttgcccgatggaatggtcagcgtgcctgcaacttgtattgaatcgcatgacacgtaggtgatttcttcggaatggtagggataaggtggatgtggattttgtgaaaaatagataggccgaaggctatcgactttgccgagagtgaattctcgtatcttcccgtaggtggttacttctgcttggatggagtctttaccggaatggaaggctccttcaaagcgaatgttttcccggttgaagatggcaagaatactttcgtctgaaagtacaagcgtgtcggcttgtgctttgtcaatccattgttctggaagtgacaggaaagcttgaggtgttccttccggtgtggtttttaactcgatgaatacccgtttgctaccggattgtccttgccatgcatgaggcgaagaggtacatcctagcagcgtaacggagaataacagtacaatagttttaaggtgtaacatacagttttaattttagttttctctcaaaacatctaactgcttgaaaagtgtcacgtattagtaaatttcttactgaatctttattttcaattctccattttcaattgtttcaacgtaatgaccgtgatttctggccatgccccgaaacgcaggggcatcagtccgatataccccaacccgacgttgacatacaaaccttgtttgccttccatgtagagcccactccattccggatacatgaatcgggacggggaatgtcgtccgacggcaaattgcatggcatgcgtgtggcctgacagcatgaggtcgatgtccgtgtcgagtacttcccggcgccagtgcgtggggttgtggcttaacaatagtttgaaagagcattgttccgtgccttccatggctttgggaaggtcgctgtattgagagaagggtggttccccgttattttccacgccaatcagggcaatgctatccgtggcacgttttagtatcacgtgatcattgtttaataactgccatcccatggaggcctgcttgttttgtacatctcggatgttctgatctcgggcctcggttgtaggccaattgtgatagggaccgtaatcgtgattcccgaggatggagaacacgccgtccggggctttcagttgtgccagaatgttttcgaatggttctagttcagaggcttttgtgttgacaatgtcacccgtgaaaacaattaaattggtttgctgtgcgttaatcaggtccacggctttttgcagggctgcccggtctccgttccaactacccgtgtgtatatcggaaatctgtgcaatgcgatacccgtcgaaagcggcaggaagattaggagaggcgaacgtgacctgtttcacgtcaaatcgtgttttgccccatattgccccgtaaagtaccatgagcatcattccggttcctagtatgatcccgagccagctaaaaggttgtatttgccatttgaacaagtattttaacggtaaatcaagtagcgagcaaatcatgaaaatggttttcggtagtacgatggccatataggtgatcgtgaaagttccgatgaggtgttgtatggccagtgcatctctagaggatagtagaatccagacgagtgcgaataataggatcacggaaggaataaaccacagccaaccgaacggattgcctcctgttgatttggtgatatacgatttataaatatagatgtccgggatgattagtagcaagaaaagatagatagatagtttcgagagcatatattttctatttttgtgtaagtggtgttattataatttgtttcttgttcctacaaagttatcatttcttttcacgtggttctcacgtacaggattttttatctttctttggggaatctttaaaatattgtttgttttcaaagagaagcttgccaacttaatcttaactctttgttcccattggatgaaatttgggtgaaaatataggaagaacagataattttgcggaagatagaaggatgtggataatgtatgtaaatataattattgcgttatgattaaaagtgttatgagattatttcgatgaatttcagttgaagattttcgtaaaaaggcggaggttggaatgttaaatgctggtggtatgggataaataattttgttcttttgtggtttatattaaagaaatatttacctttgccttgtcaattcgagaaataataagaaagtgtatagcacatgaaggaataagcctccgggagtgtgtatacactttttttattaaatccgagttgacattccatttaatgatccggaggcttttttggaaaacgttttttgaaaatatatagttacatataaatgtaatattttgaattctaatttgtcgacgagggtgaaagtaccgtgatgggaaatcatcctttttgcatttcttcactttaagaaaaatttaaaacgtttgaattttgcatccataaagattcgtcttatatttgttaacgaaaaatagtgcgtgatctttcgatgatctattattatttacatgattaaaaacaattacacatgagaaaaacagtattggttatttttagttgctttctctccctgttatttgttcctaagacttacgggcaaggacaggataagttgctgggacttctaaaagaagagttagctcaacagatgaaagaactaaagggtgaagaatttcccccgtatcacatgaattacagggtgattgatgtgacttcttccgtggtatcggcttctttcggggcgttgatgaacagtcagcaatatcgctcccggacgttagttccgcagatccggttaggagatgagaaacttgataattttagatttaatcaaatgggagcggccatgtcccgataccaaggaccttccgtggctcgtttgccattggatgaggaaaataacgaagatgccgttcgtcaggctatttgggacgaggtgaacaatcgttacaagtttgccgtggatatgtaccagaagacgaaggcagaaagctctgtaaatgtggaagaagaagataaagctccttatttttctgaagcgaaagtggagaaatattatgaggctccgcttccagctgaaaaaatgacgatcgatatggatcggtgggcggcccggatgaaagagatttcagccgtgttcaaaaaccaacccgggattatgaaaggggatgcgatcatgatttacacggtagagagacgttatttcgtgaataacgaagggacggaagttgtacagaatctaccgtatgcccgcatcatggtatttggagaaacaaaagctgatgatgggatggaattacctttgaacttgtcttattttgcctatgacccggcagatcttcccgcgaatgataaaattattgcggatgccaaagagatggtgaaaacattagaggctttgcgtgtggccccggtggttgatccctatacgggaccggccttgttgtcgggtcctgccagcggtgtgttcttccacgagattttcggtcaccggatcgagggacaacgtatgaagagcgagaatgacgggcagacgttcaagaaaatggttggtcagctagtattgccggcagatatgcacgtgtatgatgatccgactcttcggaaatatgctggagaggatttgaatggattctataaatatgatgatcaaggagtaaaagcagaacgggtggatgtggtcgttaacggtaaattgaacgattttttgatgacccgtactccgatcgacggccatcctcgtacaaacggtcatgcgcgtgccagcgatgggtttgatcctgtttcccgccagtctaatttggtgatcgagacttctaacccgaaaactcccgaagaattacgccagttattgatcgaagaggttaagaaacaaggtaaagaatacggttatttcttcaaagaggtaacgagtggatttacattcaccggtaaaggtgcaaccaattcgttcaacgtaaccccattggaagtatataaggtgtttgctgacggtcgtccggaccagttggttcgtggcgtggatttgatcggaactccgctttccatgttctctaatattatatatgccggaaatgatgcccgcgtattcacgggtatgtgtggtgctgaatcgggttcaattcctgtaacggctatttccccgactatcttggtgaataaggtggagacgcaaagaaaagcgaaatctcaagatattttaccgattttaccggctccgggaacgaaataaagatgtggaaattataaaattagaaagatgagatatatattatcactattaatatttttcctgctggtagggccagtggtggcacagaatgagcaagatcaagtgatcttcaaggcgatgcaggatgaattacaaagaaataaagcagaattggcattgccgggaatggataaaccgttttatttgtctttttctttaggtaggttccgccagtttgaagttgtcggggagttgggagcgatcacgaattcactggaattgccgtggagagggataggctcgtctcagttgttgttgggtgattataataacacgaatgatactcgttttgtgggacaattcatgaaggttgggatgccggccgaggcagattatgacatgattcgtcgtaatttttggttggtatccgatgcggcttacaagatggcattgcgtgaagctgccgctaaagaagcagctttgaagtcaaacccgcaaaccccggaggaggctcaattgccggacttggtgaaggctgaaccgatcacgaagatcgtggaaagcaaggttccctatgaaattgatataaagaaatgggaaaacacgattcgtgaactttctgcgatattcaagaattacaaggaaatttacaattcatccgtgggtatcagcggtttggatatggaagtttacaagcagaccagcgaggatgtaaccatgaaacaaccggttacttacgcgaatctgtttgcacagggatatgtaaccacggaagacggggtacggatcggggatgcgctttctattttggtcgctcgtccgcaggatatgccttctttggaagatttgaagaagaaagtaactgcttttgctgaaaacctgatgaagttgagaaatgccccggtagttgaagaattctattccgggccggttctttttgaagacggggcgtcttccagtatcttcgtgaataacctgttgaatcaaggcggattatttgcttatcgtaaaccgatcggacaagcgggaggcagaacgctggaaggtcgtatcggaagaaagattattgacaaccgtttgaccgtgaagaactacacgagtttggataaatatgacggaacacccttgttaggtgcttacgagattgatgcggaaggtgttattccggaaaaggaaatgacgctggttgacaagggaatcttgcgccaaatgttgaatggtcgggtaccttccttgaaaactcaacactccacgggtagttctcgtttcgtgatgaccggaagtgatattgtttacactacggctccgggaactattcatatccaagtagataagggaactaaacaggacaagatgaaaaaagcattgattaaggctgccaaggatgaagggttggattatgcttacatcgtgcgtagtattgccggaccggcatcccgtatttacaaggttgacgtgaaagatggtagtgaaacacaagttcgtttcggtgatgtttctgccattaatttggcgaagatcaaacgggtattggacatttcaagtaaagagaatgtctcgaattatattctaaatcgtcaagtgctttcttctttgatttatccggcctcggttttgatcgaggacgtggaaatcaacaagtctgaaccgaagaaagagaaagaaccggtcttgaaattcccgttgcagagataatgtagccgggtgattgactttataaatattacaaaataggggtatgtcgagaaagacatacccctttttattgtaatgttcactgggaatgaatacctttgttcagtaggtcggttgttactttttaagataataggtatgacatttgaaaatatacgtctggtggcccgttacgagcgaaacctgatcataagaaataagttgttttggatattcgcttgttgtgtagttgcgggaatttctctttcgcactggctatggcaaagcgattcattaagtgggctcaggtggttaaacagggctttgccttcgtttattcctttttggaatgcttggttttataatttggtgcaaggaattatcgtgatttttatcggtattgatttcgtgtggcgggatcggcgtttagagacgaatgccgtgttttcagcccgtccggtgactaatttggcttatcaaacgggaaaggtgttggggatcgtggaggtttgcttggtgctgaacttgataacgatgggattagggatgattttccacatcttgttcggggaaccgggaactttccagttgaagatttattttgtttacctgttcgtgatgaccttgcccacgctgtttttcgtgttgggagtcgctttaatcgtggcgaaccgggtaaagaatcatgccttggcagtattggtattgttggctgtatttgctgccttttatttcggcaccacggatttcttgtgtggtactattgacccgtggggacgtgtattaccgcttttattctcggatgtgacgggaatgactcgtctggaatggattattttacaacggggaatgtttgtttttctggggtggggacttgttatactggctatgggaatgatgccgcgtttgtcggaacgggcaggtgttacgtggaaagtgagggccgggggatggacattcctgctgatcggcatattgttcggaggggcttattacggtatatttcacgagataaataatcgaagagacctgtaccgggaggtattcgaaaagtatgcggaagtgaaagggggacacgttaaagcacataatatctattttcgtcaggagggagataaaataatgggggtaagtgatctggtcgtgacaaacgtgggagtgcaacccttggctcaccccgtgctttacttgaacccgggattagaggtgacggctttgacaggggagcaaggggagaatctgtcttatacccgggaatcccaagccatccttttggagaaagcgttacagcccggtgaagaaatccttttacatttggtttacgaggggaaaattgatgaggcaatttgttttccggatttcacaaacgaggagtttcatgatacccgcttgatgagttttttccagacgtatcattcgatgttccgtcacggtaggtgttttgctcgtgtcggggatgactatacgttgcttttcccggaatgtttgtggtatccagttgccgtttccccggtaaacgtgagcgcccctttagctcgtcagtatgattttacccgttaccggttgaaagtcggggatattggggaacgagtggctatctcgcaaggagaaatggagatgagtggggacactacggtctttagaaaccgggagccattaccttctctgagtttgagcattggatcgtacgagcgaaagagtatcgtgttagactcgttgacgttcgagttgtatcatttcccaggacatgattttttcatgcgggattacatgagtctgaaggattccgccgagttccttctggaagaaccggtaagtatgatgcgggaaataaaggggggtgattatccttttcgtaagtttactttggtcgagactccggtgaattttgttccacgccaacggaaagggtttacgggaagtcaatttgtacagccggagatactattttatccggagagaatgtacttgggttattatgcgcacgtgggcttttggccgggagatgaggatgaaaggactcgtttcgagctggaggtggaggcgtttcgtaatttattggtcttgaatttacttgcgggtgtttttgattgttcagttctctttggtgatttcgggggagttctacaatcggatgaatatccgggttttggaggtatcgtgaacgatttagccaaagtagatttttctaacgggccgatggtgtacgtgggagaagagatcagttattctgagattgtcacttattggaagggaaaatccatgcgtgaggctttcgtggatcaagaggtgaaaggggagcaattacagaaactattgaggaaaaaatatgagttgatccaaaaacatttgcaggcacttgtcggggagcgggaattattcaattttatgaaacaatttaagcaaagtcatttgtttatgcgacctgatttcgaagagcttgaacgggagtttaatactcgttttcatgtgaatcttcgggagatcttggattattattacgaggggaaggagttaccggctctatttattcgggatttgaaagtggaattgtatgaagaggacgaggagactaaaaatataggtagctgtaaaatatataatccaacttcggttccggcagtcgtgacgttgagcgtggcaacgtattccatgggagataacgagatcgggtccgggctgcgtaactatttgattccgggacatagttgtaaagagattcgggccgatttgggtatgcgtgatgttttcgcgttaggaatgaatctcagtcagaatcttcccggggagaatatcttggaatggacttcatcaaaagatttgtcaaaaacgaaagatgggaaaacgggtatttgggatgtggatagcgctatttttaccgggaaatctccgggaatgatcgtgaatgccgaggatcccggttttgttattcatgagaaaaaacggaaagggaaattggccgcttatttctcgaaggggaagaacgagaaaaagtatagttacgtgtatgaccacgagcattggactttgactacggatagccattgctacggggatatcgtgaagagtgcttattataaaatagccggaaccgggaaatctaaggtggaatggaaagtgaacgtggagaatcccggaaaatatgaagtttttgtttatgttccggacgtggaggcgacttcggcccgtaaggtttttatcgggggtgcgagacttttttatcaggtgacatccgcggatgacgtcacggacgtggaagtattgttggataacgaggaaccgggatggatctctttggggaaatattattttgatcgtggtgaatatagcgtgtttttgagtgaccggggtggtgattctttgacgtgggagaatgatggcacttatacgtgggaacgagatgccgtgcagttgatttttgccaatgccgtgaaatggataccggttaatgaatagaaatgtggtgttctttaatagatagtaaaagggaaatagtacttgttaactttttggcatccactggtttcatgatataggcgttacacccgcacgagtaagctgtttgtttgtcctgttcgtaagcgtatgcgctaacgacaataatcggaatatcctggtctatttcccgaatggcttgcatggctgtaagtccatccatgtgtggcatttttatatccatcaatatggcatcgggaggaaaattcttgaatagttggatggcttcaattccatcgtgtgcatgaatgatttggtaatctcgttttaataaagcgaataaaagcaagtagttactttcatcatcttctgcaataagaattatagggcgtttctctgattccataaggtgtttaacgctattcgtgttgtaattttgtacattcaataaatgaacgtttattatgtctcgtttattgagctaccaataaaatgcagattgttaatttttatcttgcttttcatttgatcatgagaaatttaaaaaacaagcaacatagctaatatgaagtaaaaaatacttatatttgtacattcaataaacgttcgtttaatgatatgacttccatgtcagaaattgcatccattttgtttcaattctccggtgattcattatttttgtatggaagtaaaatcgtgtagatatgaaggccaagataaataagacgaatgctgttcgtttactggataaagcgaagattgactacgagttaattccttacgaggtggatgaaaatgatctggccgcggctcacgtggcggcacagttgggggagaatatcgaacaggtgttcaaaacgttagtactgcatggggatcggggtggttactttgtttgtgttattccgggtgatcatgaactggatttaaaagtggcggctaaagcgtccgggaacaagaaagcggatttgatcccgatgaaggaattgttgcccgttaccgggtacattcggggaggttgctcgcctatcgggatgaaaaaagagttccccacgtttattcatgaaagttgtttaaagttcgaatacatttatatcagtgcgggtgttcgcgggttacaaatacggctgaacccgaaagatttaatcacttatacccgggcgacgttaataagttaaaagttaaaaactaaaagctaaaagttaaaggagagccaacttttagcttttagtttttagcttttagttcttttatcggactggaaatgcgattgtgaatttacttcccttgccgatctcgctttctacccagatttttccatcatgagcttccacgaaatctttagaaatggctagccctagcccgctaccttgtactttagtccccggaacccggaaatagcggtcgaatatactttggtggtatctgggatcaattccttttccgaaatcctgcacgaatatttgtatggtctggtccacttccttggctcccacgatgatccgggaattctctttcgaataatggatggcattggagaggagattcgtgatcacccaggctattttttcactatctacaaatagtttgtgaatcttttcgggatattccacttcaatattacacccgaaacgttcggcaagtacccgggtggctgacacggcataattgattaattcgatcggtttcgtgatcttcgggcttaaaatcagctttccggtttccacttgggtcaacttgagcagttcccccgtgatgttcaacaaccggtcgctattttcttttatgctactcgcgagagattgttgctcgtcgttcaagctgccgatccgttgatcttccagtaatttcaagctcatcatgatggctgaaatcggagttttaagctcgtgcgagatcgtggagataaaagtcgttttggccgaatcgagttctttgaattccgtgatattctttaacaagatcacgttgccgacctgcttttctccctcggtttcggtctccatcaatttaatcggcacgtagacggcttggaaaaaactctccttgtcgtcggcgtatatctttagcggctcgtgcttttcgtttggatgtaccagttcgcgaataaggcggcgtaacaagtcgttctttaacgataactcgtcggctgattggtgtatcatctgttcccgtttgaggtttaacacggtcaaagcctcgttgtttacgaaaagaatttgccggtcatgatccagaccgataatcggttcgtgaatactgttgacgatagcctccaggtattttttgctggataacagagtggccagtgaactttgctggtattcttccagacgttcggccatgtcgttgaaagaagttgccacttcgttaaattcccgtgtagagtcaaagtgcaagcgtttactgtaattgcggtgggcaatttccactatcccgcgtgtcaactcgctgatcgggcgggtaatttgcgaggggaacaacaggagtagggcgagggcaatcccgacgctacatatcccgataatggaaatccataacgtggcctgccgggccgtgtcttcggcaatcacgctattgcgttgaatcgaggccatgttcaggctcatgatctggttcaaatccagccggagttgccgtatgttctgttcgctgggattctcgtctagcaatttaaaatggcgggccaagcggtcggtggcttccgactcgttgatttccgtgatattcagtctctgtttttcgaggttctccatgaatatattcaacgcttcccggtccgtttcaagattatcgagggcataaagcatacctttcgcgtaatcaagcgaattgtagttatcggataggatatttttcgtgtcgtcggccagtttatcaatgtaactgatcgccagaactccgagtagcacgatgatcatgaaaaggagaccgattcccgatgttaatttcgtttttattttcatatccctaaacttaattcgatttaatgatattttcaaggatttttccgagtttatgaaccgaggatgattaaatctatatttaatatagccagattattcaataacctcttgtatcgaagggcagaacgcacgtacgagaacaactggatgttgggttttcccacgcaaaccgtgctaatctgcctttcccggcaaatattgatgatggttccgatgatgtcgtccgattgaatttgaagtacctctccgcccagttctgatgccagcttgaaatgattgatcaggtaacgttgcttggccagtgggatgcggtcagcgctttcgtggcgggtttgcacgtggaggaccacgaatttactattgtaatgggtggccagacgtgctactttccggatgagtttgcggggtgtcttttcctggctactgatacaggctaagaaacgttcatggcgcaggccgatattttccactacctcgttttccacctttttctccacccgtagggcgacctctttcaaggctagttcccggagttgaaggatgttttccgctttgaagaagttacgcagggccagttcaattttatccggtttgtaaatctttccggcttttaaccgggagatcaattcttcagcggttaagtcgatgttcaccacctcgtcggcctgtcctaacacgctatcggggactcgttcttttacctcgatcccggaaatgtcctgtacctccccgttcaggctttcgatgtgctggatattcacggccgtgataacattaatccccgcgtccagcaagtcaagcacgtcctgccagcgtttctcgttcacgcaaccctcgatattcgtgtgggccagttcatcgacaatcaccacttccgggtgtatttgtaaaatggcctgtaaatccatctcttcgacttccttgcccttgtaaaatagttttttacggggaatgacgggaagtccttccagtttggcagccgtgtcgacacgaccgtgcgtttccacgtaacctacttgtacgtcaactcccgcggtaagcaaatcatgtgcttcccgtaacatccggtaagtttttccgaccccggcaatcatgccgatatatatctttaaatgacctctcttagcctttctgataagactgaggaagtgttcaacattctgttccttgtccataacgaccaacaagatagcaaaaaatatgcaagatgaatattgtttgatatatttgtttgttaatctgtgctttgtcgtgacttttatcggttcggtaaacgataaaaccttttcattttggtagggtatttttccaaaatggtaaccgtgtcgatattatattaataatcattctaaataatttggtctgctttttgcattatcgggactataaactggtattgcaatgaaaagagtaattttatatggaatagtactgtttctatgcgggtgtgatttaatagagtatcatccatacgatgttcgtttacatggagagacgggtgtaaacgcgaagaatatagctcgtatagaagaaatctgtgaggggaaagacaccttgcggttcgtgttaatgggtgatagtcagcgttggtatgatgaaacggaagatttcgtgaatgccctcaacaagcgggatgacgtggacttcgtgattcatggcggggacatatccgatttcggcttgacgaaggaattcatgtgggtgcgggatattatgggaaagctgaaggtgccttacgtggccttgttggggaatcacgatattcttgggaacgggatggatgttttcttgaaggtatacggggatgagaatttctccttccgggcggggaatactaaatttgtttgcatgaacacgaatgccttggaattcgactactcgcatccggtgccggacttcaccttcatgtacaatgaattgcaggacacggtgggatgttcccggacggttccggtgatgcacgtgcaacctttcaacgtggagttcaataataacgtggcccatggttttcatctcttgttgcaggagtttccgggagtggaattctgtttgcacgctcacagtcactcgctacttcataaagagttgtttgatgacgggattccgtatatcggttgtgccgcgatgaaagataagaattatttgttattcaccttaacgccgggaggatacgagtatgaagtggtctattattaggggcgggattataaccatgttcatgggtatgacaacaatcgtgttcggaatgacggatgatgaccgggaacaacgacgggcagaacgacatcagcgtaaattggaacaatataaatccgggtggaaccgtctgatcccgaagtaccagaacgtgcaatatgccggttccatgggattgctttcccttggcgttggctgggattacgggcgaaaaaaacagtgggaaacggaggtcatgttcggcttggttcctcgtttttcttccaacaaggcaaaagtaactttcacgttgaaacaaaattacgcgccgtgggaggttcgtcttggcggcaagtggtggttggaaccactggtgacggggttgtacatgaacacggtgttatccgatgatttctgggtgaaggaaccggaaagatacccgaataactattataagttttccacccgtgtacgctttcatatctttaccggacagcgaattgctttcgatcttgggcctcattctccctttcgtcgaatcactgcattttacgagttgagtacctgtgatctttacgtcatcagtagtgccacgaataaatacgtgagaacgtgggacatcctgagtctttcgtttggcgtgaaattgcatatcttgtaattatttctcgtatatttgttgaataatgtaaacgagaaatagcatgaaaagagtatttgtatccgtattttttgtcctcgtagcgatgatcatgaatgcgcaggatattgccggacattggggtggaaccttgaatattcagggggtgaaattaaggcttgtttttcatgtttcccgttccggggattcatggacgacgacgatggatagccctgatcagggggcaaaagggattcccacggggaaaacggagtacgcggatagcgtgttgaccattacggcaccggcccttgggatgaaattctccgggaaatggcaggggaccgataggatacaaggaactttcgtgcagggcgggttgacattgccgttggaattagcgcgagtggatggagaggtggctctttcacgtccacaagaacctaaacctccctatccataccgggtggaggaagtaacctttgaaaacacgaaagcgggtgtgaccttggcgggtacgttgactttgccggaaaagggcgagcattacccggttgtcgtgttgatttccggtagcgggccacaaaaccgggatgaggaactgatggcacacaagccttttctcgtgcttgccgactatctcacccggcaggggatcggggtgttgcgttttgatgatcggggagtggggcagtctaccgggaatttcgggaccgcgaccacgcttgattttgccggtgacgtggaggcggctgtgaactttttgaagaatgatcgaaagatacggaatataggacttatcgggcatagcgagggcgggatgatagctcccctcgtggccagtcgttccggggatgtggcttttatcgttctcttggcaggacccgggttgcggggtgaccgtattctactggaacaacagaaagaaatgggaaaaataaccggggcaacgggggaggatttggaatactcgtcggtcgtgaacaggaaatgttttgatctcgtgctagagagttcatccagcgaagaggcagaagtccccttgaaaaaatacatggatagtttgaaccaagccgggaaattaccggtaaacatgagagatgaacggggtgccgaactttggcgtaaacaagtgttgtccccgtggatgtattttttcgtgaaatatgaccctgttcccgttttgaggagtgtgaaatgtccggtactggccttgaacgggagtaatgacctgcaagttctgcctgaaaacttggggatcatcaagaaaggtttggaggctgggaaaaaccggagcgtgaccgtgaaggaattacccgggttaaatcatcttttccagacttgcgaatcgggttcacccgctttatacggcacgatagaggaaactttctcgcccgtggctttgcaagagatcggggattggatcaaggggaaagggttttaaatttatgattttaaattttagatttatgatttatgatttccactcacgtgactaacgctttaactaccccctccggctcccccttacacagggggagagacggacgcgagaagacgtttcaatataacaatgcagcctgtcctccccctttccaagggggagttagagggggttcattctaaactctaaattctacattaaaaaaatacaccatgcgatacctgcgaccattttgccatatgagattccgcttcccgacactccgacgtttgctctgcatcgggttgttgctgctgtttgcgacctcgaccgtggaggcacaacggaaaaaagtgggcgtcgtgttaagtggagggggtgcgaagggcgtggcacacatcggcgtgttgcaagtactggaaaaagcgggaatccccgtggatgtcatcgtgggtaccagcatggggtctatcgtgggaggcctgtatgccatcggttactcggccgatcaactggatagcctcgtgcgtgtgcaggattggatgttccttctaagtgataaagtgaatcgttatgacctgcctttcggggagaaggaacaggatggcaagtacctgctttccctcccttttgaccgggggaagaagcgtccgtcgggttttatcagcgggcagaacgtgtataatctcttttccgatctcacgatcggttatcatgattcccttgatttcctgcaattgccgatcccgttcgcctgcgtggcggcagatatgttccaccgggaagagatcgtgatgaagggagggaatctcgtgcaggcgatgcgggcgagcatggccattccaggcgtgtttaccccggtgagaacgggtaaccgggtactggttgatgggggtatattgaataatttcccgacagacgtggcccgcgagttgggtgcggagatcgtgatcggggttgacgtgcaggccgatttgatgaaagaggataagttggagtctgtttccggcgtgatcccgcaaatcatcaaccttctctgtatgaacaagcacgaggcgaacgtgaaacttgccgatctggtgattcgtcccgatatgaaaggatacacggccgccagtttcagcgcccgctcgatcgattcgctactggcccggggaaaggtggcggcactgcaacaatggtccgagatcacgcgggtaaaagaattgatcggggagtccgggaatgtggacaacgggatcccgaaagcccgtcaaccggggaaaattcctatccggaacatcattatccggggactgtcctcgcgggaggaaggatgggtgcgccggaagatgcggatagaggcgaatagcgagatcacgctcgatgacatccatcgtgaaatcgcgaccctgtacggcacgaaagcattcgtggcggtgaattaccggttgctggggacagctccccacgatttggagttaagtctgaaatccaatcccatgagtacgctgaatatcggtttccggttcgattcggaagagatggcagccatcttgttaaacacgactttcaacaacaggagcctgcgggggtcacagctggcattaaccggacgcttgagcaagaatccttacgtgaagttggaatattcactggaaaataccttcttgcgagggttcaacctcgcctacatgttccgctacaatgacgtggattattaccggaaggggaaaaagacgaataacgtgacttatcgttaccacatgggtgaactgggattatccagcttgtacctgcgtaactttaaattcaaagttggggtacgttacgagtattttgattacaattccttgcttttttccaacgaggacgaggtgatgagtgttcgtcccgagggctttttcagttattacggggtggcggaactggacacgtacgatcgtcggttttatccctcccggggagtctccttggaggccgcttactcgttatacacggataacttggcgacgtatgacgggggatcgccgttttccgccctgtcggttcgtttctgcccggttgtatccctttccgaccggttgaaagtgatcccttccgcgttcgggcgggtgttgatcgggcatgatcctgcctattcttattttaataatctcgggggaacggagtttggacgttacaacacgcaacagatgcctttcgtgggcattaatcacgtggaggtgttcgagaatgccgttatcgtggggaaattggaatttcgccagcgcatgggacgaaagcactatctttctgttatcgggaactatgccctgcaagacgataacttctttgatctcttcggtcgtaaagggatatggggcgggggaatcggttattcccgggattctatgctgggaccggttgatctggtctttagtttctccgactggtcggaaaagttagggtgttactttaatctgggattttatttttaatgtagaatttagaatgccctactcttggaatttaaaatctaaaattagtaaggccccgtgtggctggaatcataaatctaaaatcctttccccttgcaccactccccgatatttctttccttcgggtcgaagttaacgccgattttgactagtttccggtcatcggcggtgtaagggatgaggtagccccggttgtcaatctgggcgagggcctcgtcggcggagccgtcaagtttgaactcgaagacgtagatgtagtcgtcggttttcaccacggcatcggctcgtcccttggcacttcgtacttctgcctcggagaattgtcccatgagtttgaagacgagatagaaaacggtctggtagtggcgttccgtgcggtcgttcagctcgtagggaatcccggcgaagaaggcccgcaggcgggtaaggaaggcgtcgggatcaccttctcgtagttcccggatgaatttgctgatatagaaacttgtctcggtttcggccacgggggtgtagaaaggggtgacgaagttgaggaacccgtatttcacctcgtcgttggggaaccctagggtatatatctgaaaacgttcgtcataagccttgatagtgaggtaaccgctctggtagatcatggggacggggttgttgatgttggcccggtcggcggagagtgacgcggcggagacctctatgccgtcgagttctcgtaggttgaagtcggttttcttcagcatctcggcgaggaaggtgagggtacccgtggcgaaccagtagtaatcgaaatcgtggaaggtcagcacgcataacaggccgaaggggttgaacacatgggcaacgttgcccgggctgaaacggtagccgtcataccggcgggtgagtcgcgcaagctgttccttgcggggaaggccgtggctttccatcaattgcttgatttccggctcgaagttctcctcgatctcttcccgggtgatgccgcaaagcgtggcgtagtcaatatcgagactgatgtcgttaagctggttgaggttactgaatattcccatttgggcgaacttggtaacgccggtgatgaagacgaatcgcagccactggtcggcacttttcagcacggagtagaaggcggttagcgtgtcgcggaaggaacgttgcaggtcctcgttttggaaactgttgagcagcggcttgtcatactcgtcgatgaggacgacgacacctcgcccggttttctcgtacgctctttggatgacttccatgaatcgcccggagtgggtgatgcccttgcctcccgttccgtacgtttcttcccatccccggagctggaattcgagcatgtcgtgcaaccgttcgggcgagtcatatttctcggcgttgaggtcgagatgcagcacggcgtgggtgttccattccgtttcgagccgttcgatggcgaggcccttgaagagggcgcgcttgccgaggaagtaggcttccatcgtcgagagcagcaggctcttgccgaagcggcggggacggctcaggaagtaagggttcgaggtgctaaccagcttgtagaccagttccgttttgtcgacgtacacgtagttttcgcgacgaagtttctcgaaactctgtatgccgatgggcatcttgcgggggaaggacgatggtttgttcatgaccgttgtgtttgctttcatttatgcgaagttacgaaaaaccttttagattccagccgcgcaagcggacgcttttgattttaaattagtaaggccccgtgggtggaaatcataaatttaaaatctaaaatttaaaattgacggcagccgaagctgccgttgttcacgctcccaacgtggtgtgaacggagttggaggtgattttcccgtcggcggtcatggcgagactgtagacgtggatgttctccggcttgacgaaagaagggacggagatggaggtcacgccgttctcgccccggtcgcgtagttgcttgacaagggcgaaatgatcgtcggggctgtagaggacaccgtagaggcgatcgttcgtccagcagtaggcaccctcgtaaacgttggcttcctgcgtgaagacaacgctgtacgtctcgcccgcctcggtggtcttgctgacggtaacggaaggaacgagcaacgggccggcggcgaaaaggactttcgtccagtcgatctcgctggtgtactcctcgttggcctttttcttcgggtcgacgggagtgtccggattaatcttcgtggtggttagcacgccctcgcgtttcttgttgacgctcgtgaaacgattggcccatttggtgccgttcgtgtcacggggaaaggtcacgcggagcaccgggttcaggtaacgcacttcggcgttgagggccgagaagcccgacgcgttgattttctgctccgcgttcaggggcgcttgcttgctgttttgggcgcgacagcccaccacgccgttgcccaggttggagaatacctcgttagcgactttcccgctcttctggtaaaagttggttgattttattcgtgccatactttcgggtattagatgagtatttcaaaacgcctttccccacgcttcgaggaaagaacatggtaaaggtatgaccctttttcgacttgaacaagaaaaaataaaattatttttaataaaaattaacacattttgtgtatctccggtctctttaccgtttggtaacgggagatgtacgtgcaaaatgctagctatcttcgtgataagttaactacgcattttgttagttaccgtaaagtcaccgtaaagttaccgtaaagtcaccgacataacacggtgacttgttattcacgatttggtaatttccctaaaaaaatgtaaatttgacattaaggtgtgtttaagcattattggaggtttatcgaatcatttaagaggaggcatcatgagcaagaaaaagaaaaggaaaaagaagaccgtactaccggtcagacaactggcgaccacccgttccggcggtactaccacgtattaccggaaaggcaaggaatgtcattgtgccagcaagcgccccgccgggtcgacggaggagcgtaatcatcgccacaccaagcgatcggagaggcaacgactgttgacaagtgttttcacgttcgttagtcggcttgtgaaaatcctcttgcggaaactcgcggacacgaactcgtggattgccttcgccaaggatacccccatgaccgcccctaatctgtgccacaaggtgaacgccacggcctgtgacgagcatggtgtggctaacttccgggctttcatgttcagcgtcgggtggctcgccgtgccgctttacacccgcgtccgtcgcgacgcttggactttcacgctcgaatggcgccaccacggcatactcgacgagacaagggacaacgacacgctcgtcgtggggtacttttacgactgcctgcctgacgcgccacgcgtgcttcaccttcctgcagtgacccgtgccgccgggacggccactttcaccttgtccgatccggaggggcccggtagggaacctctctccccggacacggtggtgcatatttatccttatctcgccggcccggacacggacgagtacacccgttccgtctacctgcgcgttcctcccggtgctgacgacacgcttggatgatttacgattaatgatttatgattttagattccggccgcacggggcggacgcttccaactaccccctctaactcccccttgcacagggggagaatatgctgcattgttacattgtgatgccttcttgcgcccgtctctctccccgtggaagggggagtcggagggggtagtcttttccattctaaattctacattccaaaactaaacatcccgatgctctcgtacacgacgctaaggattcccgcgagcaggattccggtgctgcatgcgacgaggcttatacgtgaataattgtcagagttgaatctggcgatgggttgctcgttcttgttgataaacatggcctttaccactctcaggtagtagtagagagagatgatggtgttcaacagggcgatgaaaaccagcacgtaatatccttgttgtgccgcggcggcaaatatgaagaacttgctgaagaacccggcaaatggcgggattccggccagcgagaacaaggcgatcatcatcacgaaactcaagcggggattcgtggtgtacaacccgttgtaatcatcaatcgtgatcttgccggagcgatgttccacgacagcgataaccccgaaggcggccaagttggacagcatgtacaccagcacgtagtacactagcccggtcatacccatggctgtcccgctgatcacccccagcatgatgtacccggcttgagagatggaggaataggcgaagaatcgtttcaggttctgttgccgtatggcgaagatgttggccagcgtgatagaggctatgattacccagtagaggatggcctgccattcgttcacgagcggggcaaacactttatagagaatgaccattagcacgaatgccgcggaacctttcgagattaccgacaagtaggcggtaacgctggtcggggcgccctcgtacacgtccggggtccattggtggaaaggaacgagtgataacttgaatcccaagcccacgaaaaagaacacgaaagccatcatctggagcgggctgctgtttagcccggcggggatgtcctcgaaatacagcgttcccgttgtcccgtaaattaacgagatcccgtacaacgataagccggacgcaaatacggcggtaaggatgtatttggctcccgcctcggccgattgttgcttgtacttgtcaaaggcggcaagcgttgccatcggtatggatgccgtttccagcccgataaagaacatcaggaagttcccggccgagatcatgaagtacatacctagcagcgtggccagcgtgatcatgtagaattctccccggcgaataatcgtgcgctcgctggaaagccagttattggcttgcatgaacacgagcagtgtcccgatgctcaggatggatttcataactccacccattgccgtgcagtgatacatccccccgaaagccgtcacgtccggggcgggccagatgttcagcaggatatgaatacccacgaggatacaagctatcggttgaaaatacttcaagcttttcggggtgccgaatatgtcgtaaattaagagtataacgatcaccgctaccagtgatatttcctccttcattaataagaaattagcgtaaaccatgttttgattttagattttaaatttatgattgaaccccctctagctcccccttggaaagggggaggacacgctccattgttatattgtagcgctttctcgcgttcgtctctccccctgtgtaagggggagttggtgggggtagtttttttcattctaaattctacattttaaattctacattctctcaatcgaagcccggatcatgtcggaaagccatagaggtgccagaccgattccggcgatggcagcaatcagtatgatcgtcgagaaacgttcataccagttggcatcggtgagggcatagtgatgctcgttgaccacgctcccgtagagtagtttcccgaccacccgcaggatgtacacggccgtgatcacgatggacgtgcaggcgatgatcgtgaatacccggtggaaggtgtccgtctcttggaacgctcccacgaacacggtcatttctgccacgaacccgcttaatcccggaagaccgagggaggcgagaccggcgatcacgtagcacacgccgaggtaaggcatgatcttcatcaaaccacccatttcccggatgtcacgggtatgtgtgcggccgtagatcataccgatcaaggcgaagaacagggcggtcatcaggccgtgggagagcatctgcatcacggctcccgtcatggccgtctggtttaacatcaggatggcgaacaataccagcccgcagtggctcacggacgagtaggcgttgatgtatttcaagtccgtttgcacgatggccgagtaagccccgtaaacgacgctgatgcccgtgaggatgatgaatatccatgaaagttctttagcggcctccggcatcaggtggatggctacccggaaacacccgtaaccacccagtttcatcaataccccggcatggagcatggagactgccgtgggggcagaggcgtgaccgtcgggtgaccatgtatgaaacgggaataacgcgccgaggaccccgaacccggtgaataccaacgggaagaaccagcgttgcaggctttcgggcatggcgtgagcttgcgcgatttcctgcaagttcatcgtgaacgctcccgtcgtcgaggagtgaaagtagataccaagaatccccacgagcagtagggcagagccgcccatcagcattaatgttagtttcatggcagcgtattccttttgcccgctaccccagacgccgatcagcaggtacatggggattagggccacctcgtaaaacatgaacatggtgaagaggtccacggaaataaagaacccgaataccccgatggccaacaggttaaaccacaagaaatactctttttgcaggaaatccattttccatgatgcaaatgttcccgtgaagacgataatggcggaaagtagcaacatggctaccgagatcccgtcaactcccacggaataatgtatgtttaagggagcgtaccaaaccgtgctggcggtaaacagcatttctgccgtgttgccggctccccgttctcctaaatatgcaaataccaacccgacggctaaggccagcaacagggaagctcccgtggctaccgctacacgaatttgttgcaggttctttgaaagaaataacccgcccatcgtgagtattggtatcagaacgaatagtgataaaaagttcatatctatttattgattttaaattttagattttaaattttagattgaaccccctctaactcccccttggaaagggggaggacacgctgcattgttgcattgcggcgcattctcgcgttaggctctccccctgtgtaagggggagtcggtgggggtagttgttttttcattctaaattctacattaccagtaaaactgcaaccagtattaatagcgagccgaacaggatcacgtaagcgtattgctgtacttgtccggattgtaatccccggatagagtaagacaatcgttgcgtgacgtttgccagaccgttcagcgatccgtcgatcacgtggcggtcaaaccaagcgatggggcgggatacacagttgaagatgatacgtttcgtgatgaagaggtacaactcgtccatgtagaaccgccggtaagcggcgcgatgcaacccgccgaacgtggtggccaaacgatccggtataggattggagcctttgtagaaccacgtggcaagagcgatggaaatcacggcgacaacgatgctggtgccggctaccgtccagtccaggtggatgatgtattccatcccgttgctgctgataaacttcccgaaagggatgaacccggcgaaaagtgttaccacggcaaggaacacgaggggtagggtcatgctcttcggggcctcgtgcggggcatgttcgtgcgtgctttctttaccccagaagatgttgtaatagaggcggaacatgtagaatgccgtcagggccgcgatgaagctcatcacgacaccaagtaccgggctgaacatgaacgtggcagtcaagatttcgtccttgctgaagaacccggagaagggggggattcctgaaatagcgaggcaagccacgaggaacgtgacgtgcgtcacgggcaagtatttacgaagaccacccatgtggctcatctcgttgctgtgaacggcatggataatggctcccgcaccgaggaataacaaggctttaaacatggcgtgcgtgaagaggtggaacatggatgccatgtagcccaagccttcgtgtccttccatcccggaaacaccgagggctaccatcatgaaaccgatctgcgagatcgtggagaaggccagcactcgcttgatgtccgtctgcacgcaggcaactactgccgcgtagagggacgtgaccgctcccacgaccgcgatcagtacgagtacctccggtgcctcgaagtagtacacggggaacaagcgagccacgagataaaccccggcaacgaccatcgtggccgcgtggatcagtgccgacacgggggtaggaccttccatcgcgtccggtaaccagatgtgtaacaggaacatggccgactttccggcacctcccatgaaaatcagggccattgcccagctcatcacggaacatcccatgaaggttgtcccggcagccccggcaaagagtgaagagtcgcctgaggttaacaggtcgaaagagaaggttttcgtgtagaacgaaagcaacaggatgccgatcaagaaaccgaggtcggcgaaccgggtgacgataaacgctttcttggacgcggcgatggcctccggtttcgtgtagtagaaaccgatcaacaggtaggaagaaacacccaccagctcccagaatatgtacatctggaagatgttcgtggctaccacgagacccagcatcgagaagctgaaaagggaaaggaaggcgtaatagcgctggaaacctttttccccgtgcatgtatcccaagctgtaaacgtgtaccatcaacgatacggtcgtgattaccaccagcatcatgacggaaatcgggtctagcaagatacccagatcaatatgcaggtattgcgtgaaacgcagccattcgaagttgaacgggatgaccgggaggcgcacgccttctacccggggcatcgagaaatattgccatgccgtcatgtaagccagcaaggcacatatcgccaaagacaacgttcctatgcacccggccgtggtgggtttcaatttcgtccccaacaagcctaacgccagaaatgttagcaatggtagtatcaatattaaaactgtatattccatgtttcgatttcttgattttaaattttagattttagattgaaccccctctaactcccccttggaaagggggaggatatgcttcattgttacatagaagcagtttctcgcgttcgtctctccccctgtgcaagggggagttggagggggtagttgttttttcattttcaattttcaattgctttgttttcttctttcagctcgttcaagtttttcacctgtatattgcggatgttccggtatatattaatgatgatggctatggcgacggctgtttcgcaagcggaaaccccgatggcgaacagggtgaagaaaaagccttccagttgttcggggaagagataacggttgaacacggcaaagttgatatccactgagtttaggatcaactcgatagagatcaacacggcaagcaggtttctccgggtaatgaaaccgtagattcccgcgaaaagcatgatcgtgctgatcaccaagtaatattccatgtgtagttccatatactgattttaaattttagattttagattttagattccggccgcacaagccaacgtttcgactaccccctctaactcccccttacacagggggagaacacgcttcattgttgcattgaagcagtttctcgcgttcgtctctccccctgtgtaagggggagtcggtgggggtagttgttttttcattctaaattctaaactctacattctacatttatattatctttttctcgctatcaagattccaccgatgatgcaggtcaatagcaggacactgattacctcgaaggggagcaggtactggtatttttccgtgcccatcaaggcggttccgatgactttctggttgatctccccgccaacgaaacgagagggaccgaacgagtgcattaacgtgatgtaaacacatattgccgccccggcgagagccgtgattagcccggcaaacatcttgctgttcttcaacctgcttaccttgcttttgtcagccgtggtgagcaatatcgagaacacgtacaggataatgatacccccggcgtagatcgttaattgtaccgctcccaggaatgaatactccaactggaaatatattccggcagtggcaaaaagcacgaatagcaggtaggtcgccgatctcaagattcgattggtcgtcacagtcaggatcgagcagacaacgatgaccgttgccaggatgaaaaagaccgtttcttgtaattctgctgtactcatatctttattttagattttaaattttagatttatgattgaaccccctctggctcccccttggaaagggggaggacacgctgcattgctacatcgtggcgccttctcgcgttcgtctttccccctgtgtaagggggagttggagggggtagtcttttccattctaaattctacattttaaattttaaattctttcgtcgtgcaggtatttcaccagtttactgcgcgtgtagacggcgtgttcgaacgtgggtttgaactcgatggcttgttgagggcacattttcacgcagagctggcagaacatacagctacccaaatcataccggtattttatcaatacctttttcttcttgccggtttcatccgtgacaaattcggacgtgattttgatggttccgttcgggcagttcatctcgcagatgccgcaggcgatgcatttgtggtgattgttctcgtcgtgaggcatcacgagttcaccccggaaacggtcaaacattttcaacgtggcccggttctccgggtattgctccgtcgttttcttggtgaaaaattcccgtagcgtgactttcatcccggtcagcaacgagaaaagtcccttgaaaaacgaggtaatatatcttataatactcttcatagtttcgtctttaaaaatgtagtttaaatacgacaatgatcaccatcaggaaaaggttgatcaggttaatcggcagcaggtaacgccattccaagcggagtaactggtcgatacgcaaccgcgggaaggtccatttaaaccacatgatgatgaatataaccacggctgttttcccgaagaaccagaagatggaaggaatataatccatgatttggttgaagctttcccagccgggaacgtgtaatggcatccaaccgcctaagaacagggtgctggccacggatgctaccacgaacatgttcaagtattcggcgaggtagaagaacccgaagtgcataccggaatactccgtgtggtaccccgcggtcaactccgagtcggcctccggcaagtcgaaggggccccggtttgtctcggcggttccggcgatgatgtaaacgataaacgcgatgcaggccgggatatgtcctttgaatagcaaccacccgtctgcctgtccttccacgatcgtggagagctgcatgcttccggtgaatactaccacggtaaggatggataacccgatggataactcgtaactgatcatctgcgcgccacttcgcatggcaccgattaacgagtatttgttgttactggcccacccggcaagcaagattcccacgataccgatggacgacacggcgatcaggaagaagattcccacgttgaagtcgatgacgtgtagtcctttcgcgaagggaatacaaccgaatgccagtaccgacgcgataatcacgacgaaaggggcgaggttgaacaggaatcggtcgacgtggttgatgtcgatgatctccttggttaacattttgatcatatcggccacgctttgtatggtcccgtaaggccccacccggttcggtccgatacgacactggaaaaaggcacacattttacgttccacgtagatcagcacgagggcgatcacggcgtatcccacgagcaggcaaagcccgatcaggataaactcaaccagcgtggcagcagcgtgcgggagaaaactcctcaagagttcgtctacccattgtgttatagttgagaaatcaaacatatactaattttaaattttagattttagatttataattccggccgcacaagtcaacgctttgactaccccctctaactcccccttacacagggggaggatacgctgcactgttgtatagtggcgctttctcgcgttcgtctctccccctgtgcaagggggagtcggtgggggtagttgttttttcattttcaattctccattttcaattagttgttatctgtcaatgtccggaacaacgtagtccagtgtaccgccgatggcgatcaggtcggcgattttaccgcctttcgtgatcaggttgacgatggataccagtggcagacacggggaacggaattttacccggtaagggtatttgtcaccccggctttcgaggtaaacaccgaattctcctcgactggcttccacgctcttgaaatagtgaccttccggcaatttgatcagcggtttggtcttcacggcgtagtctcccgcggggatgttgtctaccagttgttccagtatatgtaatgattcgagaatctcttccatgcgcaccatgtaacgggcaaacgagtctccttccgggtagaggatttctttgaaatccaccttgtcatataccccgtacggcgtgtgtttacgcacgtcgcatgaccacccgcaggcacgtcccgtcgggccggatgccccgtaactgatggcgtcctctttcctgagaactcccacgcctttcagacgttgttgggcgatcacgtttcccgtgaacacgtcgtgatattccttgatcatcgggggtaggtatttgatgaactctttgattcggttgattaggttcgggtggatgtccgccatcacgccgccgatcacgttgtagttctgaatcagtcgtcctcccgtggtttcttccatgatgtccagcactttctcccggtcgcggaagccgtagaagaaagcggtcagcgctcccatatccatgcagaggcatgaccagaacaagaggtgagaggaaagacggttcagctcgtccatgatggtgcggatgtatttcacccgttccgggatttccagccccatggcttcctcgatacacatacaaagcgcgtggcggttctggtgcgcggcaaggtaatccagacggtctgtcaaggccagcgtttgcgggtaggtgaggctttcacacaatttctcgatgccccggtggatatacccgcagtttacatccacctttttcacgatctctccttccagtgatacccggaaacggagtacaccgtgggtggcggggtgttgtggcccgatgttcaccacgtactcgtcttcttcaaacaagatgttctctttctcgctgacttccccgtcatgggaatcagcctcgaacgtgggggttgcatccaacgtttcttcactttccagccgtaccgggtttatttcggggtctgcattgtagtctttacgtaacgggtacccgacccagtcgttccgcaggaacagacgtcgcatatcagggtggttgataaaccgtatgccgagaaagtcgtacacttcacgttcgttcaagttggccgtggcccagatgtctgaaacggtgggcagttccgggttttcccggttggtcgtgaacgtctttaaaaataatttatgttcgtgagccgtggattgtaacaggctgatcacgcctaacgagtccccccagtccattcccgtcatgcagatcatgaagtcgaaagacagatcccggtctccctttagccggagagccagttccctgtacttggcgggctctaccgtcacggtaaggataccgctttcgtcgatttctgcctctgggacaatgttttttattttatctactaacatgtactgattgattgattttagattttaaattttagatttatgatttccacccacgaggttcaatagtttttaatcgtaaatcgtaattcataaatcataaattagttcactctaaattctacattattctttgttctctttttccttgtggtttttgccaccgaggaaacgttccacttttaccttgcgttgcagttggatcattccatacaggagggcttccggtcgcggaggacatccgggaatgtaaacgtcaacgggaatgatggagtcaacccccttcaccacgtggtaagagtttttgaacggtccaccggaaatggcacatccccccacggcaatcacgtatttgggttcggccatctggtcgtagagacgtttcagcacgggggccattttgtgtacgatggtccccgccaccatgataaagtcggcttggcgcggactggctcgcgttacctcgaacccgaatcgggagaaatcgtaacgtgccgctcccactgccatgaattcaataccacaacagcttgtcgcgaaggtaagcggccagagggaattcgagcgtccccagttgataacatcgtcaaggcatcccacgataacattggtgccggacgcccgaagttgttcaagatattcgttatcgttgaactcttcatatttcatggatttaatttttacttccattctaacgctcctttcttccacgcgtaagccaatcccagaataaggatcagcatgaaaaataatacattcagtaaaccgttaattccggcatcctgaacggtgaccgcccaaggatagagaaacacggtttccacgtcgaacatcaaaaacaagatggcgaacaggtagtatcctgccttgaattgcatccatgattttcctcgcgtgggtacaccgcattcgtaggcttctcccttctgtttgttgaaggtacggggagaaatggcccgagcgatgctcatagcgataaccaccagcaaaatggctgtaatcaatacaaccacgaataaagtaagattcataattataaaaagtttcaggttttcaagtttcaggttacaagtttagttacaggggaaaaatacggcaagttgcgaacttgtaactgcaacttgcagggctatcggcccaacctgtaacttggttgatctccggctaaacaatgatttttcgcagggcaaagacgtagtatttggtcttcccgagagtcgagtacgggtgaaaatacaagttgcgtttggagtgtgctaccgcggtgttgttcttgctgttcctttgcaggaaagagggaaccaattgtgatttggagtccgggacaacatgggagtaacccagcgtgagttcgcaactttcgtgaagaaagagtaataggggaaccgtggagacttcacagattttgtttcggcagaaattacattctaagcaggagccattgaaggacggattttgcccttttgccaatatcccgctggaacttaccaacacgaataacacgatcaatatactattcttcagcacgttcaacatcattctttttacttaaggttcgcaaagataacctaattttgaatttcggttgaaaaatgtgtggtaaagaatgttaatctcacgattaacattcgggttcataaggtttataaaacatatttttttcttacttttgtaatctctccgggaaaggagaatatcccgggggtaatacatgaaattagggaaaaaa

SEQ ID NO: 10829 - DNA, 27598 bp, Unknown
  gut microbiota DNA sequence
ttatcagaagaaatacggttcttacctttacgggttaaacaggttgtacatattaatggaaaaacagcgtaaccgcggccaagatggtgcgggtgtcgtggggttgaaactcgacatggagccgggttacaagtatatggaccgagtacgttcctgtgacgcgaacccgatacaggatgtgtttgaccggattcatgaaccgtttacaccggagattctccgggagaaggatgccgtttgggcaaaacagaacttgccgttcgtttccgagatttacttggggcatttacgttacgcgactttcgggaagaataatatagattacgttcacccgctgaaacgggcaagcaattggcgggcgcacaacttagcgctggcggcgaactttaacctgacgaacgtggacgagttgttcgagagtttgatccgggcggggcagtatccgcgaaattattccgacacggtgaccttgcttgagaaggtaggctattttctggatagcgagattcaggatttgtaccgtttctacaaggaaaagggattttcgaaacaggagattaccccattgatcgagcgtacgattgatttacccaaggtgctttcccgaagtagcgaggattgggacgggggatatgccgtggcaggagtggtcgggcatggcgatgctttcgtgatgcgtgacccgtgggggatacgtccggcttattattacaaagatgacgaggtggtcgtggtagcatccgaggcatccgtgatccagaccgctttccaaggtataaatatggaaatttccgagatccgtccgggatacgccctgttgatcaagaaggatggaaccgtgacggaggaactcgtgcgtgaaccgcgacaacgtgccagttgttcgttcgagcgtatctatttctctcgcgggaatgacaggaatatataccaggaacggaaaaaactgggtgagttattgacacctcgtttggtgaaggctgtggatggcgatcttgacaacacggtgttttcttttattcctaacacggcggaaacttctttctacgggatggtgaaaggaatccagcagtacatggtggaggagaaaaaacggttgatccgggagggaaaggctacgtggagtgaagaaacgctcgacgagatcatttgccgagagccccgtatcgagaaaatcgtgatcaaggatgccaagctacgcacgttcattacctccgattccggtcgtgacgggctggtgggacacgtgtatgacgtgacttacggggcggtgcagcccacggataacctcgtggtgattgatgactcgatcgtgcggggaactaccttgaaaaagagtattctgcgaattctcgatcgtcttggtccgaaacgtatcgtggtggtgtcttctgccccgcagattcgttaccccgactgctacgggattgacatgacccggatgaacgagtttatcgcgttcaatgcggctatcgagttgttgaaggaacgaggcatggaggggctgattgacgaggtgtaccggaagtgtaaggcacagcaagggttgcccaaggagcaggtggtgaaccacgtgaaagagatttacactccttttaccgaagaagagatttccgacaagattgccgagatggtgcgtgacgagcatctgaatgccgaggtgaaagtggttttccagtcggtcgaagatttgcacgtggcttgcccgaacgacacgggtgactggtattttaccggaaattatcccactcccggtgggaataaggtggtcaataccgcttatatcaactgggtggaagggaggaatgaaaggtcttactaattttagattttagattttaaattttagattccaaccacacgaggccgacgttttttgatttccaacagccccccctctagccccatctgtgtaaggggaggagctagaggggggcaatctaaaatttaaaatctaaaattaccaagttttcactttcccgttcaaagttattgcaatttgtttgtaaatgtttaaattagtagcggatattaaaaagatcggctatgaaacgaattgtgtcatttattctgttattcatattttccatgtgttacgggaatgacccgttagttgcacaggtgcgtaaagagagacaaaaagggaaggagaagaagatcgttagggaacaggcggtggatttgttgctgaaagagcagcaagtggcagcggaacgagctgctttaaaagaattatactgggttctgggaggggaagattggcgggtgaaggagaattggctgagtgaccgtcctgttgaggagtggtatggggtgaagcggaattacgataatgggaaattgagtatatatctgggagcaaacggtttggagggggtgttgccgggtgctattttcagattgaagacgttggaggtgcttaacctctgtaataacgagatcacggggaatataccaacggatattggagagagtacagcgttgagacagttgtcgctgaacggcaatcgtttgacgggaaaaatacctgtcgggattggtaaactggaaaatctggagacgttggacctttcacgtaatcagttgtccggggaaataccggcagaaattggtggtttgaaacaattaaaatttcttcggatgggagggaacaggctgacaggaagtattccggccgcgatcgggagcctcttgcggttggagtgtgtggatatatcatcgaacttgctgacgggggaaataccagatgagcttgtgcttctggaaaatctggaagaagtgaatttatatgataatcgtctgcgaggtgtgttgcctgcagactggagtagattgaaaacgttgaaacgtttatctttagggcaaaaccgaatagatggtgaaattccagcttcattggggagtgtgaaaactctgcggatcgttggattggaaaataacttgttgagagggactattcccgttactttgggacagttaaaagaattgagaactttgggcttatccaataatcggttaacgggagcgattcccggggtgttgtttaccttgccgaatttatatcatttaggcttgtcggataatggcttgtctggttcgttacctgttgagatcaaggaggccgtggcgttttcatcccttgatttgagtaataatcgtttgagtggggtgtttccgccggaactttgtgaattggtgcaattgaattacttgaatttgaggaataacaggttttccggatctttacccgtggagatcgggaagatgactgaattgtcctctttggacttgacatcgaacaagttttcgggtcctctcccgaaagagatcggtcagttgactcgcttgacgtctttgttactttcagaaaacgaattttccggagagttgccggagacgctggggaatctggtaaatttgagaaatttctacgtgaaaacgaatcgtttgtcggggccgttcccggtggtgttaacgaagttggttaagttggaatacttgaacttgagttttaataatttctcggggatgatccctgcggaaatcgggaattgggaagaactgaaacatttgtatttgtggaagaatcagtttagcgggagtattcctccgtcgattggtgagttaaggaatttgacggaattgagtttgggagagaaccgtttgtcgggcgagcttcccaaggagttagggcagttggaaaatttggttagggtgtatttgaacaataacatgtttagcgggcgattgcctgccgagataacacgtatgcggagtttgaatttcttgaacttgcagaataactgtcttgctggtaacttaccggatgaaattggtgattgggagtcactggtggagttgtacttggcaaataacgagattacagggacactgccggcctcgatcggtaagatgaaacggttgaagatcttggacgtgttcgggaaccgaatgagtggggtgttaccgccggaactgggagatatggaaggtttagagaggttgttcctgacaaataatcattttaacggggccttgcctcccgagattggtaatttgaggcggttgagaatattggctatgccgaataacgagttttcctcgctcccggaagaaatcgggaatatagagtcgttggaggagttgaacgcttcgaatgctttcaccggaggtgctttacccgcaagtatcgggaatttgcggaatttacggcttttgttgttggggaataacaagttgtcgggcgagattcctgccgagatcggggagttaaccttgttggaaaggatggatttgtcaatgaataaattgagcggtgagattcccgccgggatcggttacttggataaattgacggttttggctctcttggggaataaattgaccggaacgattccggttgaaatagggaatatgcgaagtttgaacattctccatcttgggcggaatttgctggagggggaattacctgccgagttgggatggctttcagaattggaggtactggatgtcggagggaataagttgacagggaagttacccgcagaatgggaagaattgaaaaaactaaaaagattgattctctttgggaataagtttagtgggagaattccagatgaatgggagggaatggagcggttggaagatttcttggtgcagggtaacgagttgacgggtaaggttccggatttcctgtttcatttacccacattaaaacggttgtggttgggaaataatttcttggagttgaccgaggaacaaaaggagttgaccggtaaggataggcagtatcttttattgccacaggggaaaaagtagggaatagtctcaccctccccagctccccccttgcacggggaagagctgattaccaagtggtattccctcctgtgtaaggaaggagtagagaaggtaatcgcttcatgatgggttactttagtatgagtggttcctcgataatgatttcagcacgactcatgttttctaccgcaattttcggtcccggaatgaggggactgtaatcaagtacgtgtctgatccgggctcgctggtcgggggtaatacgatcacgatagctataataatagtccattatgttatatgacgtgaaagtggttccattgcgatcttggcgctgtgctgcttgggcaaaagttggtctgtatacacttgctagccaagtgtcgtaagccgggcgatcgtaatcgggagtatcttcacagtaatcggttgtttgcccgttgtcaccaccggaaaatacatggaataaccctagataatgtccaagttcatgggcgagagtggtgggccataccggttgtaggccgtaagctccggtctctgctttatctataaatatcttgtttatcatcacggcttgcacggagttggtgggaagactggtatagtatgtatcatttcttcttaaacccggcagggatttgccttgcggggtgtatggagtcatggcgattcccgtcacgttttcttcggtaaaggagcagatgataatgttgatgtacttgttggggtcccatattatttgtgtgccattgtatgtattgtatcttaaataattttcgacattgaacgaggtggatgaactttgaatagtatttaccccgggttcaaccaagggagttccttcgggcgtggtggtggcaagggtgaattgcaggttgaggttctcacttttcccgttgttgcctcggtagaagttattcacgtaatccatacattcttgaatgtaggcggcggtgacttttgcatcatttacggaaccgtccgagtacacgtggaaaatgaccggaagttcgaagtagatttctcctttttggatcacggtgaggattttctgttggtctgaattggagatcgtgacggtccccgtgcgctcggttgtggtcgtgttaacttgcgtgttgatcacaagtgtatctccttgcggtgtactgatcttgcttgcccggcaccaagaggttgggctggcaaatgaccagtttgaaccactccgaagagcaatgcggatggtttgttgctcgctgcttacccggatttcgttgcctgttgataattctattccctcgaacttgtccttcgcacaggaagtgataagtagaaacagaaggtaaataagaatgtatttttgcatgtttgtaggttttattttttcatgtagcggtccatttcccgtttagcgtctttttgtttgagggtttcccgcttgtcgtactctttctttccccgggctagggcgatgcggagtttggcgaagcctttctcgttaagaaagagacggacggggacaatggtgagtcccgattccttggtcttgcgttcgagcttgacgagttctttcttttgtagtaagagtttacgttcgcggcgttcgatgtggttgtagtaggttcccaatttgtactcggcaacgtacatacccttaatccacagttcgccgttgtggaaataacagtaggaatccaccaacccggctttcccggcccggatggatttgatttcggtaccggtgagcatgattccggcggtgtattcttccaagaactcgtagtcgaaggatgctcttctattttttatattaatgtcgttttgcataggttttgatgtttaagcgtaaatagtgggtattctgaacataatcatcaatagttgctggatgatgatcggggatacgatcacgagtaagccaatgatgacgatggcgcttttgcggtattgtacgtcgagggctgtcaattggttcagcccgacgtaaagggtacgcaggcacagcaggctacatattgccatgagttgggatataaatccttccgagaatccactggaaaggcagtggaacgggatgaagacggccgagctatacacggcaaggcgaagggccatccggttggctgcagccactttgttagagaggtattcacgggacacccggtaagcgatgtagctccccatgacggaggccatgaacaggatgatgccggttccaatggcgtagagaggtgaggttgacaataaacgtagcaatatcgcacatgcagaagaaagcacggataaaggcacgaggaaattcttgaaaagttcgattccctcgatgttctcccggccgatcacctgccattctgtttcggggtgaagtagtagtttccggggccttgtgaatatgcctttgatgtccaatttcttcataataacgcgaaaatactgttttttatcgagattggttcataaagtttgtaaagtttataaaggccgagaatcctttggatcaggtttaacgacagattggggtacagtggacaaaatacctctagagatcattatttggggaatcttatgaatttttacatgaaaatgtagcaagcctgtaacaaatatttcatttcttcgttaaaatttacgagaaacagtagatttggtatttggctggcgaggtgaatgaaaagaagtttaatatttaaaacaaaaggtgtatgggaattttggaggctattctggcttttcatacttcgattccggacacggtgaattcttttcggcacgggatgttgaaggtattgatacctgtcttgtttattaataatctgtaacttgtaactaattaatatagtatgaaaataggattatttattccctgttacattaatgcgatttatccgggtgtgggggtggcctcatacaagttgctgacctcgctgggattggatgtcgattacccgttggatcagacttgctgcgggcaaccaatggcgaatggaggattcgagagggattcgaccgagctggccaagcgaatggagggattgttcgagaagtatgattacgtggtggggccatcggccagttgcgtggttttcgtgaaggagcattacccgaggttgttgaaccgggaggaacatgcttgtattagtagtcgtatttacgagatttgcgagttcctgcatgatgtggtgaaggttgataagctgaatgcttctttcccacacaaggtaagtattcataatagttgccacggggagaggttattacatctttcttccccgagcgagttgatgatccctcgttattccaagttgcgggatttgttgtcgctggtgaaggacgtggaagtgttcgagcctaagcgggtggatgagtgttgcggtttcgggggaatgttctcggtggaggaaccggcgacgtccgtgtgcatgggacaggataaggtgcatgatcatatgtcaaccggggcggaatacatcacgggagcggatagttcttgcctgatgcacatggaagggattattcgccgggagaagttgccgataaagacaatacacgtggtggagatattaagtcaagggttataaagttcgtaaagtgacgggagtccttcgggtcttataaactatttttgtaaataacgtaaatcaaataaatatgagttcacacgctaaagctgccaagaaatttatagctgaccgagagagaacagcatggcatgatcaagcgctgttcttcgtgcgagagaaacgagaccggatggctcatgatgttcccgaatgggaagcgttgcgggagatggcgagtaatatgaaacgacatacgattgccaatttaccatattatctcgagatgttcgagaagaacgccacggcaaacgggattcaggttcactgggcgaaagatgccgaggaacataaccggattgtttacgagattatccagaaacatgggggaaagaatctcgtgaagagtaagtcgatgttggcggaagagtgtgggttgagtccttatctggaggctaggggaattgatgccgtggagtcggatttgggtgaacggatcatgcagttcatgggtacaccgcccagtcatattgtgttgcctgccattcacgtgaaacgggaggaggtggggaaggtgtttgagaaagagttgcacacggaaccggggaatagcgatccgacttacctaactcacgcggcccgggctgccttgcgggagaagttcctgcacgcagatattgccatgacgggtgttaattttgccgtggcctcgtcaggtgcttttgtggtctgtacgaacgagggaaatgctgatatgggaacttcttttcccaaagtacatatcgcgatcatggggcttgaaaaagtggtaccggattatgatgcgttagccctgtacgtgcgcttgttggcccgctctgccacgggacagccttcaacgacctacacgtcccattataagaaaccggtagaagggcaggagatgcatatcgtgatcgtggataacgggcgtagtgatattctcgcctgcacggaacatgtgaatatgttgaagtgtattcgttgcgggtcatgtattaacacttgtccggtgtatcgccggacggggggatattcttactcttattttataccgggtcccgtggggattaacttgggtatgttgaagtcgccggagaagtattcggggaacgtgtcggcttgttcgctttgttattcctgctcgaatgtttgtccggtgaagattgatctggcagaacagatttacaagtggcggcagaatctggcacctctgcatttagcagatccatcgaagaagttgatggtgaagggaatgaagtttatcatgaatcatcccggtttgttttataatgctattgctgccggacgtgttgccgagcgtatgccccggttcgtcttgtataattctctcgatgcgtggggtatcggacgggaacttccggagtttgcgaaggaaacgtttaacgagatgtggaaaaagggattgaaagccgattaatttacgatttatgaatgacgatttacgattgaaaaggcgtcggccttgtgtggctggaatctaaaatttaaaatctaaaattagaatatgggtagtaaagaagatattttagtaaggctgaaaaagcatgcggtggatcaagtggaacgaccggagatgacgtttgaaccgttgactttttttgatccgctggtacagttcgagaagatcatgaaggccgtgggaggaaattgcgtggtgttggagaaagggcaggacgtgaacgaggtaatccggaacgtgttccccgatgccaagtcaattgcgtcgaatttaccggaagttacatgtgctacggtgaatcccgacacgttggatgatccgcgggaattgaacggtacggatgtcggggtgatccggggtgatttcgggattctggaaaatgggatggtatggattaaccagcgtacccgttacaaggctctcttttttatttccgaggccttggtgatcctacttgaccggaatcgtctggtgaataatatgcatgaggtctacaagcaacctgcttttgatgatttcgggtacggttgtttcatttccggtccctcgaagacggccgatattgaacaggcgctagtcatcggggcgcacggggcgagagcggtgacggtgatattggaataaaataataaagaccatttttaaatggtctttattattcttcgtcttttttctttaattctttcgagaagaagaaataggcaacgatacacacgattaatgggaacacataaactaatcccggagagaagattgcgaagtaccatggcatactccattcttcatgggctgatatttccaaggctttatagcccacgtgtacaattccgatggaaaggaatgcaatggcggcaattccgaataatttctggtttttggcagcttttgttttgtccataatttgattcgcttacagcgagttacaagttaataagttgcaagttacaggttacaaaatacaagtttgcaggttagtgataaacttgtaacctgcaaacctgcaacttgtaactattttttataaagatgtttgattccaacccggtgtccggctaccgcaaagtacaagatgaaaaggtagcaaggcaacatcatccagtaggctccttggtgtcccatagaagtggttaatgaaccgtataacatagggagtaaggctcccccagcgatggccatgataagtagggccgatccggtcttcgtatgacgtcccaacccgaagatagcaagcgggaagatagcaggccacatgagtgagtttgccagacttaacagtgtcaggcaccagatggagatttctcccggtaacatgacggtacagattccgaggataactcctagggcagcacagcaagcaagggctttttcctgactgatgtatttcgggatggcgatgattccgatgatgtaaccgataatcatggcgatcataccgtaagttgggaatatccgggcggtatccatatccattttcatggattgggcgtaaccgatgatcgtgtcaatagcgatcacttcaactcccacgtacaggaatagggtcacaatcccgatccataggtggggaaaactgaatatacttgatttcccgctgtgttgcaagctaccttcttcttcttccgggtcctcgatctggggaagcggggagaaacgaacgaatagtgccagcacgacaagtgataccatgatcacgacgtatggtacgatggatttggaggccaaaaagtcgagttccgcagctttttgcatggcatccattgtttgtaattttgcttcgagcaggtcaatatcttttagcatgattgatccgaggatcagcgggctgatagctccggccactttgttacagatacccatgatactcacgcgctgggcggcactctcggcggggccaagctcgatcacgtaagggttagaagctgtttgaagtacggatagtcccgtacccatgatgaataacccaagcaggaataacccgtaggtgcgggtcattgcggcagggatgaacagtaatgcgccgacggccatcacgagaaggccgagcatcataccattcttgtatcctgttttccgcagtacccaggatgagggtagtgccatgacaaagtaggcaatgtagaacgcaaaggtcacgaggtacccctgccattcatgttgcagctcgcaggcgattttaagataagggatcaaggtggcatttaaccacgtgacgaacccgaagataaagaagaggataccgataatgataatccccatgctgtaagaatttttcttttgttccatcatcttttcgttaaaatatacataaacacgtaaacactttcaagagttcacaaagttattaatttttgctaatgatggatgaaattgggaaaaattattcgtgcggccgcagggaaggtgtatatagaaaccggagtacagtgataagtttctgtaccccggtcatccaaactagaaataataatcaacaatcaacttaattattagaaatgatttattaagttttactttcgtgttaaggttttgtacaagagagtttccggtatttttcgtaggttttctgtatgtatcttttttcttggctgtcgggtaagtccgggatgactttttccccgatggcagccaaacgggaataattgtttttactcatgttttcttgtaaggaggttaagatgatcggatatgtcttcagatcggttagcgtgagagaggcctgtttgttttccatcgaggagataatcaggtcggttaatttgttgcttgtttccttgaactggggttgagagtctgcatcttgggtttgccagcgtattgccctgtaagcgaaaacgtacatttttagctcttgtacgttggctgtcggtatttttgattcgattacggcagctagggctttgacctcacggttcgataccatttcggcgagaggtagcatggtgtttaacgttttctgttgcttgatgtttaatcccgggatttgttgttttaacaggcttaccggaacggcatcttctttttgataaccaagaatgtagtcttccagtattttaacatatttatggaacaggtatttgtcaactttttccgtacctgaattttttcgtatggcaggtaggtttgccagtaaaaaatcgaattcaggggaaccgatcacgcaactctcgtcttcatagatcggccagaattccttttgcaccttgtctttggaggttaggcgaggaagcagttctttgtacacttttccggctttttcgtcttccccggcttcggataatatttccttgtaagtcattaattcctgtttgttcattttgcctttttcgtaccgttcgtttagataggggagggatgtttttttgtttagtcctctctctatacgttggatgaaagtttccagattgtcactacctactactcgatgttgtatagttccgtcaggtcgaaagacgatgaaagtcgggtaagcgtgtacctcgaatttgtcggctaattctttaccttctcctttttccatgtcatatttacacagacgaaacgagggttgaaatagtcgcctgccgctttttgtgggaacacgttgttggtcatgtttttgcatggcccgcaccaagaggtgtagcaatccatgaataccattttcttctcggctttggcttgtgccaatgcttcgttgaatgttaagtcgcgaaagttgactccttcctgcgcgaacactccccattgaattaaaaggcaagtaattagtagatatattgttttcatttcggtcttggttttaaatgttacattttgctgctagtgttgtttcaagttccccactgctgtgtccggaaaatatgattttgccttccgggtcaataaccagaaaagtcggtatactcgtcagatcatagtctttatgggtggtttttattagttccggggttgcaagatattggttccaaggtaatttttcttccccgagagctttttgccagtctttttcatttttatctaccgacaggctgataaaagtcactttttccccgtatttttggtacatttcccgtaagtgagggaagctggcacggcagggtccacaccaggaagcccaaaaatcaattaccgtgtaacggtcttttttcaattgggagagaagcgatgtcttttccccgtcgggtgtaattatttccccttcttgtaatgctttcccttgcacgtaagcacgggcttgttgcaggtattgacggaattgttgcagtccagcgcaggtatcttgataagagatgaatagttcgcccaattcatccaaataggcttgatcatatgtgaacggttcttttttcagttgttccaccagatgaagattcacggcaagattccggttctcttgaatgaatgctttggtcaggttttctaatttactttgttgttcctgtaatgttttgaagtcttctatacgtccgttttccgaataagtccgctcaagtgtccggatctcatggcgcaaaggaatggtttgttgttggtaccggaagaaaatgtcttgtgctttggagcctttcaacgtgtagttcttttctttgcgaatgtcatatctccagaaggattccggaaggctgtcgatatggggtgtttggaatgttagttccccgttttccgcgaagaaaccgatttccgtgtatttgatcaagtgttcgtcttttaattttttcttgtcgacaatgtcttgattattcatactcaagcgacaatacgcaggagtattcatcttgccttggagttcgaatttcccgttgataatgtaaccttcgattctgtccttgtaatcttcgtgcggggctaacgtgatttccgtactatccatcgctcccggtatactgccgcggattacgaagtggtccataggcttgttattacaggaaacaatggagccaaggattaaaagttgtggtatgatatgtttcataaatggtgattttgaattacaatacgatcgtttcgatttttgtgagaaatggagaaatctttttctgtcattctccatttcttattgctggtctttagtccttttgtgcgtctcgcacgcaacgtacccgcattaaaatattcaaaggtgcggcatcccggtatacggttgtgcggctcccgaatattttacggtagaacacggttgtttcttgtaagccgttgttttcctcttccgtggctgtccagtaatatccgaattctttcaagaaattcaaaaataggcgtaccggaactctggataaactggcgtttccggctaattggaggcctaatccggttccttcgtcttggcggagcagggaggcaactcccttgcctctccatcctttcgaggcggcagttacagcggacatacctaaggtagtttccaggttctgccaatcttcgtccgtgggtaaacgccaaccttccggacaggcggctaacgcttcttcccaggtgtagaggtttccatgttcattgaaatccacttcgaaatcaaagcccagtccgtgggcaatgacttggcgagggtctccgtaaccatcagccaagggaccatcatattcattttcgtaatagagagtgccatattttaaattggatgccatccattcttgttttcctaagcgaacccattgataggtgttcccgtctcttgcgtccgtgtattctcccgtggcagacgggcggatgttaggtagattgtcatcgttactacaagaaatgctgacaatccacagtatacagatatatatcaggtgttttttcataattcgttagaattgaatgccggttgcttcaaccagcggtttgataatttcatatttcttgatcaccttcctgtagtcggaaaattttgcccggaattcttcatccgtcatcgtgaggcaggctttgatgtaagctgccgcatcttccgtggcagatggcaaatagcgttcactggtattttcaatgaatccttcgtagtataaatcttcgatgtattcatctcctaaaccgtccggaatgtaataatcggattttagagcttcgtagtcgtagttgttaacttttagaaagtcgtaagctttactgccttgatagaaatttccggggtctcctccccagctggcaaaaataatccggcaacagatgtcttgggagaatttaacaaaattctcttctccgtttaagtcccatagttcgcttatatttaatgccgtacaacgtgtgttggagtaaacaagcggggagtcggagtattcatattttcctcccccgtccggtaaaaggtatttatccattttgttgatgactagaatggagtaaggtagtacatttttgattttgggaatcaagtatgtttgcaagaaactcgcggcttgttctttttgttcttgtgttttcaagtattcgaaaaggtagcgggtgctgacggcagaagtcagattccattccaaaccgattaattctgtttcgtagtacggattaccgaaagtatcttcgcctttatattcatggcgtaacgtgtcattaaacaagaggtaacatcctgtcgtgttgaaaaattcccgtcgtaacacggattctgcatcggtagcttccggattcggggcgaatagatcacttatgttgctgggtgttaaactgtcttcttgttgacaagccgtgaaacatcctgcaagtacgatgatatataaaataatgtatttcatggtcttcctatttttagtacttgtaattatttaagccgtcttcacatcccttgttatatgctttactttgggatgcggcaggagcatctgtatttgtgcgtaccggtcgattgtttggtcccaagctattttggaaatcccgtacttcttgcgggagagctagcgtgtaggccggatcgtttttttgcaacacgtaagatttcgtgtattcggggccatcccatgtaaatgacgtgtaataatgggtgattgttttcgagtaggggtacttttcgcatacagtataacgacgcaagtcaaaccagcgatgtccttcaagacagagttcccgttgacgttccgcacgaattagggtaaccagggattccccgctttccgtgatgggtctgctgtcaatcatgcggtaatcccgtaattcttttaacaagttacgggctgttccttcatctcccgtataagccgcagcttcagccgcattcagataggcttcagctgtacggaacaggaaattatctgagacttctttgtacccgtattcccatccgcgaactttacgaaagagccagccgtcggcatagggcgcataatagtcgtctcccagtgtcgttttgaaaatgtagtattgggttctcaaatcattctctccttcgtcaaaagctgccactaaatcgtccgagatcgtgtaggaaggtaaggcttcccagtctccccacgagttttctccatatttcatgatgagggaagaggctaataaatgtcctcccatggagaagatggtttccggtgatgatttggttaacacgtctcccgtttccgttgtcaatgtgtttaaatccagtaagcttttattctttgtcatcactttttgcgcgtattcaagggctttttcccagttttgcatgtacaggtaaatgcggcttttcagtaagtacacggcggtgatgtctgcgcggtaagggtggtttttaattgttgtgtttaccagacaggtgtccgccgagtcaagatctttcagtacttgcgtgtacacttcatcaaccgaattcatggtgtattctttatcttccacgtaggatgttgtttttaggggtacaccgggagatgtgcggttggtttcggagtagggttgcccgtacaggttgactaacgtgaaataatataacgctctcaagaaatgggtttctcctttaattcgatttttttccagttcctgttcctcgttttcggcgtgttgttcatcaatggcatccaggatcatattgcatgtgttgatgctatggtaagcgatattccaatccgcatcttcggcaccccgagaatttccttcggcatttaaaccgacatcttgttgccacgtgtgccagccgaacatttcttcttgaattccaggatatccgccattatcggttaactggaaattgagtagttcgtcggacatgtaatgtacggtttggaaatatgagttttctcttttaaacatccagttttcgatcgtaattcgacctaccggcaggtaagcgtctcccaacagaagttcatccagatccgtgtagctctccaccttggaaaggtcttgtgagtactcttttaggaagtctgagcaggctccgagtagtagtgctaaacaaaatatacttagtatctttttcatatttcgatagatttaaaatgaaatagttaaacctaatgaataatttgggcgatcgcttaattgtatcgtggcgaaaccactttgtgtcggggtctgtcctttcaatctactggaacagatcgtgaacaggtttgccccggacagggttaaagcgagacgggacatgtgtaatttattcaggatatgttctccgaattcgtaggtaaggctcaaattggagcatttcaagtaattcccgcttactacccggtgattcccgtaatcatacatgttccacacggaattggctatcggttgaatatcggagtatgaacccatgtcactccaatggcggtagtatttgtagtaggcgtcacttcccgggctaataatggcgggaatgtcggtgtgaagctcgtctcccggtttttgccaacgtctcaagtaatctttgctgacgttattttcggctcgtatctcgttggcgttcatggtagcgtcggctttgggggaatacatggcaaataatcgaatcttgtttcccatgctgtaagcgaaggaaccgcttaatcggaagtttttccatcgtacagtcgtgtttaaacttccggatattgtcggttccctgtttccggaggcttcgagtacgcgggtgtacgtgtcgtacttgcttagacctctgaggacttctttgttgtccacgtaatcgtcgaaaatgggggctccgtccacggaactcaagcctaggaatttgtaagaatagaatgtcccgattggtttacctttcacgagtgcggttccgttaaggaaattgtccaattcatattcattggcatccggatcgctttgcattttgttgaacgtttttgaaaaggacgtggatagggtccaccttacatctttattgttgatcggggacacggttacagccacgctataaccactattgtcaacatccccgccattcaccacgtaagaattcccattcactccgttcatggatgcaatcgttttggtcatgaaagcgtcttccgtgtgtttccagtaataggaaccttcaagttgtactttgtttttgaacagggaaagttctaatcctaagttgtaggattttgttgtttcccactttaaatccgggtttgggtaacgctcaactttggatatattttcattgaaataagagtccagaggttttttcaagatgatcatgaccggggtttggtcactcaacatatttccttgatagccgaatgatgctttcaggcgtaagaaatcgatccaagaggtttgcatccagtcatgttcggaaatattccagttggcagaagcagaccaaatgggcaataatttgtcgttgctctggtccccgaaaccgttggaaccgtctatgcgggcgtttacgttgaccgtgaagtaattaaagtaactgtatgatacggaagcgtatgccgaaatggtgttagttagctggtcgctgagagaaggaacgttgcttgccaaccactctttgtaagccggataatcatccaggttaatattgttgacaaaactcatgcctcggtctttataatatccgcgggtcacgttctcgtattgtttgtaacgggtggaacttaactcgaatccggcagaggcgttgatgttatgtcggtcttcggttccgaaatatttgttggcatttaattgtaaacgaacggtgtatgaattgttgttcgtttcttggcgacttaactctcctccataaggtaattccgaatatccggcagagccactccatttttcccaatagtcatcccattctgccggttcaagaggtacgccgtattcggaaccccggagtaaggcggcgtgataacttttttctccccaccaaccttcgattgtcgtgtgggaggttgaataggatacgatggcattggcattcaaccaattcgtgaatttgaactgtaggttggcattcacggtcaaggcagaaccttcttgtccgtaagaactgttttccagttcgttcagtatgttgaagttgtagtaggtatagttattgtattttctttgatagaaataatattctcccttttcatcgaaagctggtagagcccgggttgttttgtaagcatattgcatgggagccaattcgttctgatagtaattgcgggaagatacatttccgttcatgcttaaagaagcggtcagccacggtgttaaattcgcatctaggttcagggctgccgtgtaacgttcgttgttatcatccccaatcacgtcgttatcccggttgtaaccgatagaggcatagtaacgggcttcttccgatcccccggatatactgatcgtgtgttgatgtgaaagactgttgcgtgttaataaatcgaaccagtcggtgttaaccgtttccagttttgccacttcctgatcgaattgctgaatgtctatttcgtgattgtatagttttgtgattaatccttcataccccaccatggacatatccttcgggaattgataatgttgcgcaaccagttctcgggaaaatcgcatacgttcttgtgaattcatcacgttgaccgatctgtcgttataactcgggcgttgacgtaaggtcatgttcatcgagtaggtaacgacgggacgccccacgtgtcctttttttgtggtaattacgattactccgttggcagctttggttccatatagagccgtggcagcggcatctttcaagacgtcgatacgatcgatatcctgcgggtttaacccggcaatggcgttaccgatacgattaatatagtccggatcgttcaattcttccggtgatatttccaccgggtcttgaatgatgattccgtcgaccacccatagcggttcgcggttaccgatcagcgtggaagttccgcggattcgtaatttgggaacaacaccgacttctccagagttgctcatgaacatcatgtcggggatttgtccctgcaacatttggtcgaccgatgatgccccgggaatcattatatcctccatttttacggaagtgacggcacttgtgttttttcgacggtcgacaacttgataaccagtgacaaccacttcgtccattttttgggaatcttcttccatgacgacggtcaaatcttggcccttgtaagggatggttatggttttcatcccgataaaagaaatgattagtacgatgttggagtctttgggttgtatcatttcgaactttccgttcatgtccgtggcgacaccgatgcttgtacccttgatcagcacggttacgccgggtaggggagctttctttttatccgtgacggttccccgtatttttttgatctgttcttgttgttgaagttcggctttgcgaatgacgatcaccttgtcgagaatggaataggtgtacccgctattctttaggcaagcgtcgagaatggttctcacgtcggaatctttcacgttcatggtgattgacccgatatggtccaattcttccacgttatagacaaacgtgtaatcgctctgctgttttatgatccggatgatttcccggatattgctattctccacgactaccgagaatttggcctcttgggcgtggattctggctgataggttcatgcagaataatagcatcaataagctacttaatttcataactaacagtagtttttttaatttttcacgcgcacaagcatgaataaaacaatcttttttcataattttgttttactgatttgtacttacactcactttgaccggggagtgtggttcacgaattatagcgatgggacgtgctgccaacatgtcccgtttttaattttgagattactggatgtatatggtttttccctcctttctgcacgtgaccacgtgcgtctcttcaatcaatttcagtacttgatcgatattttcgtaacgagatgtttcgatagtgaatttccgttgttttagactttctttttcgaaaacgacgttgaattcgtaccagtgcgataattcctgcatgatttctccgagaggtttctcgtcgaaatagaacatgtctcgtacccatgctgtgacaacattcgtgtccacctttcttacatcgatgcgggcgtttcccgatgtggtgacggcttgcaggccgggggaaatgattgtcgttgttaggccattgcctacttccactttcccgttcacgagggtagttgctacatttccgtcgggagcggaggtgttcacgttgaacgtggttcccaacacggtgaccgtggtgcctgcggcctcaacgatgaaatggcgggtggtgtcgggtgtcacctccagataggcttctcccgtcaggcggatttttcgttctttccccttgaattgaacgggataggtcagtgtactttcggaattgagtttcacggttgtattgtcggaaagacggacggtgtattccccgtatttgggaacgataatcgtgtggtatatttcatcaatttcaactgtttctttttttgtggttgcatagtcgattttctgtttttctgcatgtaaggcaacattgttatttaaagccagcacgaaagattgtgggtcatccagcgtgattttatttccgttttccagtacaagttgcacggcagaaacaggttggggagaggagattatttcttcgttcggttgtgtaagatagtagtatgtccctgttatggcaagaactaacacggcggcgcttgccaccatacggtagagggtacgttggaatggccggggagcctttcccccggtacgatattttttctcgaatagattccaaccttctgccgtggatggtgaagtcgcattttcgtcgaatgatttttggcgtaattgttcataaaaggccttgtttttttcgtctctttccacccatgcggaaagtctccgttcttctgatttgggcaggattcccaaacgctggagagcgatgaggcgggcaacttctagtttcgataaaatatctttttccatcttttcgttccgtttattttttgtagaatatccaattttcactttgaatacggatgagggtgaaaaccgggtgagtcgatttttaattttttttcggaaagatatatcatataccttgggaaacccttgaactatggttgcgaagccatatataataatgtgaatacatcttcccggttagctaatatactacatgatatgccttacttgcaagtataatcttatcaaagatctattttatcgaagttgaatgctctataaatgcaggatgaatgcttcgtggtctaaatgaactatcaggaaagtgctaggagaatgataaattgacatagcctaaagccggggtaaagccagccttttactagagtaataatctcctagggtcctttcatcacttttatcgccctttcattgtcctttgccaatataccggaaaaggcggggaggggtgacatgatagggtgcgggagattattaggaatataaaactgtgggataacggttgtataaccatgggggagtctgaacggggcatcggttttccggattaaaatggatttttgaattgttacattgaaaaaaaatttataccttgtcaactcattttgacaaggaaaattaatcattaaataaataataaatatgtttgataaaagcgtgtatgtaaatagaagaaagcaacttatcgacaagatgagtggcggcttggtattgatactgggtaatgaggaagctcctgcaaattatccgtctaacacgtataaattccgtcaggatagttctttcctttatttctttggtttgaacatgcccgggtttgccgggttgatggacgtggattccggggacgtttgtctgtacgggaacgacgtggacatggacgatattatttggatgggaccacaaccgagcgtgaaggatttggctgccagcgtgggtgtgacttgttccgctcctttcggtaaattggccggggctttgaaagaggccatcagccatggacgcaagattcatttcttaccgccttatcgttatcacaacatgttattgttggaggatttgttgggtattcatcactcgctgatcaagaattattcttctttggaattgatcaaggccgtggtggcattgcgttccgtgaaggaggcttgcgagatcgagcaaattaacttggcttgtaacataggttacgagatgcacgtggcagcaatgaaacacgcattaccgggacagaaagagcaatatattgccgggttgattgagggaattgcggcctcttacggaagtatggtttctttccccgtgatcctttcccagaatggcgagacgttgcataatcacgatcatagtaagacgttgaccgtgggacgcatgatgttgacggatgccggggcggagaataatatgtgttattgttccgattttacccgtacggttcccgtgggagggcgttttgatcaacgtcagaaagatgtatataatatagtattggattgtaataataaagcgatggagattgctcgtccgggagtaacgtaccagtacgtgcatctggaagtttgcaaggttttggctcaagggttgaaagaccttggcttgatgaaaggcgacgtgaatgctgcggtggctgccgggactcatgctttgttcatgcctcacgggttgggtcacatgatgggactcgacgtgcatgacatggaggatttgggacaaatttacgtggggtatgatgacgagactcgtccgattgaccagttcggtacttcttccttgcgtatgggacgtaagttacaaccgggattcgtggttaccgacgagccgggttgttatttcattcccgctttgatcgaccagtggaaagaacagggattgcacaaggacttcttggtatatgacaagatcgagacgtacaaggacttcggtggtatccgtctggaagatgatattttgatcacggagaacgggtgtaaatgtatgggtgaccatcgggcgccgatcaccgtggaagaggtggaaaatacgataaatggataaaaattataaagagcagatatgaaattcgttgtatcaagtagtagttttttgatgcggttgcaggccgtgagtaaggtgattagtggaaaacctgcacaaccgattctggataatattttgttggtagccaaggacgatacgttgtacgccacggcatctgacaaggaaacaaccatggaggccaagatcgagttggataacctggaaaccccgggaagtatcacgatcccggcgaagttgttgttggatattctgaaagagttcccggaacaacccttgacgtttgatattaacacggggacgaacgaggtgaagattatctcggacaagggagagttttccgtgccgggagagagtgccgaggattacccggtacaatccggaatggacgagagtgtgaacacgattgcaacgaattgcggtatgctgttggagggaatcacccgtacggttttcgccacggcaaatgatgatttgcgtccggtgatgaactgtatcttgatggagatgggaccggagaatttcacgttcgtggcttcagatgcccacaagttggtacgttacaaacgttttgacgccaagacggacggggatcagtttgcattgatcttgccaaagaaaccgtctttgttgttgaagaatatattaccgaaggatgacagtgagttgcgtttgcaattcaacgagaaaatggcttgtttcactttcggaaattacaagatggtttgcacgctggtggaaggacgtttcccgaactacaattccgtgatcccgcagaataacccgaaaaagattattatcgagaagaaggagttgtataattcattaagacgggtttccgtgatggcaaaccaagccagtaacttggtgaagtttgacttgagcaacggaacgatcgtgatttcagctcaagacgtggattatgccatgtcaggacatgaaacgattacttgccagtacgagggagaagagatggccatcgggtttaagtctcctttcgtgcaagaaatattatccaacctcaacacggaatctttggtattggagttgtccgatccgagtcgtccgggattgttcctgcctttcgagagcgatagcgagaacgaggatttgttgatgttattgatgccgatgatggtttaatcagtaaggcgaaaacttcgccttactgattaaaccaaatttaaaatttagagtttagaatgaaaaaacaactccctctaatatgacaatgtggtgtattctcccccattccaaggaggaactagagaggaggacagtctaaaatctaaaatcattcaatctaaaattagtaagttttggaattaaaattaaccaatccgattgtgttctttgatttggagacaacgggtattaatattgcgaaggacaagatcgtggagatttctgttttgaaggtgatgccgaacgggaaagaggaacagaaaacgatccgggtgaacccggaaatgcatataccggagcaggcatctgccattcacgggatttatgatgatgatgtgaaggattgtccgacgtttaaagagattgccaaggatttggcacgttatattgaggggtgtgacttggggggatataattcgaatcgttttgatattccattactggcggaggaatttttgcgtgtggacgtggatttcgatatgcggaaacggaagttcgtggacgtgcagacgattttccataagatggagcaacgtacgttaagcgcggcgtatcgtttttattgtaacaagaatttggaagatgcccacacggcggctgccgacacgacggctacttacgaggtgctgaaagcccagttggatcgttacaatgacacgctggagaacgacattgctttcctgagcaagttttcaacacagaataacacggcagattttgccggatttatcatctacaatgaagaaggggtggaggtattcaatttcgggaagaataaaggagttcccgtggtgaaagtattgaaagaacaacccggttatttcgcgtggatgttgaacggggagttcccgttgtacacgaaaaagattttgacggagatccggttgaggacggcggggttggtgaaataaggattattatttattttaagtatggtaaaaggggaaaaattgtaaacttttccccttttatttgttttgtccgtaacatacaactttgtttttttatttccgtatacaagtcaaattaactgattgataggatggttagggagcgtatcgagtggaggggaagtaatattatttgttaaaatgttttatttggcacattcattgctattttgtgcaattgtggaataaaattaatttataataaattaagaaggtttatttatccttaaatccgcaactccattcccgaagtgctacctacataaagaggaatgaacttttgattcgtaagacag

SEQ ID NO: 10830 - DNA, 4013 bp, Unknown
  gut microbiota DNA sequence
cgatgaggatcgtgatgtcttggccgggttgatagatttcttgaagtgattttttatacccctcgtcacaatgagcgatacattgcaacgtggatggattgttttttacgaaacgggaaaattctgtcagggggttgagtttcggtaaataggctttcaaggattgtttcatggcggaaataatcactttctccagtctatcttccttgatcaccttgcgttccgagtgatcgcagagtaggggagtaatttcgtcaatcccgatctccgtgcatttttccagaaaccattcgattcgttcaatattttttgtcggggcaatggcaatatgaatgtggaaagcccgtttcccgtactcctctgttttttccacacagcgaacttcacagcgtttcggttgtgcctggataatctcgcatcggtagaaaccgcctttcccgtcgataaggaaaatttcgtttcctacctctaggcggagtactttgatacaatgtttggattcctcttccgggagcgtgtactcgtttgtcgtgatgtccggcgtgtaaaacaggtgcataaattgagtgttttgatttcgatgcaaaaataagaaaatgtccttgaattgcggtcgttctttaagaaagaaagccgatcaatgatcggctttctgcttttctgtctattcgtcttcttcttgctcttggtaagctttcaacaattcttcttgaacttcagctggtactttttcatatccggagaaattcatggtgaaagtcgctcgtcctcccgtgatggaactcaatgccgtggagtagcgttgcatctctttcaacggtactttagccatcaatttctggaatccggaatcagcttccattcccatgatgattgctctacgagtttgcagatcgcccatgacatcacccatgtattcatccggaacgagaacttccacgtcgtagatcggctccaaaatcttcggggatgcttgtttgaacgctgtgctgaaagcgtgacgtccggcaagtttgaacgaaatttcgtttgaatccacggggtgcatttttccgtcgtacacgctgacacgtatatcccgtgcgtatgatccggtaagcggtccttcttccatcttttccatgatccctttcaggatagcgggcatgaaacgtgcgtcaatcacacctcccacgatacagttgtagaataccagtttaccgccccacggaagttcaacaacttcggtgtctttcacagaaattttactatccacgccattgatcttgtacatggttggggcgggcattccttccgtgtagggttcaatcacgagatgaacctcaccaaattgtccggcaccacccgattgcttcttgtggcgatagtctgcgtaagcgtatttcgtgatggtttcacggtacggaatacgtggcgggtagaattcgatttccagtttatcattgtgctcgatacgccatttcatggtgttcaagtggaactcgccctgtccggagatgatcatttgttttaattccttggaatattccacgaggaatgtcgggtcttcctggtgaatccgttgcaggatttccgccagtttttcctcgtcgctcgtgttcacggccctgacggctgttctgaaacgaggattcgggtattgaatcttgccgaacttataatgaacgtctttctcgttcaatgtatcgccgttattcgtgtttttcaatttcacggtagctccgatgtctccggccatcatttcagtcactttcgtccggttctttccggccactgcgtatagtgttgagatacgttctttcgcatcattggtgacattgtacaggtcgtccccctcgtggatagtcccggatgctactttaaagtagatcacttcacccaagtgaggttcaaccgtcgtgttgaacatatataaagaagttgggcctttctcatcgtacggaacttcgtccccgtcttccgtgatggaaggtggcatggagctggcactgggagccacattgatcacgaactccataaaacggcgtacgcacatatctttttctgccgacacgcagaaaacggggaacatatctcgtgcgataagtcctttgcggattccggcacgcatttcatcttccgtgagactacccttgtcaaagaataattccatcaatccctcgtcgttttcggcagccgcttcgatcagtgcgttatgtaattcgttcgctttttcttcttcttccttgggaatggggagtacgtcgggtttaccgccttccggtttccattgatacatctccattttcaagacgtcgatgacgcggttaaagccgattcccgggttcaccgggtattgaactagcacaactttcgagccgaaagctgctttggcctgttccaccgtgtgatcaaagtttgctttctcgtgatcaacctgatttataacgaaaatgagcggtttatttagtcttttggcatggcggctgatgatttcggtaccgacttcaatacctctgacggcgttaataaccattactccggtatcaacaacgttcagcgcagagataactcctcctacgaaatcgtctgctcccggcgtgtcaatgaaattgagcttatgctctttccattctgtatataatacagccgggaatactgatgatccgtattcctgttctaccggacggtagtcggatgaagtgttttttgcactaatgctacctctgcgcgggatgaccccgccctcatacatcatagcttccgctaacgtggttttgccggacccggcactacccacgagcgcgatgtttttaatttcgttaggtttataggttttcattataatacggtttagattaatattgtaaacgtatataactcttcgaatgattcgagggttacaaattagtgaagattttctaaaaaaacaatagagaatgtcattcttgatgaaaataaatatagaaagcccgtattagtattttttatatatcatgctctagggcgatggcgtactttttgtatatctttggaaaaactttaattgattatttgaatatggcaggattacctttaatttggattatatttatcgggtttactttgttgagctggctggtgagccatcaattacaaagtcgttttaagaaatactctaagatacctactgctaacgggatgacgggacgtgacgtggtggaaaaaatgttacgggataatggagtgcagggggtgaaaatcggtagcgtggaaggacaattaacggatcactacaaccccacgaacaagactattaatttaagtcacgaagtatattatggtgccaatgtggcagccgccgctgtcgctgctcatgaatgtggacacgctttacagcatgctcaagcgtatagtatgttgcaattacgttcggctctggttccggtggtgagttttgcgtcgcattgggtgcaatggattttgttggcgggaattattttggtcgacactttccccaatttattgttgatcggtatagctctttttgcgatgacaactttgtttagtatcattactctgccagtcgagatagatgccagtcaccgggctttggcttggttacgtaattccggtatcacgacttatgaatcgcaagagagtgctaaggatgctttgaaatgggctgcgtatacctatgtgattgccgcactttcttctttggctaccttattatattatatcatgatttatttgggaagaagggaataaaaggtgctcccaaatcctagcttcaaattccctctatagaaggaaaggggaatctttatctatcctctatccttggcctaagatactaagggaattcttacacatcacaaacgtagtatagacactaatgtatgtatatgctgtgttggtgatgtgtagttgttgtgtttatggcttagagtaagggtaagccaagcttaacgtaaggataggtgtattgtcctgaaaaaagtttacagtaaacttagtaaaccaatgtcagaattaaatttaccctctgttcg

SEQ ID NO: 10831 - DNA, 278 bp, Unknown
  gut microbiota DNA sequence
ccgcgtagtcgtaacagcaatttttacccgatgttactaggtgtgttgaaagaccaagaagaagaagcccaaaaactggtgagcagtctctattgtagcggtttaaccacggaacaggtgggtaaaatctacgaacagttttacgggaagcattacagtaaaagtcaggtaagtcgcctcttgaacacggcccgtgaagatgtaaacgcgtggctggggcgtaaacttgagaagcgttaccccattctttatatcgatgccacgtatgtcctcacccg

SEQ ID NO: 10832 - DNA, 568 bp, Unknown
  gut microbiota DNA sequence
atttatgtgttcgcaacatctaaatatagctactgtaagctcataaaacagtctaatcagtcaatccataccttctttagccatttttgcacacatcttttttatattgaaggcaatggcaaagaaggcaaagtccatgaagatcttatcctttccaaaatggcggaaacgtttgtagttcatattgtatttcatttgttcaaacacagcttccggttctatgcatctctgtcctctgtgtttcagtccttccttggaacacagcagctctttggctttctgcctgtatcttctgagtctgtgattctgttctatcgtcctgttcccctttgccttaaaatatcggcatcttaggacagccttcacacctgacagttctgtaccgtgcattttcgttgacatatccggatgcggttttcacattcctggtgcctatcctccgcatcctttgccccatagggcagatacaaaagtcatgttcttcattgtagtagaagttttccgccttgaacgggtccggtttgaacctcgaccgctgttccatgtggaagtagttgtacttgacgcc

SEQ ID NO: 10833 - DNA, 6822 bp, Unknown
  gut microbiota DNA sequence
gtcgtcgataaatactccacctaagacttccgtctccaatttttcccgggcattcatcaagttataatcactaagatcaggcatgtttaaagttcccgtcatggtataagtcgcgtgtacctttcccggtgttggaggaaccgtcgtgataacaacaaccccgtttgccgcacgggaaccgtacattgccgtggctgccgcatctttcaagatcgtcattgattcgatccggttgggatccatatcatacactttttgtatgctcacctgaaaaccgtccatgataaatagcggtaagttcgggttgtctttcaggttggatttagatagtttgtccgtgtccaattccttcaccccgataccagagcgccctcggatgtacatttctggaagagcgttcgggtcggatccccattgattgttctcgaccatacgaaaagccggatcaaaaacttgcaaagctttaatcacgttggtcttggatactttcaataattcgtctcttttcacgctgacagaacttcccgtgaaactctctttactgatgttgacgtaaccggtcacaacgacttcatccatttgggtgacgtcttcttttaatttgataacaagtcctttttcgtctttactttcatcattgctcacgtgtatattctgagtctcgtaaccgacaaaagaaacgatcaaaacgatggtatccatcttcgggatttcaatcttgaaatttccatcatggtcggtgactacccctaatttcgtgtctttaagcatgatcgttgctcccggtagggtgaaacctttgtcatcggtaacctttcccttgatgatccgggacttttctgttttttgaggagcctcattggtcggttttataataatgacttcgctttcgatctcgtaagacaaatttgtcccggcgagtgcggtttttagaaattcctcgatggatacgtttttaagatctatatcccgtttcccgtatttgtttacttcctcaacccggtaaagaaatctatagttcgtttctgtacggatcgtttttatcatttcatcaatggtcgcattctccattttgagagagaccttgatgacttgtgcggaagcatttgcctcaatgttgagagtggaaatgaccacaaccaagagggttgctcgtaaaattagaagaattttctcccacctttgatgaaaatcaaaggtgtactttcgttttttttccataactttgagtacttaatagtttaaattaatcgatttctaaatttcgtgtttatgaattgattattaatggggatagggcaaatatccccttttttatttagttagtatttcttcaacggtgatgttatttccattaattttaaatcgtatcgaggttgctttctcgatcatacccaatgtttttttaaaatcgccatatcgttccaagtctcccgtgaaatgataggtctttaaggcttgattcgcatagaaaacattaacgttgtaccaccgtgatagtgttgtcatgatctcttcaaggggtttattctcgaagacgaacaaaccttctttccaggcagagtataaacggacatccaccttgcgagtcgtgatattcatggtcactttagaataaaccgcctgttgtgaaggggtcaaggtaactttctgttttccatctgatacattaacggagccttcgcatagtgttgtttcaatcgtttgggcatccgggtaagcttgtagattgaactgagtccctaaaacttttacttcaacattttgccctactttcacggtaaagggtcttttcttgtctctcctgacagaaaaataagcctctccggaaagtgaaacttctcgtttcgtggaatcaaaccgtgccggaaaagagagttccgagtcagaatttatccagacgtgtgttccatcgggtaaaataagctcatattcacctcctctgggaactcggatggtattatttcgcattttttgatggatcgaggaatccgaacgctcaacatattcaacaacattcccattgttgattgctaccaacccgtaaccgagttcaagtgtctgagaagaatcctgctgtgataaattgaattgcttaccctccggggtaattaatatcgcttttgaacttccggtctgaatctctgcaagcggtaaagtcgggtcaaccgaaactcgtgattcgggcaagatcatcactagagcgatgataattgcagcggcaacacttgaccaccaaacaaggtttcgggaggtatgtttctttcgggtaatacctttttcaaccttttgccatgatgacttcgtgtctaaactatttacgaattcatctctttgacgtttgtttgcaggatccagtattcgtttattcagttctgttgccgaaagggaagtattttcccattcgtgcaactccagtttctcttcgggagaaagttctccggccattttcttggctagaagctgggcgatccgatattctttttcaaattctgacattatattctaagtttggtaccattatctgtttgtagaacacacgttcatgtcaaaaggatgaatgaaaaatcattttttttgcaagaaaattttatttcattgtaaaatattactatataggtgtaatatagagtgtgtgttgtctgcttaaacagataacacatactcatttatattattttttgcgacgtttccaccataatgcaagactgaggaaggtcaatattccgggtaaaagacccatgaaaagaatcttgatccatagtccccattcttcgttgatgttaattttgttgtccgatgaacctttgcgactagtgtcaaccgggaattccccgaatgaaagaaggcggaaagactccgtgatcacgctaaaattggcagaagaaataccattccgttgacgggaaagctccccgttaccgatacaatctgcatccccgagaacgataatgcgttgttctctgttattcacttctcggttcaggtacatcatggttgtgttggcttgctctacctccccgatactaggattgattcgagccgtgtcttcaataaaatttgttgtttccagttcattccatgagccggttgaatccgttgttaatatgggaacaaccttgaatcctttctcttctgtctgctttatacccacggcggaaggcatggtgatttgattaccaaaagctagcaatttgtcaaacctatttatcacattaagagaagccatcgtgggattcgctaggattaggtctgtagagaaatctttactctcttgcacgagaatacccggcataaatgacaatccgagaggtgcaagcaagggattcatttgttcttggcgacgcggttccccggcgataagaaggttacgtccctcggcaatgtagttttcaataatctcctgttctttcggtgataaagccgtgcgaacatccgagatcacgagaatgtcaatattttcgggaaccttgttcacgctatcaagggaaagagatatgctctcgaaaccttggttcacgagtgaatttctgaaatctttatactgggagaatgcgtaataatcccgttcgccgattccatctatgctacgttccccgtgaccggtaagaaaagccacgacgggggattttatgaccatgcgtttcaatgcggcactaatctccgtttctgtcgggtgacggtaattatcctcgtaaaggcgtagataagacttttgcccgttacctctttcaatcacgcggacatatttattatattctccggaaaggtcttcttttgcccggatctgttcgggagtcaatactctttttacatcccagtccagtgcatcacatatttttttcagccgttgctcatcggtaagtccgggataacgctgttctagagttggattgtttgttttgtcataataatacacgtatttcattttgatctccggtttgaaacggatgtatttctcaaagcgattaaaatcctcgttataatagcggggaagagcccggaaatagttttcatcgaacatattcgcataggtagtgatcgttaaagggccatccagcttttccatgatatcaatactgttttgcgtcaacgtgttttctttcatttccgttgcgtcgtaataacagcgaagcgcggggcgggcactgaaataaccgatcaaaagggtcaccacgataacacccccgtaacgaagcatgctctgcaaggcggaaagtttcgtgcgttctgcttgtagacgtaaaatagaaagcgtcacgaaaagaacgataaccagcaagaaataaaggaaatcctcgctgcaaatcaagcctttaaagaaagtgtctgctcgtcctgaaattgaaagccaatacgtgatgtcccggacaaacgaaatttcttgtccgacatgaccgatataattcagaacggcaagcaccgcaagggttccgacagcggcaaccacctgataggaagttaacgacgacatgaacaaaccgatcgcggcgtatgcgcagatcatgaggaatactcccaatagtgcggtcagggcgaatggcgtgtctatattctggatcgtgaaagccgtgaatacataataaataaacaaaatagctaccagtatcgcggcgcaaatgaccatggagagatatttcccgaaaataatctgtcgattggtaacgggtgaagaataaagtaatttgatagatccccggttatattcttggctcatgagtcccatcgtgagtaggggaatgtacaggaataggtgttcctgcatactggatatagctccttcccagcctaaaagtagacgtccggtgagggaactgggattgtacccgagtgctaccgagcgtaggatactgtcccaggcgttagcgtaggccataccggattgaaacgtgaagataataagaatcaaccacgctatcggtgagtagaatagcgtgctcaattcgtttttggttatctttaatattgttttcatagattgaaatagcatttactgttgtactttttttcctgataattgagcgaaaatggcatcaagagattgacgttccagttgaatctctgaaagttgccaaccattagcaacacttaactgcacgacctgttcgctgatatctttagaggcatcgaattgcaggcgatagttgcggggatctactttttcgactcgggcaactccttcaatcgcttctagtgttgatacgggaggagcggcatccagcgtgatcaggagagtggaaggagccacgtaattgttgaattcatccattgatccggaaaataccaatttaccttgttcgatcatcttgatattgttgcaagtggcctgtacttccgataaaatatgcgtggaaagcaacacggcatgatccgtggcaatctctttaatcaagtgacggatttccacgatctggttgggatcaagcccgttcgtcggctcgtcaagtaccacgaaacgaggattgtgaacgatggcttgggctattcccacgcgctgctggtatcccccggaaagattactgataatacgttcccggaaatgagtaatgtcacaacgtttcatggccttttcaaccgcggccggaatctcggacgtgttcatgagacgcaggtttgcggcgtaagttagatattcctccaccgtgatatccgggtagagaggaggtttttgggggaggaaaccaatatgtcgtttggcttcgacgggatttgttcggagattatagccgttcaggtaaacctccccctcggtctggtttagcacgccgcatataatattcattgtggtggatttgccggctccgttggaaccgagtagacccaaaacacctttttccttgatctcgaaattaatgtcttgtatagcccattgtatgtgatatcggtgagacagatgctcgacctttacaattgaatcttccatatattcattcatttaatgttaaaacctttaagattctgatcttttcgggatgtaccttaaatcataaatctaaaatcgtgcgtccctatctccctttacgtttgtaccacaccatgaaacccgcgaaggccagcaggaacgggatgacgcccaaggcaaacaaattgagccacggttcaattttccgggtcacgcgcaggccgttatcaatggcctggggacgggatgtatcaatgggaaattcaccataagacaaccatttgaatgtctgcgagataaagttgaagtttatggcgaacataccgttacgaccgttagcaagttctgcattgctgatacaatcggcatcccccgtgatcacgatacgttgctcttttccccctttctcgcgagttaaagaaagcacaactggataggattgttctctctccccgatcgcttcgttgagcgataattctccgtcaagaaaatccgtggtttcaagttcattccagctaccttgtgggcgggtaacggcgatcggtttgatatcatattccttaccggttacatactgaaggggagaaacgtccggcatgacgatcgtgcctctccagccttttaattgggcgtaactggggctttgagctgcggcctgatctgtgagttgtgctgtgatgattgacgggagataatcgggattccgttgcaccagcgtgcctggcataagttcgactccgaattttgccagtaccgggttcatggcttcctggcggttcggttctcccaggataaacaaattgccgccacgttcgatataacgttccagtctttgcatctcctcgtcggaaagcggtgttctcatgtccgcaataacaagaatattcacgtcttccgggatttcccgctccgcgatggag

SEQ ID NO: 10834 - DNA, 5081 bp, Unknown
  gut microbiota DNA sequence
aacgatcaccggaactgttcacgcttcgttcgccgtgtccggtcaggaaggcaatttggggagccggcacgagaaaacgtttcatggctgtggtaatttccgtctccgagggatgtttcatcatgtcattatagaggcgcaagatcgctttttgcccgttttcacgttccaatacgcgtacgaaacgatagccttctgctttcaagtcgatcttctggtctatttcttcgggtgaatggaacatgtcaaaatccaactccataatcttgctgatcttttccgccctttcttttatcggtaattcatcgaaacgtcccgggaatgacggctgtaccgaaggtgcgtaataataaacgtacttcattttgatctctggcttgaaccggacgtattgctcgaaccgggcgaaatcatttttcagttgatcgggaagtgcgcttccgtaattttcatccagaatattcatgtaggtcgtgatcgtcagatccccgtccagtttctttaccacttcttgacttccgggagtcagcgtgtttttcttcagggccgttgcatcataataaaacttgctgatcgggagtgaggtaaggtacccgataaataacgcaccaccgatgacaataaaatagcgggcaagcgtgatcgtttggcttctcctcttacgtgcggcttgtagtcgcatggtcgacaacacgataaacaaagaaatcacgatgatgaaatacaagacatcctcgctacatatcatccccgataaaaacgggtaagtccctccggaaatagataaccagtacgtgatatcccgtacgaaagagatactttgtcccacgtcgccgatgaaattaagaacggcaaggatggcaagcgtgcccattgcggccaccacttggtatgacgtgatacttgacatgaaaagtccgatcgccgcgtaagcgcaagtcagcaggtaaagtcccagcacccccgtgaggacgtacgggagatccatgttctctatcgtgaaatagccgaaaaatacgtaaatcagaaggatcaccatcagcatcgccccgtaaaccagcatggataaatattttcccaggataatctgggttgtcgtgataggagacgagtaaaggaatttgatcgaaccgctgcttaattcccggctcatcagtcccatcgtgatcaacgggatatataaatacagacttttcaccatcgaaaccagtaacccggtatacccggcgaatgtttgcatcgtgacctctcccagaccgtattctaaagctaggcgtttcaattgattcccgaaattttcactgaaattcaatcccgcctggaaagcaaaaataacgagaatcaaccaggatacaggcgaacagaataatatgcgaagttctgtcttcgctaatctgaatattgttttcatgttggatactatactttatttataaatatttttcccggataattgtgcgaatgcagcgtcaagagaatccctttccaggataagctcgtgaaggcgccagttgttggtcacgctaagttctatcatctttttggtaatatcttgtccggatgaaaattgcatacggaaacgggtgtccgtgatatgttccacgtgcgtgatatcggggatttgtttcaatgcctctattgaaggaggattttccatgataacgataaacgtgttcggctccatgtagtgattgaaatcttccatactaccggaaaagacaaccttcccgtgctcaatcatcttgatgtcatcgcaggtggcttgcacttccggcaggatgtgcgtggagagcattacggcatgatcttctgcaatttctttgatcaagtggcgtacttccacgatctggttcgggtccaaaccgtttgtaggctcgtcaagtaccacgaattttggattatgcacgatagcctgggcgatccccacgcgttgttgataccccccagacaggttgcgaatcaagcgtttactgaaatgagcgatcccacaacgggattttgctctctccacggcagcctttacttgcgatttatctaccaaacgcatcaaggcacaatgtgtaagatattcgtccaccgtgagatccgggtatagaggaggtttttgtgggagaaaaccgatgtgctttttggcttctaccggatgttccctgaggctgataccatttatatatacctccccttcggtttgattgagaacaccgcacatgatattcatcgtggtggatttgccggcaccgtttgatcccagcaaaccgagagttcctttgtttttaatctcgaaattaatgtcttttatcgcccattgcacgctgtagcggtgagagagatgtttgacttttacgattgattcttccataaatttttatcgtgttattgaattttcttttctaatagcagaacacgacaaaatttgaaaaggatgaacagggataacaattttcacattattttgacatttcttttaggattatttttccaataggaatagcatcaagaggtagaaatagtcttttaatgaatttcgtagtacgtttagtgcgttgtattttagtgttttgaccgaattgacagaaatatcaagtatttctgcaatttctttgttttgttttccctctaaacacattttcacgattcttgcactttggggcgggagggcattcacggcattatcaatgatgcggtaagcttcttcttcaatgaggtaatctttgaatatgacttcctggttttgggcctcgggagatgtgtaatctatggtaacttttttgtctcgtatataattgaaacatagatttttcacggacacgtagagaaatgttttcaaacacgggatttctttataagccgtacgtttttcccagagctttataaatgcttcttgtgcaatatcttccgctgcatcacgatcggtaatgaatcgcgtggcaacagcgcacatcgagggataaagctcttgaaagagagcttcaaaagctttgatgtttccatttttaatcgattcatatataattggatcacccatagttgcattaaaccttcgttttatgataggtgtaaaatgtttttttgttcttttttcgacgaaatagaacttcctcatattcaattaataaaaataaagggtacttgttgctgtcgggattttttttactatttttgaactcataaaacgaacgtttaatgatagtatttttaatgcccagtagttaatatattgttcctgtgtgagttaaatattgtttaggggatttatattgtacaaaagaaagtgactaaaaacggtacgcttaaatctaccaggatcccgtgaacgattgatataattacaaactctttcccgcaaaacttcgtgatgataggaagtgtggtatcggcagtagttgctccacccacggaaatgggagcaagtttcccaaaatagcgtacaagtaagggggccgctaacagagcaatcaattctcgaagaatgttggaaacgagagcgattgtaccgagttccgctcctttgtactgggtgataaaaatagttgagagagaataatatccgaatccagaacctacggctaggcagtcagttaggcttttaccgcttaagatgacactgattaaagcggagccggctaaagttccaatgattgttgccaatggaaccaaaataattttgaaattctgatgctttaaggcttccaatgcttttttatcgcttccaatgctgatgccgacaaaaaacatgagagcatacaaggcataaagggtgggttcttcagcggttaacagagagggaacatttacgaatttgcctatcaagactcctgcaataaagaaagaaacaatgatgatactacctttcatggatggaattatttcgtggacatgaagaaaaaacgatagacaccccaagcgcataatacgcttcctgcgattgctgccagggtaataagtaaagcttctaagccgatagagtcgagattattcattacatccccgttagcaccaactgtgatccctaaaagaaataaaaggagaaatatggcataattaatgagtttttgcacgaatttcaaatttctctctttaaaagcataccctaaaatgatgccacaaaccatcaagctaataactataatcatgattttagatttctttccgcaaaactacgatttattttgtaaaactgctatatttataaattcgtacttaaaagtgtaacattaattgaatgtgtcacgtttatctattctatttaaatctttaaaatgttgttatgaaaaaagtgatttcgtctataattgcccccaaccaaaaatttttaagtttgggcttgttgattttgcgtgtattggttgggataactatgttaactcatggtttagccaagttgacgtcgttctccgaattgtctgctactttcccggatcctataggtttaggaagtacgttgtcattgattttgattattggagccgaagttggatgctccttattcgttattgtgggagcttttacacgattagcaacaatcccgttggtattttctatgttggtggttatatttgtagtgcatgccaatgatccatttcagatgagggaattacctttcctatatttaggtatttatatcttgctgttttttacgggtgcggggaaaatatctcttgactcgataatttctaaaaaaatagatgtaagtattcaaaaataaagagataaagcaggaatcctaagggattacctgctctgttccatctagaatgggaattacgttttcgtcttcttctagtatcgttgctgctaagagccaatatattaatagaataatggcgatagtaattccgacaatcgtccaagggttagtttttttctttttcatgcttgctaatattataaatgttttgttaagcatgaacgtaaatcaatgtattttgtttgtttatttgagaatattcttaaatatgtagactagggaggagcggtatgagtaatggcttgtggcctaaaagaacattataaacaaaaatcagccaccttgtaagtgactgattttctgaggtcggtagcagatttgaactgctgtacac

SEQ ID NO: 10835 - DNA, 11597 bp, Unknown
  gut microbiota DNA sequence
tactgcaaaattatgacatttaatatcataacaaattttttgaaagtatttttttattgttgataattatgtagttatgacattttgtattatacaataataatcaaataaattaacatcattaaatgatcgttttttgatattaataataaatcagaaatattacaaaatcatgaaggtgtgtgtaactattcttattttaataatgcttttaataggcatgacacgtgtttgtgctcaagaacatcgacacaaaatagattctgtcaataatattgtattatattttaaaattgacggggctattttggacagcacgtacatggggaacagcaaatcgttgaaaaaactggacgaattaattaaaaacaaattaatcatatccaatctagattcaattataatcgtagcatcctcatctcccgacggaaatgaagtctataatctaaacttgtcgaaaaaacgagcagagagtgtcaaaacttacattacggggaaatacccaatgattaaaaataaattaattcgggcactatacacgggtgaaaattggactgattttaaacgcatgatcgaaacggataaaaatatcccgtatcgtgaaaaattaatttccatcataaactccaaccgtgaaaacggggctaaggaatggttaatcaaaacgttggcaaacggggaaccctggcgttatataaagaaaaattttctgccacaattacgtgcaggagctgtttgcgtgatttattacaagcgtgaaccggtcaaagaaacgccaaaagaggtgcaaaaggaagaagaaaaagtgctcacccctccctgggaaccggaacccgtgacatcttcaaccccggtgatcatcacgaaacctttgttcgccattaaaacgaatttactctatgatgcgctttcagccgtgaacctggagatagaggtacccgtcgggaaacggtggtcggtagcggcggaaggcatattcccgtggtggaaagcctcgcgagctgactggacgatgcaactactggcgggacacgccacggtgaagtattggctcggggaccgcgacgcgagagacgtgctcacgggatggaatattggattgtacgggggagccgggaaatacgacctgcaatttttcgacaaagacggggaacagggtgatttcttcgatgcgggaatccaaggagcctacgcccacaagatcggcaaatgcttccgcatggagtacagtctcggcgtgggttatttgcaaagagatagtaagaaatatgataaagcgaacgacacgatgcacggggacattaaagttttcaggtatccatgggaagtcaaaagacggcaatggttcgggcccacgtctgcgaaaatttcactcgtgtggttgttaaacaaaaaaacagtaaagaaagaaggaggtgtgaaatgagaaatatagcttatatcgcggggctttgtttcgctcttgtctgttcttcttgcgacagagacaggctgtattacgccacggaagaacacgggttcgtacgcctgaatgtcaactggcagccggcacaactggaaccgaacgggatatcggtctacgtgtttgaccgcaagaacgggaaagctgtcggcaaatgccgggtatgcagtgaccccaacacgatagacatcgccctccccgtgggaaaattcgacctgctgctcgtcaacaacacggaagaggagctggcggcaatcaacttcacggatatcgacaacctgtcgacattcaaagcctgcctggcggctaacgaagaaccgctatactccagccttctctcgaaagcggaagggacaaccagaagcgcttacctgacggaatgtgatatccttgcgagcgcgctcgcaaaggagatagagatctccccgcgagacatccactatttcaaggaaaaaccggcggcgggggcgtacgagataagccgcaccgtcgaggtcatcccggaacggcggacggaattgatcgacatcgagatcaaggtgacgaacatcacgtcggcggcaggggctccgcgttcccacctgacggccatgtgcgagggcgtgaacatggaaacggcgtccaaatacgggaacagcgtcacgcacgagttcgtgctgaataacaaacgcatggatcccgacaaccacaaggtgggcacgatatcgaaaaaactggtttccttcgggccggaacaggagaacgacgcctgcgtcaataggcaccaactcgtcatgcacttcgtgctggtgaacggggaaacccataccgtcacgctggatgtgcgggacttgataaaaacgtcgcacgacgagacccaacgtgttcacaagatcagggcggaaatcactctcccggaagctatcggtaacggcgacggggtgttcgaccccgacatcgaggagtgggaagagattgaaacggaattaccaatttaagtttagaataaatatttactcattttttaatttgttttatcatgaagaaaaacttattgtacgcactaacagcggtagccatgcttaccggttgtgcgaaaagcgacgtcgttgattcggaaatcaacaaggaaggaaacctgatcgggttctcgacctataagaacatatcgagaggtaacccggtggatgacaatagcgaattcttgacaaagggcaacacgttcggtgtaaccgcatttatcaataccgagggggttacctccccgtacatgggaatcaccactgaaggtatcgagattatatccgatggtacaaaatggacatatgcgaatacttccgatcaagcgtactggcccacgaaggacgaaacgcttgatttttacgcttacgccccgtataatcatccttccacgactaaaacgttcgataaggcaaacggcttgacgctagagtacaccgtgcctgccgaggaagcaaaacaagtggatctgatgtacgcatcggctcttgagcaaacaaaacctacagacaaaaacagcgtaaccctgccattcaagcacgccttaacccaggtgcatttcaaggtcgggactaaaaccacgaacttgaaggtggatatagcagcaaacggtatccagattcataacttgaaaaactcgggaagtttaaccatgaaaagcaaccaaatagatgatgctgcgtggacattaaccggtgatgcaaccgcgaaatatacggttacttcagatgcggtaacgggagattatactgatggtaccgaagcaaatccctataccgaaatcggaaatgcaaataatgctttgatgttgttacctcaagaattcgtggcaggtgacggaacagcggaaaacacaggagcctacctgacaatctcttgcaaaatctaccaagtacttgctgatgggacaaccaaaatctacttacatggtgacgctgaggcatttgctcccatcacagttggaatttccagtgcactccctgcggaggaaggtggagaagctactcaaatttggcaaagaaacaagaaagttacttacaacttgctgttcggagccggtgatggtgttttgttccctatcgaattcgcaaccgaggttgaagaatggcaacctgctgatggtggtgtcattgaacccaaataaggtacaaatattctacaaccactagcctaacggctcacccggtggcggttgaatgtccgtccccgggtactagtaaaaactcaaaaagtcaaacgatgaaaagaagagaatacattttattgtcggctgcattactgatcgcgttcacatcgtgcgacaaaagtaacccggaacttgttaacgaaagtgacagaatagatttcgtcgccacgccattccacgaatccttcatccaagctaatcaagcccgaggaagcgaaacaaggaacgacaatatacaagatttcggtgtatacgcctactacacagccgatgtttttaatccggtgtcaagtaccccgaatttcatgtgcaacactcaagtgagaaagacaagtaaccaatggacgtacgagcctctcatgttctggccgaatagcgggacattgtcatttttcgcttattcaccctatgcgaaccaaggagattcgtacacctctttaagttcaaccccttctacagaggggtatccccaactggcttacacggtaccggatgacgtgacgaaacaacgggacctgctggtgtccgtccccctgatcgatcaaacgaaagcggacgtacccgccggaggaaaactgactctggcgttcaagcacacgctcgcctgcgtggtgttccaggccaaaatgacagccgcacgcgagcttccggtgaaagtgacatccatcaccttcgggcaactgaaaaacaaagccgacttcgcttacggcgacaccccgggaacattctcgtggacggtaaccgccgacgccaccgacaaatcctacacgctcgccatcgataacaacctgctagagaacacggatatctcgacgacagcatcggattacctttccatctcccctgccgactcgcacttgttgctattgcctcaaggcatagacgcaggtgacgaaatcacggtaacggtggtctacacgcttgccgcgggagaaaccaagaccgtaaccaaaaccgccccgctaagcgaccttataaaaaacgagctggaagcgggaaaacgctattcaataaacatcctcgtttctgccttggcagatgtcacgctaacatgctcggtagaagagtggaccccaaaaactgttaatatgcccgatttcaaataaaagaagatatgaaaaagtatatatacctgttatgtgttttgagtttcgttttaactgcctgtcgggacgataaattcggctcggaagaaagtagcggaagtgcggcgttaaaattgaagttcaacacctcgaacaatatgtcgagagccgtgtcgagtgacgaggaagaacgacggatacaaaatgcttacgtgtttatcttcaaccaggatgggacaaaagtgtttggacgattttacgacgggatcaaccaacagaacacgtatcaaatcgagataaaagacatccctgccgggagcgataaaaccatagccgtcatagccaatatcaacacggcgattttcgacctgacgacagcggacctggaggcgataaccacgcaacccgatttactggcattgacttcccgtatgcaagacgggttcatcgagaggggttcccaattcctgatgagcggaacgacaactgccgacttaactgctaacaccaccaacccggtaaatgtccccttgaagagagtggacgccaaaatccgtttcaacgtgacgacagcagagggggtgaccttcaccccgctcgactggcaggtcgtgacagtaccccaaatcgtgaacgtgctcccgaccgaggtgcaaggacaatttgaattcgagggtaattattttaacagcagttggaacaactttgaaatcacggcaacgaacaccaacaccttcgcgttctatgtccccgaaaacaaagtaaaccccagaaaaacaattcctgcggtgggaacatatgctgggcaatatgcgttgcgcgagaaacaggagaaaatgcctaacagcgacggctccgtgacaaacggtgcgtacgaatacgccgacgagagagccacacacgtgaaattcaggggaaatattcactatataataggttccggcaaagaagtttcggcagacgtgacgtataccgttcatctcggggctgtaaccggcgtgaatgactataacagcctccggaatcacttttacacctacaacgtgaagatcgtgagcgtggatgacattatcgtggaagtggaatcaacgacacaaggagaaccatcccccggaagcgagggtgatgttgtgcttgccaaagaagttctggaattcgatgcgcataacgaagtcttcaagaccgttttccatcaaagtgacatcgaccagtcgctgacgtggaacatttccacccctttttccaaaggagcagaaaatgagaatccaaaggattacgaatggatatgtttccgtattaacacaaaaacaagaaccacgtataatggagacttcgagaaatacaaaggggacaacggggtgtacacggatgccgaattagcagtaaccggcaacacgcacccgttagacaaatacatggcggacatcaacacgggaaacgataaaatgttaaatatcaaacaactgataaacatattgaaggagtgcaaacgcaggtataccgataacggcactaactcgggcaccctattcgacagtgcagatgaaatcgtgtttaccacttttttgaaagatttctattacgaggtgaatcctgaaaataccacggaaaccgaggaaaacgggttatggaaaaaatttgtcaacacggagaaaagagtactcaacatcctgtctaaccttaaatacagcgcagaccacatgagtacaaaaaccaccgctctgtactccatcaggcaggcatccattcaaaccatgtacaacaaggaagccgccgaaaacttcacggcatggggtaccgaaatgatacaagacgaaaatcgctatcagtttgaaacacaaagaataagagccaatcgcacgtacgatgacaaagataacggtcgtgcgaacacgatcaatatgtggatggcaagttcgggttcagaagagtgggatacctatataaattccgccaagtgggaaatgcaagccgcctataatgccgccaaatacaaatgtatgcgtcttaaccgggatatggacgggaatggacgaatcgacgagaatgaagtgcaatggtatcttgctagtatcaatcaactcacggacttgtggatcggagaaaactcctttgaccctcaagccagattgtataaacggagcacatgggaggaaagcctgcaatggtatgcgagcagtacggtacttgacaaagatgaagaaggtatattgtggaataaaacttacagggataatccagacatattatggtcttccgaggggtcttccatcggaaaactaaccggagcaggagcaatagacggtgcgatcgtttattacaggtgtgtcagaaacctgggaataccgaaaaatgcagccaaaacagtgcgacctgatgactttgccacttacgacgaagcaacaagaaccatcacgctaacccgcttggacgccaagtccatacggggattcaaaacctcggaagaactggacgatcacaacgaacgtgacgtacgtggctacaacaagccctggaaggctttcaaaataaactcgacaacacacggaaacaatttaagttggcaaactgtcattgcacgctcgaaacccggaggaagaaaccccgtttgccctgcgggatggcgagtgcccaaccaaagagaactagcgctgatgtattctaaaatgcctagaaatagtacctcgtggccattaacagaccatttcgccaaaagcagtttcagttttaatcccgtgggcggtgaccgtataggcttctctgttaaaaacgagggaggggtattctatttattacacaataactccaatgagatcggcggtgtacgttgcgtgcaagatatcgactaacaaaagaaacaatagaatatgaataaacgagaacttacaacacttatcgcagaacgcaccggattgaagaagaaggacgttcacgccactttacaagccacgatcgactgcatttccgaggccatacaagccggagaacgggtcactttcatgggtttcggttccttttatactcaagagcgaggtccgcgaatgagctacaacgtttacacgaaagaacgtagacacctagatacccgaaaagtgataaaatttaaatcgactttaccgaaacaagataaataattgcaaccagagagaggggaaatcgtccctatcaagatttccctccaactcccccttgcacagggggagttggctaccaagtggcttcctctttattcgatttcgctaagttccagccagcgcatttccttttcgtccagtaggtcaatgatctcggcaattcgctgggaagattttaccagttcctccgtatccagtgccccggagttcaaggcagtttccagtgttgttttttccgtgttcagtttttccatgtcggattccagttgctgaatttcttgtttttccttgaaagtcagtttacgaactttttccttttctctcacgggtttgggtgcgacaggtattttcttctcttcttgttttcgtaataattcctcttcttcctttttatttttatactgggtgtaattaccggggaagtctttcaccacgccatccccctcgaaagcgaacactcggtccaccactttatccgtgaagaaacggtcgtgggatacaatgatcagacagccttggaaagatttcagataatcttccaacacgtttagcgtcatgatgtcgagatcgttcgtcggctcgtcgagaatcaagaagttggggttactcatgaggacggtcagcaggtaaagcctccgtcgttcacccccgctaagttttgccacgagggaatattgcagcttgtccggaaaaagaaaatattcaaggaattgcgatgccgacatcacccgtccgttaccgaggtcgattttctcggaaatgtttttcacgatgtcgatggggcgatcgtcttccttgaaactgatcccatcttgtttgtaataaccgtaaaccacggtttcaccaatttcgatggtcccgttgtccggttcgatctggcgggtaatgatattcaaaaaggtcgattttccgaccccgtttttcccgatgatcccgatcttttctccccgtacgaatttgtaggagaaatcccgtagcacgcggaaatttccatagcttttgttcacgtgttccagttccagaatcttcttaccgaggcgctggcctttaatatcgagttccagttgctgctctgtcgtgttttgagaggcgacttcttttattttatagaaattatcgatcctgtattttgccttgtgtccgcgggcttgcggcatccggcgcatccattcttgttccgtgcgtagcaggtttttggccttgtcgatcgaggcgttgcgggcctcaattcgttcgtctctcttttcaagataataggagtagtttccttcgtaggcgaataatccgaaatcgtcgatttcgatgatcttgtcgcacacccgatccagaaaataacggtcgtgagtcaccatgagtaaagtggcattcgttttttcgaggtactcttctagccattcggtcatctccacatccaaatggttcgtcggctcgtcaaggatcaggaaatcgggattgctgatcaatattttggccagcccgacacgtttgcgctgtcccccggatagctccttaattcgctggctatacttgtcaaccttgagttccgacaggatttgttttacttgtgtgtcgtagtcccatgcggcgagagcgtccatttgcgggatgagttcttcgagagccgatgcgtcgttgtccttcacggcttgctcgtatgttttgattaatttcaaggtcgggttctccgagttgaacacctcttcgaacacgtaattttccgggttgagttccgggtcttggtccagaataccgattgaaatgtcgttacggaagatcacggaacccgtgtccgcggagtctttgcccgcaatgatacgtaacagggtggattttcccatcccgttcttggcaattagagctaccttttgatttttgccgattccaaaagttatattttcaaacaggagttgttccccgaaacgtttactaagattttcgacttgtaaaaaactaatcatggagtaatttatgattttagattttaaattttaaatggagtgattctgtgatttatgaattagtgattaatagcgaatcgcattacgtggctggaatcattaaatctaaagtcactaaatcgttgaatttaaaaacgctttccgtttcccttcctcgaaacgttcgatggcgtaccgtaacatggtacggggcatttccttgtagcgaggtgtgagataatcgactaagagttgttcatcctctttgcctatttcacggagaatccagcccacggctttgtggatcagatcgtgagggtggtgctggagaaggtcggcaatagcgagagcatccttgaattcaccttgtttcacgaaatgcatacaggagatcatggcgatacgttgtttccagaggtgattctcttttgcccagtcataaaggagttgtttgtccttatcgaaaagccagtgtcccaaaatcttgtaacagctaaggtcaacgagatcccagttgttgatggcgtccacctgactcacgtagaaattcacgcaagtctctctggacgtgtggtctttgagcttggcgtaacgataagtcaaggctagaagtgccgtcaggcgatactcgtggtacggggaggcgagtagttcccggagcgtgtcgaagtccgcatcgaaatgttttttggcaacaatacgcaaattcggaacaacgaccccgataaattgatccccttcaccgtactcccctttacccgttttgaagaaacggggcaggaaagccgcttttgattcgtcccggtatgtatttatttcatttataatttctttcgttgaatttttcatctttcccttagttctttagttcccggtgtaaaggtaattattgttagtaaaaaagtaggcgttgttattaaaaaattgaacaaaaatgggggacgtattctttttaattgtatttttaccacataatcgaaaaacgtggatttatgtcaaaaattatagctatcgcgaaccaaaagggaggtgttggaaagacaacgacgtctgtaaacttggcggctagtttggctgtactggaacagaaagtgttgttggttgatgctgatcctcaagggaatgcgacaacgggagtgggatatgatttaaaggaattgaaggcgactatctacgaatgtctggtggacgggttggagccgaaagaggctatcttgaagacggacattgagaatttgtttttgttgccttccaatatagatttggtgggagctgagttggagatgttgaatttcgaagagaaggagagtatcatggcgaaggtgttggcaaaggtgaaagatgactacgattatatattaatcgactgttcgccttcactgggtttgttgaccgtgaattcattggctgcggccaattcagtgatgattcccgtgcaatgccagtattttgctttggaaggattgggtaagttattaaatacaatcaagattatccagaaacgtttgaacacggctttggaaattgaaggattcgtgctgaccatgtatgacgggcgtgtccgtctgtcgaaccaggtggttgccgaggtccggaagcatttcgaggagatggttttcgacacgttgattcaacagaacgtgaaactggcagaggctccgagttatggacaaccggttatcctctacgatgccgagtgtcgcggttccgtgaattatttgagtttggcaaacgaattgctggagaaaaacaaaaaatagtttagaatttagagtttagaatttagagtaggaa

SEQ ID NO: 10836 - DNA, 9296 bp, Unknown
  gut microbiota DNA sequence
aaaactggcagaggccccgagttacggacaaccggttatcctctacgatgccgagtgtcgcggttccgtgaattatttgagtttggcaaacgaattgttggagaaaaacaaaaaaatagtttagagtttaaagtcatgtagaatttagaatgaaatcgaaaagcgttggccttgtgcagttggaatctaaaatctaaaatttaaaatctaaaattaattgataagagatggcgaaaaagagtgcattaggtaaaggattgggagcgttattgtcggatgcggcagaggaggcgaagccaagggggatggcctcatcggcgttacaggaagaattgaaattgagtgatattcgcccgaatccgaaccaaccgagaaccgtttttgatgaggaggcattgcaagagttggcctcttcaatcaaggctatcggcatcgtgcaacccatcaccgtgagggaagtggaagacgggaagtacgagatagttgccggggaacgtaggttccgggcatcgaaaatggcagggttggaaactattcccgcttatattcgtaaggtggaagaagaatccgtgcttgaattggcattgattgaaaatatccagcgggaggatttgaacgctatcgagatcgcgatttcgtacgagcgtttgattgacgagtgtaacctgacacaggatgcgttgagcgaacgggtaggtaaaaagcgaacgacgatttctaattacttgcgtttgttgaagttgccggccccgatacagttggcaatcaaggaacggaaaatcagtatgggacatgcccgtgctattattaatatagaagatccggaaacccagtacatggttttcgagcagatcatgaaatacgatttctccgtgagaaaagtcgaggaaatcgttcgggagctgatgaaaccagaagaggaaaaagagagaaaagccgagaggaaacgtcaacctatcgaggactacatggagttacaaactcacttggctcgttattttgacacgaaggttgacttgaaacggaacgagaaaggaagagggaagatcgtgatttcttttaaatcggatagtgatctggagcgaattgttgaattattggataaggtggataagaaataaactttgtagtgagaagtattttagtgaaaatagttttgattatcccggttttgcttgtttgtacgggagtaacggcgtcggaatatcgttcggatttccctgtattcttgcaagacacgatcattcacacggattccttgacattcacgggaaaagaggaagcgttgaaaaggaaagcgagaaaaagagataacgaaaaacctcattcccctcatcgggctacgatcatggcgatgattttaccgggttccggacagatttataaccggcaatggtggaagttaccgatcttgtacgggggtatcggggctaccgtgtacgggttgtcgtggaacatgaaatattacaagaaataccgtacggcattcgtggattatactgcttatttgaatgctttggaggctgatccggaaacaccttacccggctaattccagttgggataaattgatgttgccgggtaaaacggcagaaaaatttcaaccggagatgcgaaagcgtttgcaggaacagttgaaaacaaagaaagataattataaacgaaatcgggacttgttgtatatcgtgtcgggcgcaatatacgcgatacaaattattgatgctacggtatttgcccatttctatgatttcgagattaacgacgatttgtcaatgaatcttcgtccctcaaccggattctctcccgtcagtgggggaactgtgggtttgacattaacttttaatttttaaaggagtaagcatgcgttttgtgtttttgtggctatgtgcgattttattttcaggtgtagtatatggtgagagtgatcgggattcgttgaaagtgcgattaggtgcgccccgattgaatttaggatccccggtgttactgacggattctattccgggagctttcatcgagcggttggatgagttatatagtaaatggtatgttaccagactgggagaaggggattacgtggattcggtttacttgacagaaatggtgacaggaccatctgtgcctgattcggtttatttgcagcgtttagatagattgaattccgcaataaagttgtcttataatgatattgtacggaactatatcgaattatataccgtgaggcgtcgtgctcaagtggggacgatgttggggttgagttcttattatttcccgatttttgaagaggtattagatcgagaaggattaccgcaagagttgaagtttttgccggtgatcgagagtgctttgaacccgcgggcattttctcgtgcgggagcttgtggcttgtggcagttcatgtacggaactggaaagatgtacaagttggaaataaactcgtttcttgacgagcgtcgtgatccggtgaaatccacggaggcggctgtttgttttttgaaagacctgtataagatttacgaagactggattctggtgattgcggcttataattgtgggccgggtaacgtgaacaaggcgatacgacgatcgggaagtaaaaagaattattgggatatttatttccatttaccgaaagagacgcgtggctacgtgccggcttttatcgctgccatgtacacgttcaattaccataaagagcataatattttcccgttagagaatgagttacccacgatgtgtgatacgatcatgatttccgatgccttgcacttcgagcaggtggccaaattgatggatatatccgtggaacaaattcgggatctgaatccgcaatatcgttcggatatcgtgcctgccggattcggaaagagttatgctttacgagttccttataatcatgtaggagagtttattgataagcaggatacgatctttgcttataatcggaagacttattttaatgatagtgatcgtacggccgatccaaagaatcgtttcaagaaatacgctcatgcccatgctgttcctagtaataaggccaaattggtttacacggtgaagagtggtgacgtgatcgggaagattgccgagaagttcaacgtgcgtctatctgacttgaaatattggaatggtatgacgagggaccgtattaatatcgggcagaaacttacggtttacgtacctcataacaaggttgatcactacaagtcgaaggtgaatgccagatatgccggggtggcctcaaatgccgaggtggaagcagaacctttggtagaaggggaattcttttactacacgattaagcagggtgagaatttatggtcgatagccaagaaatatccgggagtgtccaatcgggatatcatgaaatggaacggtttgacagatcgatctgcaaagaatttaaagccgggacaaaagttaaaaattaagatataataatagaaagtgagataaaatctcactttttcttttatatttgtgttggtgtaatccaacattgattattcatactcgataatttgcatatagaacgagttgcataaggagatcctgcaaatttcagatataaagagacaatggcagaaattggaccgattgacaaaaaaacggaaacgtatcggatggaaaaatggggagtttatgcggcgggagttgctttgctgcaatctgttggtttctggcttgaaaatacaacaggaaaaggtggaagagcctgttacgagaatggtcataattgaaccgggtacggcacaaacctttttcgaggtggtttcagattctttacctccttttgttgtccaaggatatagagacccgtgtattaggaacgtttttaatactcaagcctattcagatgaattgacaacaaaaacgacattgcttaggggacgagtactggtgagtgtgaataatttgtcattgaaaagagtgttggagccagttttgcaggcaagttggtcaacgggaacagatgagattattgtgaaaaaggtgaacatggatatacaatttgataaatgatgtaacttaagatcagtgataaacaaaactggattgtaaaaatccagttttgtttattatttattttatctacgatgtagcaatacaatgttttccacatgatgcgtgtgagggaacatatccacggcttgtacggccataactttgtaatctgtatccataagggctaaatccctagcttgggtagcagagttgcaactcacgtaaacaatacgatcgggagcggcttttaatatggtgtccacgacgtctttgtgcattccggcacgaggagggtccgtgatgattacgtcggggtgaccgtggcgacggataaactcttcgttcaacacgtctttcatgtctcctgcgtagaataccgtgttgtggatattgttgagagccgaattgattttggcatcttcaatagcttccgggacgtattcgatgcctatgactttttgggcattacgggccacgaagttggcaatggttccggttccggtgtagagatcgtacacggtttcatttccggttaatcctgccaattctcttgttttcgcgtacaggttataggcctgttcggagttggtttggtagaaggattttggaccgattttgaattttaaatcttccatttgttcgaatatgtggtcgtttccgtggaaacagatcacttcctgatccgtgatcgtatcgttcatcttttcattgatgacatacattaaagaggtgatttcggggaattgttgcacgagggcattcaataaattttcccgagcctctttattttcttcaccaaacgtaacgatgaccatgacttctcccgtggaagacgtgcggacgatcagggtgcgtaaaaatccggcttgttttcgaatatcataaaaacttaattcatgctcgatggcgtagtcccggataaagttacgcacggcatttgatggttcggcttgcagatagcatttctttatgtcgagtaccttatcaaataaaccggggacgtgaaaacccacggccggggttcggtcgatgtcttgaccattggcaatttcttcccgtgttagaaagcgtttgttacagaaggtgtattccagtttgtttcggtaataggttgttttgggcgagccgataatcggggacacattttgtagttcaaccttaccgattcgttgcaggttatcaacgatttcctgctgtttgaattctgtctgtaactgataagggaggttttgccatttacatccgccacatactccaaaatgcgaacaaaagggttccgtgcggatgtcggagtattttcgcacgttaacgataaacccttctaggaaacttttacgtttccgggtgacttgcacgtcaacaatgtctccgggtacggtgttcggtacgaataaaaccttttcatccacgtaagcgatggatttgccttctgcggctattttttttatttcaatgttttctagtaagggctttttaccacgagccatattaattttagattttaaattttagattccagccacttacgaattttagaattacgatttatgattttagattcctaccgcacgggcggacgttttttggcaatcgtaaatcgtaattcataaatcgtaaattatttgtttttcagtttttctttcaggattttcacgccttcggaagctcctttttcgataaattcaatcttgctgtttttgacgctttctggaatttttgggtcgatcagcaggatccgacaaccggcaggtgcgtagtgtaacaggctggctgccgggtacacggctagcgaggtcccgatgatcacgagaatatcagcttgttgaacgaggtctatggccggttcgatgttaggaacagattctccgaaccaaacaatgtgaggacgcaggatagaaccgtcctcggcttttgtgcctagctttaattcccaaccgtcaaggtcgtatatcaagtccgggttccggctacttctgacttttttgagttctccgtgcaggtgtaatactttagtacttccggcacgttcgtgtaagtcgtcaatattttgcgtgatgatccggacgtcgaaatctttttcgagttcggcaagcccgtaatgcccggcgtttggttgtgcctcgtagagttgtttacgacgttcgttgtagaaacggtttactaattccgggtcacgttgccatgcttccggggtacaaacgtccataacattgtattcttcccataggccgtcgctgtctctgaaggtacgaattccactttcggcactcataccggctcctgttaaaacgactaacttgttcataatcagattgtattttaatcattgaattcgattgcaagttagataaaaaaactctattttcgtaactttcaattttcaattttgtatggtatgacttttggtatagcggatttaagtgttatccccatgcgacgggaaaaatcggaacggagcgaaatggtttctcagttgttgttcggggaggtgtatgaggtactggaggaggaggataaatggcttaatattcgcttgttacatgataattgctgtgggtggatcgatcgtaaagcatacaaggaggtaggtggagagtttgtggaaaaatatcaatcatccgatcaattaattatgagcgaggtttttaatctggtggctaaaaagggcgattgggagaataagatgatcatggcggggagtgtactgccattctatgatgcctatgctagaacgttgatgatcggggatgaggagtatatcgtgaaggggttcttgcgggaagtgggaatcgaaagtctgcgggagttattgattcaatatgcgttgatgttctataatgctccttatcgttggggaggacgaactccgaatggtgtggacggtgctggattggtgcaaatggtatatcgtctggcgggaattgcgatcccgcggtatattgatcaacaagccggggcagggcaagttttgtcttttttggaagaagcgcagccgggggatcttgctttctttggtgattcttccggtgctgttactcatgtcggtatcttgtgggaacagggacgaattatccatgcttcgggaaaagtccgggtggataaaattgatcaccacggcattttcaatgaagatttgaaacgctacacgcatacgctgaaggtggtgaggcagattttttaattcgctgaagacgaattaaaaagttgcagcttgcaagttttgaattaaatcaagagagtgaacttcgtgggtggaaatcataaatcgtaaatcataaatatccgtggctttccggtcccatgttgaataatagatcgagaatgctgagattgggggcgaaagggaatctttcagcaaaggtttgatggtaaggtttggcaatgaacgggtcttctatgcggcggcgggaaggtttcgggtggataacgtctcgtaggtctgtgagggtatcgtatgtcgggtaatagtcttccgtgagtttgatgggccgttgaagttgcaggttatccatgagttcttttaggattttggtattgagatccaacaggaacttctctttccgttcgaagaaatgcatgaagttgtctatatagtaatcgtaatagggagaatttttgtaagcggattcaatccctttgaaatggagtttttgccagttcgtggaatagtcaaccagtacatctttggttaatatttttatggatgagcctttcacgacaggtacggacaaggtcataactccgttggccgtcatgatgtcacaccgatttcgatagctttgtttaccatagctttcgtattgttcaatccatatttcggtacaattgtttacttttgtaaagtattgaacaggtgggaaatatgccgtgttaattagtatattgctcatgatccatttatattaaccggacaaagataagaatttttcaataaattgaaaatctgtaatattttgtatgattaacaaatttatactcaaaaagtatgatttgtggtgcaaaagttgtatattgtaacaggatagaaagttgtcgtattcgactcaaactaccgcagatcgatttaatagaaaggagaggattttttagacctgcaatagaacaaaagccgtaattctacgtaactaattagtaatagtatcacaaccggaacgtaatataaaagtagttcatttgaatggggatattattacatgaaaaatagaaataaaattaatatatgatgctaaaactcgtagaagaagataaattattaaagccatttgcgggaattattgaaaaaagacaccagcaagtattggcgatggaacgagaatttacttatcggacgactcgtttgtccgattcgtgtaattcttatttgtattatgggttgcatcgaacgaatgaggggtgggtgtttcgagaatgggcgccgaatgccacggcaatctatttgttaggcgagtttaacgattggagaaaacatcctgattatgccttgaccaaggtcggagatggaaattgggagattaaactgcctctgggtgcgttggctcacgagatgctttatcgtttactcgtggagtggaacggggggagcggggagcggttgccttctcatgtgcgacgagtgattcaagatgaatacacgaaaatatacagtgcgcaggtatgggacccattgaatccctaccagatgcgtcatgaaagaccaaaacgaacggattacccgttaatttacgaggctcatatcgggatgtcaacggagcatcggagagtatcgacttttactgaattccgtttatttgtgctaccgcgtattgttgatctaggttataacaccatacagttgatggccgtgcaggaacatccttattatggttcattcggttatcaagtggcgaatttttttgctgtgagttcccgtttcgggacaccggatgagttgaaagccttgattgacgctgctcatagtatggggatccgggtgattatggatattgtccattcgcatgcggtgaataacgaggaagaaggattgagccgctttgatggtagttacgatcaatatttttacccgggcgagagagggtatcatcctttgtgggggtctcgttgttttgactacggaaaacatgaagtgttgaatttcttactctcgaattgtaaatattggttagaggaattccgcttcgacggttatcgttttgacgggattaccagtatgttgtactgggatcatggaatcaataaggatttcacggagtatagcttgtattatgatggaaaccaggacgagagtgcaattac

SEQ ID NO: 10837 - DNA, 8452 bp, Unknown
  gut microbiota DNA sequence
acttgtttcatcaatcgcacggaatcttccaccttcaccgccaacgccaactcagccaaccgatcgtaagcccccagtacctcttctcgcttgtactcccggactttagccacccgaatcttatcatgtcccgtgggtaccgtattttcctcgttacttagtacttcctcgtacagtttctctcccggcctcagaccgataaatttgatcttaatatcttcatttggcgtatatccagctaatcgaatcattctttctgccaagtcaacaattttcacgggatcccccatgtcaaaaacaaaaatctgatttcctgtactcatcgtcgccgcatccatcaccagacgacatgcctccggaatcgtcatgaaaaaacgagtgatcctcggatcggttaccgtaaccggcccaccttgttctatttgttttcgaaaatacggtatcacactaccgttacttcccaacacattcccgaatcgggtggtcacgaaccgggtctttcccctaatctctcctcgttccatcgccagccccaaactctgcacatatatctctgccaaacgtttcgatgcccccatcacgttagtcgggtttaccgccttgtccgtcgaaatcatcaccatcatgtccaccccgtactccacacaaaagtctgccacgagtctcgaaccaaccacgttcacacgaacggcttcgcaaggattctcttccatcaacggaacgtgtttataggccgcagcatgaaacacgacctgcggatgaaatttctcaaaagctccttgcaaacgctctttctgccggacatcaccgataaaaggggtaaattttaggcttgaaaaattccgttccaattcaagacggagttcatgcatcggggtctcggcattatcaaacaataccaaatgagctacgcccaaagttgccagttgacgacacaactcgctaccgatactcccggcagcccccgttaccatcacgaccttgccggtaaaattcgcctcgatctcctttgtgtttatctcgatttcctcccgaccaagcaaatcctcaatccggatttctcggataacagttttcttcaacccgtcacccaaaacgtttatgggtggagccaccaagtttttcactccatgagcctgacagtaacgtaccaacccttcagtctcccgttgagctgtttccggagaaggaaatagcagaccatttatattgtatttcttcacgaaacaagcaaaattagcctcgtcttcaaaataataaaccggcagttccgaaatggagtaagacttaagtcgcttatccggattcacgaatcccaccacgtggtaatgcttactcgtgtgcattcttttcttcaatgccacacttttatcatctgtcccgtataccaacaccctcgttttacttgaactatacagagatattaccaaatcataaacaagcacaagcatcacccgaaatccgataagaaccaccgttgttaccagaaaatcaacaagaaaacatgcgaaagcatggttattgaatatccgggaaacaacaagagaaactagtcctagtaaaagcacctccttaaaaaagatcgcaacgcccatcttcccgatactttttatggtggcatggcgaattatatttttgttcacttccaacgccataaacacgagcagactgatcaaaaacgatcccacaataacgaacaagtaagcattccttgacaagtcgacaataaaattgtctacaaaaagaagagccacgaatgaacttcccacggacaacaaaatgtccacgaaaagaaccgtccaagaattaacgtacttctttctctcgcacaaacgatcacaaatggaatgaatggagtatctcatttataccaaacttcaaaaaggagcgtcccctccggtattaatagctgatccggcttagaaataccgttgagggagacgctataaccgggggttgcatctcccggaatctgagatttatattgtgaatcacgtctaaattattccttcttaccatacaatttgtcatggattgcaaactcccgcctagccaagatacaaaacactcgcccgaacaactccagatcgtcacgagtagacagagcaaaacgttctatcatttcctcttcctcctgctttacactgacggccaaccgaactcgctcttcggccaatcgtacccgttccggttccggcaactccattgccccaacaacatcttcataaaaacagaatgcatcccaccatgccatcaatccctgacggcccgaatcacgaatagagccaagcgcctcggaaatcaggctaccagccaaaaccccgttctccatttcacccgtgaaatagtaacaattacataacaatcggcaaatattcggagtacgacacggtaaaacaattttgtcacttccccacggggtaagtatgtcataagccgcatccaacgccgtgtttaagaaattcaagtctgaatataactggtaagcatccatcaaatccaccacgtaaccggcccgaacatctgcagggaggtttttgtttccagccagaggctctataaaccgggcgatctcacgcactcgttcatgaatttcatacgtctccccgaaactctcttccaaccaaggatagacgcgaaccatcgagtacacggacaagtaaccatgcaagaatcctgacaacgccggggagggacaacgccccatttctaactcacacgaccgtttatacaattcgtgaaataaacctttttccattattttgtatcactctattctttcaagaaacgaacttggaatataagaagtagcaatagaggctaccccatccaaacgaataattacacgtttatgatttttcaaacgtaccaactcaccttccaatccttgcaagggacctttaataactcttacccgatcaccccgtttgattcctttgttcaaaacttccacgctaccagttgagaaatccaacaaaaacatgaaatcctgcatttgtttatccggaacgatcagcgaatggcgtccctctatatctttcaaataaacaatattcaacgaatgatcatttatcaaggaaaaacttgttgccttatccgtccggataaatattaacccatgaatcaaaagtacccggatctttttacgtccaacgggagtttctcgcacctgttcttcctggggcaaaaaattctcgatccccagttcatccagcttttttttgattaataactcttgatttacacgggtataagcagcataccagtttaacttgttacacgcaaccattatttttattctttccctattttctagcgaacgatgattttctctgtttctgtaatccccggacacacgaaccgcccggacgcgcttcgcgcactaaccctgtcacgggtcctgatttacggccatgtgttccacgcacttcactttacacagcaacaatgcatgaaagctgtctgcacgaacgattcatttgaattaaaaaacgatcgtttaatgcgctgcaaatatacatcaattttaaatatcaccatctatttgtcaattttttttggagtcttgtaattagatatttacacttttaggttatcaatttaacagatctactttgttaatatcatcaaacgatcgtttttcgatctttacagcatactaataaacaacaaattatccccttcccctgcccaaaaattctttacaaaaaacaaataatattttcttgaaaaaaattatccatttaacactatatattcttcataaaggcatacaaaagccaccgtaataatctcctctctcccatctcacaccctttcatcgccctttcatcgcccattgtcaatagaactacaagtgcgaatgaactcccttcaaagacttacatcagattactacatgattattactatctttttaccaataatgacgtcaaaatagccacgatgtaaaggatcgtgtactttaaagcaatagattaaccatttttctctacctttgtcctgaattaaaagtaaacaagatgttagaccacaagctcacgatcttttatcacacggcaaaacatttgaacacgacaaaagctgccgagatattacgactttcccagccggccatttccaaaagtatcaaggaactggaaaagggattggggatcactctttttgatcgagagaaaggacggttaatgcttactcccgccgggaaatacctcttggaacaaagcgaggaactgattgaacgggaacgcatcatcactttcaacctgcagcacatgaaaaaagagttctccggaactttacacatcggggccagtaccacgctatcccagtacatattacctgaatacttggcccgtttccgggaaactcatccctatatcgaaataaacctgatcagtggtaacacctaccagatcgagcaggaattactggataaaaacatccaactcgccttcattgaaggtgtaccctcgcaaacggacattcactacatcccttttttaaaagatgaaatcgtcctggttacctcggccaaaaatgattccccggaatcgatcacgaaagaacaactgaagacgttaaaattcgtcgttcgggaagaaggctccggaacatataatattatccagcgccagctatctgcagccgggatgtctatcaacgagctaaaccaacagatcgttatcggaagtaccgagggaatcaaacaatacctcaaacactccgattgctacgccttggtctccgtgttttccatccaagacgaattgtcctgtggcctgctaaaaatcatcgacatcgacgatctcgaaatcacccgctccctctatgccattcacaagcagggtaccattgatccctacgccgaactacttctaagattttgcgaatctcgaaaccggaaatcaaaacgatgataaccaattcaatctaaatatgcacgttacacgtgtaccgagtaatatcaacaaccggaagcttactccctgcattatttacagctctcataaatacaagacattcctgttctgtcatttttcctctacaatatgcataatacaagaaatccagtgttgtcagataaataattctattctcagagcaatacctttgtatatctttcagattactactccccaacacatcccggttatccttacaataaaccatacaagcactctccccttttcccaaggttcgttgcaacaaaaagtattctttcattgattcccctttaggaacaaaagtctccacccttaattttgaaaaaaaatgcagatatttatctatgaaatttttcgtctgggagtttttggctatctcatgataaaccacatctaatatcaaatattcatattcaggaaatatttctggtagcaccgaaaaacgatcagcctccataaaatgaataatcacatcagcatcgagtactatcttcgttttcctgggtttcatctatatttattttatgaagtaattcgatataatgaccttccgaaatttttccttgctcaaataaaccatgtgccttttccccaaaatcaccaataatcaatccttcatttgccgattcatataaagctgtatcatacccaaaacaccgtgcagaactttttactcccaaagctgcaatcttagcacgtgtgacttctgttataagcttgatatttaacaaccgatataacaaagccgaacgggaaacagaaaaataatgttcaagtttcaaaactgtcgctatagatatatttttagttgtcaactctgtctcagatattaactggcatataccagtttcaggcattaataaggaagaagcaaacatatcagcacattgctctaccggatccttgctaccattccccggattacacttgtgtggtgtgggattttcttctatataaagatgatacaattcatgagcaatcgtaaaatattgccttccttgggattgattggaattaacgagcataaagcgatggcccgatttatcttttaaacacattcccgaaaaattttcagacaatggcctaaaaatagtaagaatgttcaacttcaaaagtaaactttttaaagcaatgggttcagacaaactaagcccattatccgagcgaaactcagaaacttgtttctcgataacaaacttattcggcctcatgttgtgctatacgctccattttaagataagacatcacaatatccttaaaaattgctatctccttcaaatcattctcttctaaatctgaaattctgaaagctgtagccataatttcattgtccgcatgaatactatcttcaaacaacacaaatgcttcgcaaccgaataaatttgaaacattttccaaaacatgataaggaatttcacgtatccccccttcataattactataagtagagcgttctactcctatagatttggcaacctcttcttgtgtaaaaccggataactctctaattttctttagattttctccaacaacttgattaatcattttcatgagtgttctcctttcatttctgtggcaaaattaccactaatttatcatgaacacaaattttgccacgtttttctacaaaatttacattcttatctcaaatttgcagggagtaacaatgtattacctctagttatactatctgaatatttcttatttccaaaattcatatatttgaaagaattttgcaccgaacaaataactaaagattatgagcaaaattcaactgaacaaaaatcaaaaggaagtacttttcatcgtagctttattccttgtaccattccttgatccgggctttgcccttttactaggtttaattttatcgttgactatcggtcacccgttcttggcaatcaatagccgaatcactcatatacttctccaaatatccgttgtgggcctaggtttcggcatgaacgtagaacaagccatcgaggccgggaaaacaggaatcctgttcaccatattttccatcgttgttaccatcggactgggattattctttaccagcaaactaagggtcaaccgggataccgggtttctcgtttccggaggaactgccatctgcgggggaagtgccatcgctgccctagctcccgtgattaaagccaaggacaaggacatcaccgtggccatgggaaccattttcatgcttaacgccgtggcgttattcatctttcccgtaatcggccgctggctggaaatggacgatcatcaattcgggtactggtgcgccatagccattcacgacacgagttctgtggtcggtgctgctaaaacattcagtaacgaggctttagccatcgctaccacgaccaaactgatccgggcactttggatcatcccggtttcattgatcgccgccttcttctataataaaggaacaaacaccaaatcaaaaatatccattccttactttattttcttctacattgtagccatgatcatcgctacctacacgccgcaatggggacatctctacacacaaatcgtgggattcgccaaagtcggaatgttattcacgctattccttatcggtgcaggcctctctaaagataccatcaaacaagtaggtttcaaaccgatcttgttaggtatcatcctttggatttgcatcagcgctttatcagctagcgtaattatactactgtaaattaatctataaagactataaagttcataaagtccttactaattttagattcctctagactttatgaactttatagattctatgaacccaaataattttttttcaaatcttttaaaaataagtaatacagatagtatatatatttgggaacgtattgaaaatcatatcaaaattatctaacgaaaatttttatgacaatgcgtgcaaattattttaatctgttactggtactgctgatgggtgttcttcccatacaactgcaggcctcggaatccgacaagaatgtgattctgtacactccctacacgaaaatcgctgttccaccgggagaatctgtaaactacagtattgatgttatcaacaactacgatgtagttaaaaacgtgaatttatccgtgaaaggactgccacgaggctggaattacgaattgaaagccggcacgtggaccattagtgaacttgcggtcctaccccacgagaaaaagaacgtttcgttaaaagtggacattccgctaaaagtcaacaaaggaacttaccgtttcacggtggttgccgagggacttggagaactccccatcgcaatcacggtatccaaacaaggtacctaccaaaccgattttatcacgaatcaacccaacatgcaagggaactccaaatcctcgtttaccttcaacgccacgctaaaaaaccaaacggcagaacaacagctctacgcactgatggcgcaagctcctagaggatggaacgtagttttcaaggcaaactacaagcaagccacatccgcccaagttgaaccgaatgccac

SEQ ID NO: 10838 - DNA, 740 bp, Unknown
  gut microbiota DNA sequence
tttgttttcacgttaaaccgataaaaatcattaaaatatttacgatcacggatattctcttggtcacccgtattgccaaatgaaaaagcaggcacataacccgttcccacataagcccattctccaatcacgaaagccacggcagagtgacgaccattaccaaggttttctccttttcctgtattcattggtgccggaaattcagaattctctcccgttacctttttccaatttaatctaccttcatcctcgtcattgaaataatacgtatctgtaaattctgcacctttagcacctaatcctaaactaacaaaaacagttccggtggctggatccgtaaaacatacggcagcctctcggggtgcaccaccaaactctaccgatttttcccaatcccccagatgatcgtcgtcatcacaagaagcaaagattaagcctaatactgtcagaaccaaaaaatttaatgttctcatacttatctatttacctagttatttaaattatttatttcgttctaaattctcttcatattacaaaaacagtaggcaaaactacacattttaaaaacaaatccaataaaaaaaagacgaaatatctattgtttctcttttttacaatttattcagataaaatgaccgcaggttcttccgtattttagaaaatagttataccttcgcatcttgattaaatcaaaacagattataacatgagaatagtttttctggcaggtcttttattcg

SEQ ID NO: 10839 - DNA, 633 bp, Unknown
  gut microbiota DNA sequence
ggaagtgaaatctatgggctcaacccataaactgctttcaaaactgtttttcttgagtagtgcagaggtaggcggaattcccggtgtagcggtggaatgcgtagatatcgggaggaacaccagtggcgaaggcggcctactgggcaccaactgacgctgaggctcgaaagtgtgggtagcaaacaggattagataccctggtagtccacaccgtaaacgatgattactaggtgttggaggattgaccccttcagtgccgcagttaacacaataagtaatccacctggggagtacgaccgcaaggttgaaactcaaaggaattgacgggggcccgcacaagcagtggagtatgtggtttaattcgacgcaacgcgaagaaccttaccaagtcttgacatcctgcgacggacatagaaatatgtttttccttcgggacgcagagacaggtggtgcatggttgtcgtcagctcgtgtcgtgagatgttgggttaagtcccgcaacgagcgcaacccttatcattagttgctacgcaagagcactctaatgagactgccgttgataaaacggaggaaggtggggatgacgtcaaatcatcatgccccttatgacctgggctacacacgtactacaat

SEQ ID NO: 10840 - DNA, 9696 bp, Unknown
  gut microbiota DNA sequence
tttttttaatatattgctatacaccaaacgctagttcaagtgttttagatgtaaaaaaaaagcatgaactttcatttggaacatcacattgcagaacttttatacagaagtatacgaggaaagttatctgattttgagagagaagaattgaatcaatggcgatccgattctccaatgcatgaagctctttttatgcgtctacaggatgatggatatatagacgaagagttgggaatctttgttaaaggtgaagagaaaaattccgttttatgggaacgtattcgtgaaaacagcattcttcgaaagagaaaaaaatttattagattttcccgttggggtgcggcagctgttttattattggtggtttgtgtttctttatttataaagaaaggggaacaggcagttgttccggttgcaattcaaacgatattaccgggaagtcataaggcaacactgtttatggaaaatggggaggaaatagaactttcagattctgttcggatgtctattgaacagggaattattgcttcaaataatcaattggagtatggtgattcggtaaaggaattggcatcggggtattatcatgtattaaagattccaagagggggagaatatcgtttgaaactttcagacggaactatagtgtatttgaattcagatagtgaacttcgttatccggtaaacttcagtgcaacttctcgtgaagtagagttaagaggagaggctttttttgaagtagtaacagatccgcaaagaccgtttgttgtgaatgcagaacaagtgcgggtaagggtgctaggtacttcttttaatgtaaatacttacgataaaaattatatagaaacagttcttgtgaaggggcgtgtcgggttgcagatggaggggaatactcaagagtggcaaattaagcccaatgaattggctcgttatgatcgaaaaaataaaacgatggaagtgaaagaagtggatattttgccttacgtgacttggaaagagggacatttcttgttcaaaaatcaaagtttggagaaaataatggatatcatggctcgctggtatgatgtaagtgttgaatttcaagatgaatcaataagaaatcttcattttactggagatatcaaacggcatgcgaatttttctattatattgaaagctttaacttcttctgtaaatgtaaattataaattgaatggtcgagaattgatattatatatgaaataaataaacggaaggtgcgggaacaccttccgcttttatactcttcatgtgcaacgggaattgccaataaaagagaatttataaattaaagtaattcaaagttatgaaaaaaaagtggtatttacttctttttccgaactatcggaatagaaaaattttgagggttatgagatggaatatcgtattgatccttgtctgtgtgttacaagtggctgccattggggtatcggcacaagaaaaggtttccttgaacctgaaggatgtatctgcagaacaagtgtttcgggagatcaaacgtcaaacgaaatatgatttcgtgtataatgaagagcaatgtcgggatctgggaaaaatgagcgtgaacgtgaaggatgaacctgtaggtaaggtgttggataagttgcttttggatagaggattttcatgggacttgcttgaaggaggaatcattttgataaaagtgcaaagtaaatcttcggataaaaggcaagaatttaaaataacggggaaagtgacagatcaaagcggggaggttttaccgggagttgctattttaattaaggggacgacgataggagtggccacggatgccaatggggagttttcgttagtacttcccaaggattcggtggttttagtattttcttttatcggaatggaaactcaatatgtggcaattcctaagtttaaagttggtgaatatcatcaagagttaaaaatcacgatgcaagaagaaaaagtggcattagaagatgttgtggtcactggtatctttactcgtaaaaaggaaagttttacgggatcggcttctacttatactgcagcagagttgaaaacgatggggtcccagaatattttacagagtttgaagacgcttgatccggcattcgcgattttggaagataatcaattcggttcggatccaaatcgcttgccgaacatggagattcgagggaaatcaagcgtgttaggattgcgtgacgagttggatgctgaccctaatcaacccttgtttattttagatggattcgaatcgtcattagctgtaattaatgatttggatattaatcgtatagaatctattacgatattaaaggatgcggcttcaaccgctatctatgggtcgaaagctgctaacggggttgttgtggtagaaacggtgaaacctaaatcgggagaacttcaggtgagttataacgggaatctcaatctttctatgccggatttgaccagttataatttgatgaatgcaagggaaaaattggaatttgagaaattggcgggagggtattctccggctaattggagcgcggaaaaagaaattgaattgaatgaattgtataacaagaaattggaagctatagagagtggggtaaacacttactggttggccgaaccgttacgcacgggagtaaatcaaaaacattctttgtacgtgcaaggtggtgaaggccgttttctttttggtttaggtgtcgggtataacggtatttccggggtgatgaaagagtctttgcgtgaaatcatcagcggtaatattgatttgatctatcggatggaaaagtttcaattctctaacaagttttcgattaacgtgacggatatagagaatcctgttgtaccttttcaatcttacgcggaagcgaatccttatttcaagaaacggaataaggatggaattgtcgagaaatggttggagaaaaatgattattttgaagcgtccaacccgctgtggaatgacaatttgaatagtcgcaatgagggaaagaacgtttcattgagcaattatttcgtggcagaatattttcccacgacagaatggcgtgtacgtgcccggttgggaataacatacgggaacaatgatacagaggtattttattccccggaggacacgcgttttgaagatacggaagccttgaagaagggggaatatacttcaacgaatacccggttgaatcaagcggaaggggaacttagcgtgacctgggctaaagtgttgggagtccatcggatcaatttggtcgccgggggaaatttcaatgcaagcaagtctttggttcaggggtattcggcacaaggtttccctgatggggattttacctatccttctttctcgaacggatacccggaacacggaattcccacgttttacgagagtgtttctcgctctttgaacggttattttaacgttgggtattcatttgacgatcgttatctgatggattttagtttgcgtagcagcgggtcttccgtgttcggatcttctaaaaaatacaacacgacctggtctgtcggtttgggatggaatctgcacaaggagaaatttatcatgaataactttaattggattaatttgttgaaattgagggcttctatcggtaatcccggaaatcaaaattacgactcggcccaaacattgttgacttatgtattccaatatggttcgatgaattatttcgggttaggtgctatcttgaatcaggtgggtaatcctgatttgaagtggcaaaccacgttggataaaaattttggtattgacattactttgttgaacaggcgtttaaatatcacggttgactattttcataaagtgacggacccgcttctgatacggattgggatgccgttgtcttctggaacaccaacttatatgacgaatgccggagaacaaacctctcaaggagtgacggctactgcttcttactatattattcagaattttgataaacgtttttcgtggatggtacgtgccaatctgcgtacgcagaaaacacgaatcgacaagattggggacaaattgtcgttgctcaacgcgagcggaaagggagccaatacggttcggtattatgacggggcggacccggatgatatttgggctgtaaaatcggtgggtattgacccggcgaatggtaaagagttattttacgatgaaaatggaaattacacgtatgatttctcatatgatgatgaggttatttgcggtaatactcgtccgaaaatagagggggtagtgggaacgtctttgaattggaaaggattgtcgctcagtttgaatttccgttatcaattgggagcggatgtgtttaatgaagctttgttcaataaagttgagaatatctcaaccgagggattgaataaaaatcaggataaacgagcactttacgaacgttggcaaaaagcgggtgatattgtgcgttttaaaaacatcgctaatgccgcatccactccaatgtcttcccggttcgtgcaagaggagaacgtgttgacgttggagtctgtgtatcttggttacgagttttatgacggttggattcagaagctcggtttaagtaatctaaaactgcaggtttctatgcgtgatgtatttagagcatcttctattaagtctgagagaggtatttcttatccttttgctcggagtttggaagcaggattatcgtttaatttttaaaaaacaagtggtatgaaattacatgttatcatatatttaagcctgttgttgttcgcgggaagcgggtgttcggactttttggatgtgcagcccaaggataaacagtccgaggaacaactttttgctacgcgtggcggtttctatacagccgtaaacgggatatataataaattagccggttcaacactttacggcaagaatcttacttacgagatgattgatatcctcgcttttcgttacacgccgctatccgtgaataaatattatacggctttagtgaaaccggattacacggatgaaactgttgaggctaatttgtcgagtatttggtcgtcagcttacgccacgatcttaaattgtaacgtgttgcttaaaaacttggagattagtaccggggtattaaacgagcaggaaaagaaggtgttgacgggagaggctttggccttgcgcgctttcttgcatttggatatgttgcgcttgtttggtcccgtgtatgtgaaaaatccgtctgcggaggcaatcccttataatgaatcggataaagtttcggcgttacctatattggcggccgatacggtaatgggacgagtgttgcgggatattaatgccgcagaacaactgcttaaggggaatgatcccgtgatcgaacagggggctatggcttcactggaagaagatcaggaagtgtacttgcgctatcgtcaattgcgattcaattattatgctgttttggcattaaaagcccgggcgtatttgtatgcaggggataaagcaaatgcattaacggcagctcgccagttgttggcagatgaaaatgtggctaaacattttcccgcggtggatccgaataaattgttagctaaccaaagaactcccgatcgggttttctctaccgaggtattgatggggttctatgataaagcccgggcagatatttacacgtattattttgatgacgagacagccgggaataatttcttacagcctaaacccaatttcgtgttgagtagtctttttggcaacgagagtcaggattatcgttatcaaacacattggaaaaccgctactagcgtgggggtacagggagatatttttataaagtataaaaagattgataaacctaaagacgagaagaatcccgataagccggacaaggatttggaatattttcatgccgtgttgatgccattaatccgtttgagtgaggtatactacatcgcggccgaatgtgaaccgcttctagcagatggatacgagtggttgagtcaaatacgggccaaacgcggattacctgctttgcccgtgaaaaatgaaagagatttgcgaacgaaattgaataacgaatatgcacgtgaattctggggagaaggacaaactttcttcttgcacaagaggttaaatacggattacttgtggattgatgaagcgggatataattataatggagcgaattattttgagtttaccattccgttaccggcgggagaaattgaaaatcgttaaaaacaagaattatgaaattgagaataatattatttgcgctaatatcatttccctttttgtggagttgcgataaaaaagaaattccagtgttcgctagcgatgatgcaggaatttatttccagagattgacgaatgctgtttatggtagtacaacggaatattatggtgattcgaccgatttttcttttgccggaacgaatgcttattatacgagtcacgtactgtacgctcctgttttgaccatggggaaagtggtcgattatgaccggccgtttaaggttgtcgttgatatggaagaaacgacagctgttgaaggaaaagatttcgagatcgagttagactcgctggtaattaaggccggaacaagtaaagcggaggtgccggttcgtatcatacgcacggagactttattagagaaaacgttgaaaatagtgcttcgtttgcaagagaatgaacattttaaatgttatctggaaacctataaaaacacgaatctttacacggcaaaaggagagcaaattagtggtgttcgttatgttttcacatttaacgagatgtatacgcaacccaatttctggaaaaattacgcggaaaaggactattttggagaatggacggcaaagaagtatcaggtggtaaatcaagtgtgcgggttaaccccgatagattggcgatatgctaactattacgggtataaaatgcaatctgcacgacttcccttcttcgctcgaaccgtgcgaatttatttacaagagcaggctgatgcgggaaatcctgtaacggattcggatgggaagtatatgcaattggccccgaactacgaggtggattattctgattatcaataattgtttaaagaattgtcaatatgaaaataaaaaatgtaatattactctcgttcattctctttttgatgtcgtgctatgacgacaaggggaattatgattatagcgagatggcagaaattaaaatagagaacttgcccgaaacgcttgaaattcttggaggtatagagcatattgttgcccaaccgaaggtgatttcttcattggaaggagagattaaggatggaaatcctaatttcgagttttcttataagctggagttaaagggaggaagccaattatataatgaagcatgggtagatttgaatccgtctaaatcgttaaacttggatacgttaatttcaatcccatcggggaattatgtcgtgtggtttgcggtaaaagataaacgttcctctatcgagtattctacaacttttgacgtgaaagtgacttcttccacgtacgaaggttggttggtattgtgtaacgagggtgaagaagaacgtgtgaggatggatatgatttccgttatttcggcagatcggattgaacccgcttatgatttgttgtctttgttaggacttcccgatctgaaaaaagcaacgaagatcggattctatccggcacctgttgccacgggggatgttatttatctcatgtcggaagaaggtacttacaaacttaaccagaataccttcgagacgagtgatatgtataacatttacacgacagactttattgtagcaccaagcgatccggatgaaagcatcgttgaatatatgcccttggcaaacatgggccctcctactgcacgtgctatttttgccgtttcaaataaagggaatgtttatgcattagtaacggctgcgggagcggcttttgaaatgccaatcaatacttctgttcgcgggaagtcccccgaataccgtgtcgccccgtatgttggtataagtatggttcgttacccgggaaacagtacggccgccttgttctatgatatagataataaacgttttgtgggttggagcttcaagagcccgacaagtaatgacgttaaccagatattgacacctgttcctaatccggaagtcggaggattgtttgactttaaaaccggaatggatctagtttacatggaaggaactcgttattcgaatggcttggtgtacgccatattgcaaaacgcttctgggaaacgagttatatatggaattaatatgagcggaacgggattcgtgcaagagagtaaatacgaaaatttgaacgccccagatttcgataaagctacagtctttgctttccattctcagttcccttatatgttctacggtgtgggaaacaaagtgtatttgcataatttgggaaccaatatgacttatgaaatgaaaaatatcaatttgggagccaacgaagaagtgaccatgttgaaatttaatttgtatcataataattattggtggccggaaccctcggaagaatttatggcccgtcaattcgaattgatggtgggtacttatgataatagtgttagtggtgtgaacggaggaaagttgggattctataaagtggatggcgtgaataattcgataacaaaacgagtggaattttccggtttcgctcggataaaggatgtccggtacagggaaagacgttaggtaattacagcaaactccctccctccttcaggctcacttgaacaaagagacgagggagtttggttatggaaacaagcatttctttcatgtattgtaaaatggaatataattaccaaattttttttctatctttaatagaatcaagtattgtcttgttgataggacaaaaatagtttgtatttgtcctatcaacaagacaaatataatggaaggataaagatattttggaatcagttgttacggatagttagatgtaaacaactaaatatcagaattttgttatttcttcaacgggaatgaaagttgttttaccaactttcattcctatttgttaatcagttacaataattattaccttactgatcgtttctagtgagaactagaagaaaaagaatggaaatacaatagagaagttacctttttctcgtggatcattcagagcttaaacggcgcttagacattccgttatggctgatcaacgtttgagcttcgaatgagttctgggtaaggggtattatttggaacttatctgtcctttatttggaatatatttgtgtataaatcctaggttaaatattcttttattttacaatttaatttcgttcgtttatttgctctctttaatgtgggagattctgtaattaccagcacttgaataacatatataatagggaatgtcttatttggggtaaaacatagttaaaacaaagatagtgttctgggatagtgtccccaaaagtgtgtaaattccaatttatttatttttgtaatagaacagtcaaaaataacttattatggaatttacacctgagcaaataacggaaataatctccgaaataacaaatggagaacaaggattccaaggtcttgtcaaacaaggtcttgaaagtttaaagcatagcgaacgtgcagttcataacgcggcacataacgacgtgagcaacggttatcgtgatcgtcgagtgtactatgaccgtaaagtgtttgagcttcgtgtcccgcgtagtcgtaacagcaatttttacccgatgttactagg

SEQ ID NO: 10841 - DNA, 1034 bp, Unknown
  gut microbiota DNA sequence
agtagagccggcctactggctcggaaagtattccgatatgcctcatatcctttcgttccttaacgagagctatcagaccatctttgaggtgttggagaccgacaacgaggtgacgccgttgctcggtccgttccagaccgccttgaagaacaaggcaatggaacagttggaaggtatgatcggtacgttgcgtgtctatacctcgcgtttggcgaccaaagagagttattggatattccacaaggacggtgatgacttcgacttgaaagtttctgaccccaagaatccctcatacctgcttattgccaatgacccggaaatggagagcatcatcggtgcgctgaacgcccttatcctcaatcgtcttgttacaagagtaaacaccggacagggcaagaatatcccggtaagcatcatcgtggatgagttgcctactctgtatttccacaagattgaccgccttatcggtacggcacgaagcaacaaggtgtcggtagcgttgggatttcaggagttgccgcagctcgaagcggactatggaaaggtaggtatgcagaagattatcaccactgtcggcaatgtggtcagcggttctgcccgttccaaagagaccttggaatggttatcatccgacatcttcggtaaggtagtacaactcaaaaagggtgtaactatcgaccgggacaaaacctccatcaacctcaatgagaatatggatagccttgttccggcatccaaaatctccgatatgcctaccggctggatatgcggtcagactgcacgtgactttgtgcagacaaaaacaggaagcggtggaagcatgaacattcaggaaagcgaggagttcaagacctccaagttctactgcaagacggatttcgacatgaaggagataaaaaaggaagaagccggctatgtaccgcttcctaagttctataccttcaaatcaagggatgaacgggaacgcatcctttacaagaacttcgtacaggttggagaggatgtaaaagaaatgatacaagagattcagaaat

SEQ ID NO: 10842 - DNA, 11178 bp, Unknown
  gut microbiota DNA sequence
ccacacacacagacgcacgcacacacacatacatacaacatcttttcgtcagtcccaatgtattccatttaagacgctacaggaaatccctcctttttttattttttattttcgattttagatttttgattccaaccacaaatcccaccatgtattaattttagattttttctgtacgaagtttatactttttattcgtaaattgtaaatcataaatcataaatttttcttccattcgaaatagtttctctatctttgtaagttgatttttaaggaataggaattcatggagtacagagaagaagaagataacaatatagccatatttggtgccagagagcataatctaaaaaatatagatctgacgattccacgggataagttgacggtgattaccgggttaagcgggagtggaaaatcatccttggcttttgatacgatatatgccgaagggcagcgtcggtatctggaaactttttccgcatacgcccgtcgttttctgggagggatggaacgtccggatgtggataagattaccgggttaagtcctgtgatttcaattgaacagaaaactacgaataaaaatccacgttctacggtcggaacgaccaccgagatttatgactttttgcgtttactttatgcccgtgcaggggtggcttactcgtacgctacaggtagtaagatggtaaagtacacggatgaacagatattggaattgttgcagcgtgattttgccgggcggcgtatcttgttgttggctcccgtggtaaaaggacgtaagggacactaccgggagttattcgagaatttaaggaagaatggttttatctcggcacgggtggacggtgagttgcgggaaataacgatcgggatgagtgttgatcgttacaagatgcacgacattgaaatcgtggtggataaaattgtcatggatcaggttgatctgaaacgcttgaagaattccgtggccactgccatgaaacatggtaagggcgtgatgacggtaaaagattacgagtctgatgagattaaatattatagccgccatttgatgtgtccggataccgggctttcctataaagatccggccccgcatactttttctttcaattcgcctcacggggcttgtaagaaatgtaagggattgggatttgtcaacgaggtggcaatggaaaagattatcccggataattcattatccattcatgccgggggaatcctacctcttggaaaatataaggcttcccttattttctaccagatcgaaacgattctgaaaaaacacggtgccgatattaaacaaccgatccgggatttgcccgaagaggccttgacggatattttgtatggttatccggggcaattccgtttggagaatgcggagatcggggtatcgtccaatttcctcacgacgtacgagggaatattgaagtatgttaccatgcaggaggaaaattcgacttccaagaaagcgaataaatgggcggaacagtttatttccgtgacgacctgtgacgtgtgtaacggtcaacgtttgaaccaggaagctctacatttctatataaacgggaagaatatttccgagttggccaatatggaattatctgatttatacgagtgggtcagtaacgtggaggagcatctggaggataaacagaaacagattgcgggggagattttgaaggagatccggactcgattgaagtttatgcttgatgtcggcttggagtatctttccttgaatcgccagtccatgacgttatcgggaggggagtctcagcgtattcgtctggcgacacagatcggttcacagttggttaacgtcctttatatattggatgaaccgagtatcgggttgcatcaaaaggataaccggaagttgattcattctttacaggaattgcgggataacggtaactcggtgatcgtggtggagcatgataaggagatgatggagaatgccgattacatcgtggacttgggacccaaggcgggaagaaaaggaggggagattatggctatcggggggtattccgatattctgaaaagtgatagtctgacggcacaatacttgaaaggggagaaggttatcactatcccggcggaacgtcgtgcagggaatggaaagaagatttccctgaaaggatgtaccggaaataatcttaaaaatgtgaatgtcgattttcctctggggaaattgatttgcgtgaccggggtgagtggaagtggaaaatcttctttggttaatggaactttgcatccgatattgagtgcttatttttataatgctttggctgcaccgttaccttataaatcgatagaagggatgactgaaatcgataaggtcgtggtggtggatcaaagcccgttaggtaaaagccctcgttctaatccggcaacttacacgggattgtttaccgatattcggaagatatttgaaaagttaccggaatcacaaatccggggatacacggccggacgtttttcctttaacgtgagtggaggacgttgtgaggtttgtaaaggtgcgggagtgaagaccatcgagatgaatttccttccggatgtttacgtgcattgtgaagcttgtgatggtaaacgttacaacaaagaaactttggaggttcgctataaaggaaaatccatcggcgatgtgttgaacctgacgattaatcaagcggtagagttttttgaaaatctgcctcacctgcaatccaaattaaagatgttacaggatgtcgggttggggtatatcaagatcggacaaccttgtaccacgttaagcgggggagagtctcagcgcattaaattggccaccgagctttcgaagaaagataccggaagtacgttatatatactggatgagcctacaaccggacttcattttgaggatattaatatattgttgggagtgctacaaaagctggttgataaaggaaataccgtaatcgttatcgagcataatttggatgtgattaaagtggccgattatcttatcgatatgggacccggcggaggtaagatgggaggtaccgtcgtttgcaccggaacgccggaagaagttgctcagaataaaaaatccgtgacggctcctttcttgcgagaggagttggggatgaaatgagtttgtaaagtccataaggtttatggacatctacggaacgctttgtctacggcaacgagagttgccgttatttatttcgaaggattcctgtgatcatcttagatgatcatagattgacttgggaatcaaaatattttgtatttttattcgagatttgtgaacattctttgatttgtccgtgatttctgtaattttgtaaatcttttataatgtttattggtgtatgaataaaacaatctggccgatatgaagaatttactacaggataatttggaagggaatgttacttttaagaagatttttgtgacttattatgccaggattgtttattttgcgttccaaattataggagatcgggaagaagcagaggatattgctcaagatactttcgtgaatttctggaatcagaaagagaatgttagtcaacatgaagtcgctataaagaattacttgtatttgactgctaaaaatctttgtcttaatcaaattaggcataataatatcgtcaaggactatcaggctaaaaatcaattttcaatattcgatgatacggatattgtgaatgccatcgtttcatctgaaatttcttcccgaatttatcaagctatagaaactttaccggctcaatgtcgtgaagttactcgtatggcatatattcaaggattgaaaaaccaagagatagcggataatttacaaatttctatcaatagcgtaagagttcataaacaacgtgctattcatttacttagggataaattgagtaaaaaagatttgttgttaatgataatttttgaaaaaaagttgaattctttttagtcgttttttcttttcatgtgtctttattgtaaataatatagatttcatggacaggaaaacgtatcacattatacaattactttttaagtattatcgagaaacgttaagcgtttctgagaaagctgagttagatgcttggttggcagaagacgaacgtaatcgggaactcttgaaaagttatgaacatttttcccggtttattcaagatatgcacttttatgaagaaacggatgtggagaatggatatgagcgtgttttccggaaaattgaaatacaacaaaagaagatggttaaccggatgcgttggatcgggtggggaagtgtggtagcctctttgctgattgtggttacatgtatgatattgtggcagcgggggacaaatgaaagggaacgacattccatgataactcttgcgtctcctgaccgttccggtgtacagttgcaactttctgatggaaagactatttctttgaccaaagtgttggaagtacaggaaactgatggaagaaatgtggcaacaaatgacacggcgggaattgtttatcaaaatatacaggaggatatgtcgcaaggggaaaagattatgtataatacggtgattactccccgggggacagagtatctgttaacgttatccgatggttcaagagtttggttaaattccgattctcgtttgaagtttccggtgaagttttctaaggggacgagacgggttgaacttgtcggggaaggctattttgaggtagcgaaggatacttcttcaccttttatcgtgaatagtgggaaattggaaataaaggttacgggaacttctttcaatattgcagcttatccggatgaaaaaatagtgcaaactacattggtatctggttctgttgacgtgagttgtccggagtgtgcggctacagaaagcgtgtcgttggttccgaatgagatcgccattttcgtaccgaagattcaaaagatagaaaagaagagagtggatatcactccttacatagcttggcatgaaggtttcctaactttccatgatgagagtttggggtccattgcgaaaaaattagaacgttggtatgatcttacttttgaatttgatcagccggaaacgaaagaactcgttttttacgggagtatcaaacgacatgaaaatatcttgcaggtcttggatatgctgagatgcacgaatttgatcggttttacaattatagattcgaaaacagtacgcgtaactcgattataaaaatcattatttattaaaattgaattatatgaatgaattgaacgattggcgactacagtcgtgtagtccgaggtatatccttttgcgaaagtgttttttcatacttatcgtgatgtttttcagtatgatgacaagttttacttccttcgggcagacgaaggaaaggattactctcaagttggaaaatatggcattagaacaggttttaaaaagaatagaattggagtccggctatcgaatgttgtacaataaggatcttgtggcaacggtaaaagggattacgattcaggttaatgatgaattgttagctaccgtactggatagatgtctggatggaacgaatttatcatacatgattaaagagaacacgataattattgctaaaaaaggtactgaaaatagaattgaggtaaccgcaacaataattaaaggcgtggtgaaagataaaaagggagaaccattagttggtgtttccgtggtgattgccggaacggcaacaggtacagcgacagatgtgaatggtaatttctctttaccggtaaaggattcgacaggaactttgttattcacgtatattggtttcaagatgcagagggtggtatttcaccggggtaaagaagtgctggttgtaatggatgaggatttatctgaattggatgcagtaacagtgattgcttatggttctcgtaaaaagagggaattaattggtgccgtatcttctgtaaaggcagatgagatgaaggagcttccgaccgcaagttttgaaaatttgttacaaggacgcatgtctggagtagagattgtgaatcagtccggggctccgggaggaggaggaacattagttgttgttcgggggtataatacttttaattcacagtttgatgaacctcttagtaatagtgctcctctttatgtgattgacggtgtacccatgtattcattcacttctcctcgtacgggaaccaatacaattgcggaaatagatccgtctattattgaatccgtggaagtgttgaaagatgcggcttcagctgcaatctatggttccagaggtggaaatggcgtaatccttattacgactaaaaaagggaaacaaggacattcaaatttttctgctaatttttcatatacaggttctatttttccgaaagctccgaaacattacggtgggatgatggaacgaaattataatatagcagcattaaaagcttatcgtacagcgagtttatttactggggaatatcctaattcaattgccgagggaagtggttttatgggaggacagtatgattatttttggaacaaaggtaatcctattgacaaaaatgatataaaagcacttagagtcttacaggatagtttgaatccattttataataatgctacagattggtataaagaagcttttcgcacggggaaagtatacaatgttaatttacaggctagcgggggaactgagttaattcgttatatggtagcagccgggtattatagtgaatcaggaatcatgttgagtagtgattttaatcggatgaatgtgaatgtgggattaaatattcaacctcataaacggataaaactagatactcgtctttatgcagcttatacggatcgtagtcgaggaaagtctccgaatgggaaaagaatgaattataaggtcgagggattaacggtggatccgagaacggcctcttctttaacattgaattctggtgtggtaaaagataaattattagaagctcttaatgaacagattgataaaaataattcttatcggttcatgggaaatatgggattgagttttgaatttatagatggattgaatgtaagggtagatggcggtattgattataatcagaataatcgtaacttctttcgtcctagcacgatggatgtatctaaaatgaatgaaaattatatagaggagggaattacgcggaatattttcatgcagggagaggctcttctgaattatagattttcgatccgagagaaacacaattttgagttattattgggaatttctatggataaatctcaattatttgaaaatgatgctgatgctctaggtactccaagtgattacattcactatatacaggggacaactcctattaaatacacgaagcccgaatggggtgatcctgaggcttatgaaaccgtgcatgcttcttctaaattggaagaaaagataaatttgagctattttggtcgttttgcttataattttaaaactcgctatttgtttgagtttactttgcgtcgagatggttcttctgtttttggtgaagatcaacgttgggcaacatttccgtcagtagctattggttggacattttcagacgagtcttttttgaaatcagttaattggttaagttatggaaaaattcgagcaagctggggtcaatccggagtacagtttgataaggcttatcttgctcatggattgatggaaataggcgctatttatgatggagaacgaggaatgagggctagcggcatattgaatcgaaaactgggttgggaacaatcggatcaatatgatttgggattggatttggattttcttgattatcggatcaaatttaaatttgattattattatcgttatacgaaagataaattgtggaaagtgaacctgccaagtggaggaagttttttaggtggattctctaagcaatggcggaatgccatggaagtttccaatgaaggtattgaatttgaagtaacttgtgatattcttagagagactaaagttacttggcgaagtaaaatcacggcttctagaaattggaatcgttttgaaaaatcctattcgggtaaagatgaggattcgtttattataggtaaacctcttttcaatatttatctatataaagacaatggctattataattcacaggatgaagttcctgtttattatcaagctgacggatctaaaaaatatttaatgccgatgtttgaaacacaatattttacgtcaggagatcctaaagttatggatgtcaatggtgatggtaaaatagatatatctgatttcgtgagagttggttcttccgtgccgaaactttatggcggttgggctaatgaactaaggtggcgggattttgatttaaatttactttttacctattctttgggaagggatatgtataaaacttatgatattcgttcgttagatgcttataatggtggacaaggtggacgggcattgtatatcaatacagataaagcctcgttttggacggaagacaatcataaggctcagtatgctcgtttgggcacgttgaattccatgggaggtatgctggaatctaatcttgaaacagtttcttacatgaaactcaagcaactcacgttaggttataatcttccgaaagaatgggctagaaaagtgggaatggttggattaagagcgtttattacaggagaaaatgtgtttactctttctaattattcgggtgttgatccggaggttgtcagcatagagaatgggcaggatgattttaatacttacccgttggcacgaaaatggaccattggtttaactcttaatttttaaaaacatgagactaaaaagattgttatatttagtgggattattaatgtgttgttcttgtggagacatgttggatgtagagcctgaaattgctgtaacctatacgaactatttccaaaatgaacaggatgtacacaaaacgtatattgatatgtatgctaaaatacgagaagtatattttcaatatcaattacaacctcatcataaaatgggactagtatatgatcaatgtaatgaatattattcttatgccaatgaattgaaaagtctctctgttgaggcttttaaaaaagttgccggaacgagttggatacttcattataatgtaatttttcaatcaaatttgatattggataatctgtatcgggttcaggatttacctaaagatagagagaatttttataagggacattgctattttgccaaagggttaatgtattatgaaattgctagacgttgggggaacgctccgattactagagatgccaaaagtatagatccgttagggcgtagtgatgcgaaagttgtattagatacagcgttgtctaatgctttgagagcttttgatctgttaaaaaactatgatgaggcagttgattataacggacagaaattgaaaaaatattatgcacataaaggagcggctgcggcacttttagctaatatctatgcgtggaaaggtggtttatttaatgattcggatgcttatgaagaggctgaaaagtactgtactttaattattgaaaataaagtggggatttataaaatggtcgatacgcctgaagaagtctgttctgttgtcatggatcgcatgagttctgaatctgtttttgaattgttgaatagtagtattgattttggtttcacgaccggacgtttttctccggggataaatttccatataggggcaaactatggttatggggggtatccgttaaacccctttggttctttgtctaataatcaatatgaaaatctttatctcataaagaatgatcgggtaaagaaaatttggggtgatgaagatttgagacgtgcggcttatttttggaaatttgatgaaatggcagaagctgataatgaggttacgggaggctacgcttatccatatttctggcgtaaaccattattggatgctgcttgggttccggcagaaatgataaatgtagacggtaataaaatattttggcgattggccgagatttatttactacgagcagaagcacgttgtcgtgcaaatttgccgggggcagaagatgatttgaattatgttagaaatcgggctcatgcaaaaatatatcctgcggatactgatactgaaggtttacagatggcaatattccgagagagggaacgagaaatgttttttgacggagaacggtattatgatattgttcggaacggatactataattttccgggaatgatttctgaaacgttcgaaaaactttccgaacaggatgtaaaagatggagcgttatatgttccgataatggagacggaaatgcagcgtaatactttaatgcgtcagaatccgtattggttagcaagatggtaatgattggtaaaatatataatgtaattatgaataaattattagttacaatgatcgtactccttttgataggagggtgttctacaaattggaattttgagaatacgggattagctaaagaacatttcgacggaaatatgtatgaatatttaagaagtgactcttataattgggattcaatacgattgataatagaaagggcagaattggtgcctttgttcgagggaaaagacccgatcacgtttataggtcccacgaatcactctgttagaaaatggatgaatgacaagtttataaattgtatcaatgacatagataaagatgcttgtattaaaattgttaaggatcacttgtttgccgggaagatattacgtgacgatattccccaaggaaaatatcttacacaggaagggggagatgtttatacaactctctctggaaagagtatttggatggggctgttttatgaagattatggtaatgttgtagaagggggagtacgggtgatctatttaaagggagatgtgactattgatattgcttcttctaacatacagcctacaaatggggttgtacattcgttgagctataattacgtgttaggtggattatgatgaactttaaataattgattatgagatgtagtattatatatttaatatgtgtcgtgtttcttattgcatgtaatgatgttacggtagggtatttagagactgaaaatgctgagtatatacctgataacatggaaatacctcaaatcgaggatctagatgaggttgtggatgccctacgtgtaaagaataacgcaccttgggtaacacaacctattcagggtatagaaggaactgatccgatgatttattctacatattccggagcat

SEQ ID NO: 10843 - DNA, 52935 bp, Unknown
  gut microbiota DNA sequence
ccctcgacttgcatgtgttaagcctgtcgctagcgttcatcctgagccaggatcaaactcttcatactaaaaaatcttacagaaattttctctggccgggtcatgtgtttatgaatctcgactaccgtcgattccgattcacgctcgctacgttgttattttcacgtcaatattgttaaagaactcttcttgtcatcttcatcgccgtcgcttttccaggagcgaaagcgagtgcaaagataaggcgtttttatcattccctccaaatcttttccgaagttttttcaaactttttttctcgcgcccccgtttaaagggtcccgccgggaaagatcgtcgtcaacatcgccagaacgccgccaccgcgtgaactcgccgtcccctcgtctcgcctccctcgttccgttttagcgggtgcaaagataaggcaaactttatcccttttccaaatttttcacaaactttttttcaaaatttccccatcataactggtaaccaatcgcttgcatgaaagaataccgcaccgggaacgggacgggaggagggaagaggcgagggaataacgcttctcccccgggactctcccgattcaaggacgctcccgaacgcctttgatacggctttgattcgaaagtgatacggctttgatacctgaatacatcgaatatacaacccgtaaacaacgggggtatactgaaaaagtttactgtaaaacagagtaaactcatggcagaatttataaaatagcgaactccccctctaactcccccttacacaggagggaagactggctacattggaatatgtagtgcaaattttcatgttttattccctatcccctaataaggggactatataaaagaagagaggtgatttatcgttgcatcacctctcttgaacaacactattagtgtacttatttcacgataatcgtgaaacaattattcacgtcttgagtatatccttcatttgtaaaagtcagagatatctggtaacgtccaacaggaacatcactatataccggcatagaaaaagtcccgtcaccactgacattcaacacttcccacattttttcagcatcaccggattccgtggtaatactttttatactgacaaaaataggacgggttccttccaccccttctatcggcgtactcgtccaaggccacccgtacttatcacgcttatattcatcccctcctattgttggataaattccattttgcacacaatactccggagtatacccataattcacatacatctcgaaagtcgggttaggcttgggaggtgtcagatccagtacttttttcacaaccatagaatccatggtataacccgcatattccgtctgtaaataaccgggggtaatatcttgacaagctcccagcaatatacatccccctattattaatatcaatattattctcataatcattcatttaaatttttccaaaatcataaccataattcaaggcatgaaccactccgtttttaggttgtatattcggggtcgccaaaggaatcattttcccaaccgttacagaatacaggaacatctctatagccccggcttccggaattcctttataagtattccgctccagataagcaataacttgattctttcctatacaggtaaaagttgttcctccatcttgttccttcgcatgtattgcatagtccatattccgaaaaccgatattctctttcaaatattttcctacaacaacatgtttcaatatcagttctcgacataattcaaccggcatgtcttctatactttcatacctatcttccgtaactcctttgtacttacaatccatcaaataacggtaaacggcaaaagaaggcggagcaaaaaaagtcattgtgggtacagtatctactcttccttcgaataaatccgttaacccggcccgttctatcatttgtaccgtatacccccattgttccgtgtttgaacgcaagtactccataatcgtgccatcgtaataaggagaagagactcctccatcaatgacgtcttgcttggttgtgcatgcgaaacaaacgatacacatacttaatcctatcaatatctttttcatatccttcataactattgtctttttaaccaataaagattctgccgcatcaagggattttctttgaaatcaatacttttattcatcaagaagaatgccccgtcaatacaatcctgttgcgttacggtctgataaccaccctccaagaaagaatgcacgtaatccaacccgttccggataatatcataataccgatacccctctaccaacaactctttttcacgttcccggaatacagtcatctgtaaatcaccgttatcttccgaggagtgatagagtgccgcacctgccctcttccggatcgtattcaaatcttcgatggccccttcgattttatcacctcctaaatgtacccgacattccgctctcaacaagtagatatcagccaaacgccaccaaatacgattggaattaaaagaagcgaatttctttttagtacccgtgaccgtaatattcacacttctctctttatagggataagcaaaacctcccgttatactcttatccatggcatccatcccgtcaagatcatagaaataggcatattttctagtatccgcacccggatacattttccgaactgaagtcgtgaatatacgtaatgtgaaatcttgcacgacacccgggccatattcaggacgtacgggataaccaacataatccgtacccagcgaatatacccgttttcctacctcgttataataatctttcattaccgtttcataaactccttccttgctattaccaacaagtaccgaggcacaaacctcttccggcgtagcaaccaaatcatataaaggagattcaatcaccttggtacaagctttttcagccatatcccacaattctttctcatcataattccgatcaacttcagctgcaaaatacttacccccggctttccaagcacacaaatgagccagtaaagcataggccgcaccctgacaaggggttgattttgaaaacatcgtattcccgttgcaatccgtcagtttgtcaaaaggaggtaaaatttcggcagctttttcagccatctctattgcgaaatcacacactttcggccaaggggttttagctacaggttcccagttaattccccctttctgcaaaatacagtcaccccaacgacgtatcaaatcaaaataagccaaagctttaaaaaagtaagcctgtcctcgataaaactgtctccgttcattcggcatctcaacaacatcgacatgcgacagcacggtctctgcccccataatcacctgataccaagcttcccacaaatcagctgtcccagcttccaattccaacatccgggcacccctccgagattcatccgcctcatcggcataagctcctttttccacttgcagcaaagcattccaacataccatatcccgtacccctgcaccaacaccgtatactaatgcttctacatccttttctttggtaatatttccaaaagtcaagctgttctccggctcaacccgtaactgatccgtacatcccgcaaggaacaacacgcataataaaataacgatcaacttcataacttaaaatttcaaagttaaacctattgtaaacttcctagccaaaggataatttcttccgctatcaataccagtcctaatatccacgatctccggatcaatacccgaataattcgagaaggtcagcaaattttccccactcacaaagaaacgtaactgttctatcttccaattccggatcaaggacttgggtaggtcatatcccaaggttacagtcttcaatttcaaccaattcaccttttcaacatagcgatcaatcacgctcacctcattcgggaaaaattgcatctggctatcggcttgtaatttggcataatccgaattatctcccggttgttcccagaaagtgacatttcgtatatccatcaagatagggtgttccaatccgttgtaattaggaataattgaacttccgggaagagtattatacatatgacgtcccaattggtatgcccatgaaaaattcaaatcaaaccctttccatttcaactcactgacaataccgccactaatttcaggtaaagcactacccaaatacacctgatctccgcgcccgatagaaccgtctccgtttacatcgacaaatttcaaatccccaggtttgtagtactgaatcccccccattggagcactcatacctacattattgtatacaataggtacctcatcctgactgttaatgtatccctccgtccgataaccgtagattccattcagtgctttgccgatgattccccgggaattatctttaccattatatgatttctcataacgattccagactttggcaccattaaccgatacccgccatgaaaaatcgggcgttctgaatatatcatatttaatcaacaattcaattccttcatttgaaatggcagcagcattttgccactgggaaccgaaaccgttgtgttctcccggtaaggacaccggaaacagaagcttgtcggtataacgataataataatccaaggtaattcccaaacgataatccagcaaatccaaatccaatccgaaatcgtactgatctgtctcctcccaagttaaatcttggttatacgcacctaaagaccacgaaggttccaacgtactattcccttcaaaaggagctccattctgcatgattcccaatgcaagataagccgactcgaagtgttttccggaacgtccccagctagcccggattttaccgaaattaaaccactctaaattattccggataaaaccctcttcggaaaaagtccatgctgctgcaacggaagggaaagttccccatttcttgtgttccccgaaagtggagcttccatcccgacgaatactggcagagaacaaatatttctttttataattgtactctaaacgcgcaaaataagaaatcaggacctgttctgtcatatccgaaagatagtgctgtaaagctattttacggctaagcgagggtgtcagttgttcatcccccaaatctggaaatcccggacgcacgtaatagatctgatcactaggagaattctccccgcttcctccattatactcggtctgatcatactgataggacagacctgccaccgcacttacattatgattttcatctattgtagtcttataactcagtaaattctcattcaataccatcaagctgatcccagtttctcccacactcatcgaacggttggtagacatcaagtaagagggagtaaaaccgttacgacgatttaacgagtaatcggcagccaaggatgtcgataattgtaaacccttgataatctcatatcctaatttaaaattggttctcaaacggatagagcgatttttctcttttatatttttcatctggtcgacaatataatcccaaacggccgaaccttctcctggatacagagaactaaggtaataaggatctcccggcacaacaccgatcatcggagaactttggaaactggaactaaacgatccgtatccttgcttccgattagccaaagaagcattcagtcgtaaatctacggtcaatttatctaccggaataatgttcatactggagttcaaatctattcgattaaagccgcttcccttcaatatacccgattcatcgtaataacctaatcccaaactataagctattttttctgaaccaccgtaagactggatattggcattcgtcactttccccttgtgataatacatcgggaaaaagttcgtggcattgttataaaaatcgttcaaactgtcctggaaaaaaagtccgtttgaagtagaaggaaccgggtgcatcaaagcatccatcgttccccccggatgcaagtaattctcttcccaagtttcaggatatttataacgcaaattttccatatccaaataagcgatcaattcgtttctcagtgcctttaaacgaaaatctctttcataacgccccaccatgatcgtcggtaattccggcaacacgctccagctctgtgaaacattcaccgacaaagagcttttttggttctgacgtccctttttcgtcgtcacgataatcaccccgttggctgccctagaaccgtatatggctgcagaagaagcatctttcaaaacttcaatggattcgatcatatcgggattaatgtctgacaacaagttcgttcccgtgatcggagaagtaaaagagtttaatggaaccccatcgacaacccataatggattagaaaaacgtctttccaactcgatgtccaaagaattgtatcctcgaatggttatcgccgctccaccacctcctggtgccccggaaatattcgtaatatccatcccggcaacccttccttgtaataaagttgcaatattcggggagggaattccttctaaatcttctccttttaccgtggatattgctcccgtcatttcacgacgggttgtcgttccataagctaccacgacagcttcatccaacgcttgaacatcttcttccattactacacgcaaagtatcggattgagcattaaaggttactattttctttttaaagcccacgaaagaaaattctaacgtaccactcgttacaggcagatccatggcaaaccatccccgggcatctgttgccgtacctaaagacacacccgccacttttaccgtcaccccgggaataggaattctctgcatatcatacacgaatccttttacccgcaatgattttttttccggactatcaagagaggcaggcttgattatcaccatccgatcaatatattcccatgtaaatttactaccaagtagccgtttcaagacctcgtcaatcttcacatttttaacgttcaaggaaatcgtttgattcacgtctacctcgttaaagctgtaaaaaaagtccagttgcgtctgacgttttagttcggaaataaccttggtaaaaggcgcccctgccactttcagcgtcaccatctgatcctgtgcccgcacccttgccgacagggaaaaaacaaagacacacatcatcaaaaaagtcaatttcataatcatcaaaattttagcacatcgatttcttaacagaatcctcgtgcccgttcgattttttttcatacttttgtaataagagttaaacaattatccttcagggatcgcaagtccttgcgggatgtttatcacaccgggagttgttgctgcaattcccggtgtgtttcaattatttctgtttattatttatttcactcaccgtcaccacccgaccgttcacgctaaagtgaacctgcgtggtcttctcgatgatcgagaatattttgtttgccgaatactccttgttaattaccccggcaaaggcaaaatgtttcacgttatcggaagtaaagaaaaaatcaatgtcataccaacgttccaactgtgctgtaatttcctccaatgtagctccctcgaaatagaacttcccatcaatccacgcagtatagatggatgtatccacttcttttgttgcaaaaaccccatctttccacacaacttgttgccccggtaaaataacctcccctttcccggtcaaccgatctccaacccgcactttaccactcacaagtgttgttcggattgcccgttccgaaacataagtattcacgttgaaacttgttcccagtactcgcacatccacctctttcgcctccacgataaaaggcttcgcagaatctctcgcaacctcaaaatacccttctccttccagatacacccgccgttccttcccctcgaaacgagtcgggaaacgaagtctcgattccgaattcaagtacacttttgaaccatcagccagaatcaattgatactcacctttacgaggaacaacaatcgtattgtactcaaccttagcgggagtcccttttacctgttcatacgtcacgctcttagaagaatcgagccggatgcgaacatctcctttatttaggatggtgtcaccagcaagcaaggacaaatctatcctttccccctgttccataaacaacacggcacgaggtgttccggcttctatctccaacatcacttccgccacaagaaggtcctttttctcccgtaaatttatccataaaattccacccaataacaaaggcaacatcgcagctgccacccagcgccatacaggcacacgcctccggtttatcccctctccccggtattgcttgatagcccgccacatcttttcacgatctgccaccagctcatcctttttccgcatcccgacctctctcaacacacgcctcaccccggtaaaattctcgtcctgccatattctctcccactcggcatctcccggtttgaccctaccttccaatatcgcccgtaaccaatctttttcgtcctttgtactcataatctcgttttttagagtaaagccttttcatccggctttccacacgtaaagcgagaaacagatcaattagggtgaaaagaaatcgtgatttttttagaaatttgtaatatttcttttttttgctcgtcgataactatgatagcaaccaaaaccagcacgaatcgccaatcccgtcatgctctctcccgcataagtcgaaccagccaataatgcctccatctcacgaaggcgacaatcattaatataagccttaaaattcatcccgtacgtgcggtttataaacgtggaaagatacgtgcgattggtctgtaactccctggtcagatccgttattttcaattccggattcaaataaggcttgtcttcttgcatatatttctcgaacctttctttgctcaaaagagacggctttttgataaccaaactatcgtcggagagacgcctctcaccaggacacaaaacataattccccacgataatattataggatataatcgagaattgtactaacaaaataccgattggaagaaaatcgatccagtaacttttggcaaaaagaggctctaacaatggcatacataaagaaacgagaaacaagagcaacacgcttcccaaccaacgcaagggaggctctttcatgtcttccgagcgttcccgcataacacgccagtagcggaacaggcgcttcagccccagcaaggtataacaaaaacaaaacagaaacgcaaccatcaactgggaggtgaaaaaacgagtaaaataaaaataaacctcctctatcgggctatccacggctacgatcatcacctgcacgtccaaaggcacgaaaaggctccataccagaagagcgaacgggatcattacgggtaacccgtaatgtcgcatggaaaaacgctcggaagagtccacccgtgtcaaccaaaaagcaacatgataaaaagtcacggacatcatgataaacgaacaataacacaaactattcaaataaacaaaaaggcgaggtgaccacatgtacacgatcacgcaagcccagccaaaagcaaccgaaaaatagaaaaagaataatccccgtttcaagtaacgctcttcctcccgcacgctatctttataagtaagtatcattaacaggcaacaagttagagccgagattaccggaaacagattcgtgagaattgatatccatgtttgcatactcatacatgcaaagatattaaaaaacgtacaataatattctgtacaacaaccactttaattatcatcatccgtgcatttcgtacaagattcgtacactgcaagcccatatcgaacgatttgtcatgtcattttttctctcttttgaacgatttgaaccgtcgatttatatactttgcacatcccaatcttcttctttaatctatttttatagggaaaaatttactttacaaacgataccatggatgacgaaaacttatttgaaataaaccttaccgattggacttggcgatgggattttatcgatttctgggcacaaccgttaagtcaaagaggtgtgaaacccgaaaaagaaaaagacgataacataccctccccggagaaagatcagtgatttatctttttcttgatcagccccccacgccaaagtaattaccgtttccatgggagaaaagttacaacctatttccccacctcttttttgaaaaaagaattacacaggatcaacatgaaattcttgttgtgatcaccgaattcggatttgattttcttgtaagccacctttacttgggtcttcaccgtattcacggatacccctaactgttcggccacatctttgtaactcaacccctcgacacatcctagaataaaaatttccttacacttggggggcaggctatccatcacgacttgcagtcgccgatacaattcttcaagattctcagaatcctcgcttgattcctccccggaagccatcatttctcgcaggtatcgctgctccacctctgcgtgaagtttacgatcaatacaggaattcttgacagaacgactcagataagcgtaaagagaaccggaatgggtaatcttcgcccgattcacccacaaataaatgaacgtgtcctgcacgatgtcttccgcctccgcccggttcccgacaaaacctaacgcgtaaaggtataaccgttccgagtaagactcgaaaaaagaattgaatgcacaccaatccccctcctgcattttccgaaacaaaattaactcatcctgcataggccacctttccttattgcaagcaaaaataatgattctctttatattattatactcccgtgtcgggaaaatacaagattccgatcgcatttgctttaatctccgccagttttcaactatgccttctccctcctctcgggacatccgaacctatttctccatataacaaatatactacacgacacacccatatttcaaacataaccgtattaaaaatcaatttaatcgaaggtgaatgctggatgaatacaggatgaatgctccgtggtctaaatgaacttataatcgaatctctatgaaatcacgagcaaagatagcttaatgccatagcagtacccgtcatttcacaaggtaataatctcccatgtcccattccacaccctttcatccccctttcatagcccttccaccatacccgagaaaggaggagaaaagcctgagataagtattacggaagattattacctatatatataccaagtatttcaatgagtttaccttaaaaatacatagactcgccatcagtacccaatatttattccaccgaagagtttcaaaagaaatcagaatcgtttatatttgcatcactattaagataaaagctaaaaaagaagacatggcacagacaccatctattccgaaaggaacaagagactattcaccggaagttatggtgaaaagaaattatatattcgatacgatcaagtccgtattcaaactctatggttacttgccgctggaaactccggcaatggaaaatctttccaccctcatgggaaaatacggcgaggaaggggataaattacttttcaagattctgaactccggagatttcctggcgtctgttaccaatagcgaagtagaggaacgcaatattccccggctgaccaacaaaatttgcgagaagggactacgttatgacttaaccgtgcctttcgcccgattcgtggtacaacaccaaaatgaaatatcattcccgttcaaacgctaccagattcaacccgtgtggcgagccgaccgtccgcagaagggacgctatcgcgagttctaccagtgtgacgtggatgtcgtgggaagtgattctttactgaacgaggtggaattggtacaaatcgtggacgaggtgtacaaacgactgaaaataaatgtacgcctgttgatcaacaaccgaaaagtgctggccggaattgccgaaacgatcggccaccccgacaagctggttgacatcaccgttgccattgacaaaatggacaagatcggtgccgaaaacgtgaatgccgaactccgggaaaaaggagtgtcagaagaggctattgaaaaattgcaacccatattacgcttagaaggctccaacgaagagaagttgacccgcttgcaagaaattttaaaagacagcgaaaccggattaaaaggagttgcagaactttctaccgtatttcgttatttgaatcaactggatatccaaacagaaataaaactcgacttgacacttgcccgcggtttgagttactacaccggagccatcttcgaggtaaaagccaaggacgtggagatcgggagtattaccggaggaggacgttatgatgatttgacgggaattttcgggatgaaaaatatgtcgggtgtcggtatatccttcggggccgaccgcatcttcgacgtgatgaaccaactggacatcttccccaaagattccacggcaaccacccgtgtacttttcgtgaatttcggggaaaaagaagaggctttctgtcttcccgtactgaaaaccttacggaacgcaagaatcaattccgagatatacccggaagccgccaagatgaagaaacaaatgacttacgccgataaaaagagtatcccctatgtggccttagtcggtgaaaacgagataaacaataacgtggtcacgctgaaaaatatgctcaccggagaacaagaaagtgtagctatttccagcctagtagacaaacttaaaagcgagaattaaagtatgcaactataccgcaaagaacaacgcccgctgaaaagccacggatttgatgttagattcccgtgaccgggaagtggtttataaaatttgtaagattcataaagttgaaccttacaaactcgcgaggcaaaagcctcactcgtgtgtgtgcaatttaaaatctaaaatttaaaatctaaaatccaatgactcattatataaccccagagaaattaactttcgagcagatcgaaaaaattttaactaagaagtataaattagctttatcagacgagagcaagaaactgatcaatgattgcaaggcttacttggatcataaaatcgcaacttctgacaagcctttgtatggaatcacaaccgggttcggttctttgtgtaagatttccatctcacaagaagatttaagccagttacaagctaatctggtcatgtctcacgcttgtagcttgggagaacccgtacacaaagatattatccgtttgatgttgttgctcaaagctcacgctctttctttgggaaaatccggggtacaacaagtgaccgtggaacgtattatcgatatgttcaaccatgacgttcttcccgtggtaaaagaattaggctctttgggtgcatccggggacttggccccgttggcaaacttgttcttgccgttgatcggcgagggtgaggtgttctacaagaataaaatctatccagcaaaagaaattaatgccaaattcggctgggaacccatccaactgggagctaaagaaggattggctttgttgaacggtactcaattcatgagttctcacgctgtttacgctttattgaatgccttcaaagtggtaaaatatgctgatattatcggggctttatcactggaagcatacgacggacgcatcgatccgttcttaccgcaaatccatgaggctcgtcctcatccgggacaaattgaaacggctcgtaatatccgcaccttactggaaggttcagaattccagaaaatggaaaagactcacgtgcaagacccgtactctttccgttgtatgcctcaagtacacggggctgtgaaagataccgtggcttacgtggcatctgtcgttgaacgggaaatcaactcggtaaccgacaacccgactattttcatggaagatgatttgattatttccggtggtaacttccacggcgaaccgctagctctggtattagatttcttgagcatcgctatcgccgaattgggtagtatctctgaaagacgggtataccgtttgattgccggagatcgtaaaactcctgaattcctcgttgccaattccggcttgaattccggtttcatgatcccgcaatacgccgctgctgctatcgtcagcaagaacaagcagttgtgctctccgtgttccgtggactccatcccgtcatccaacgagcaggaggatcatgtcagcatgggtggtaacgccgcaaccaaaacagtgaaagtgatcgagaacgtggaaagagtgctggctatcgaattaatgaatgccgcgcaagccattgatatgcaacggccgacgaaaacatctgcatatttggaaaacttcttggccgaattccgcacgatcgtaccattcaacagccaagaccgggtgatgtaccaggacatcgaggctgccgttgaatttttgaaacaaggggagttcgctaacttcgaataaattcaatataataatatgaaaaaagccggttttcaccggctttttttacaaaataaagggacatatcatttcttttcttgacttttcaatataccaggaataactaaaattgatttagcagataattctccttctacagttataacaattaacccttgatccagtactactgaattttcatcctctgttacaatctcagtaactataccagagatttcttttccatctttatctggaacttctatcatgaaaattcctttatcattttcaattattccaatagcatctccagtttttacagtgtatccaatttccaccattctcttccatacaccaggtatcggagccgtaatctcaacttcaaagtctctaacaatctgcacattttctatgtttgactgttcaagattttcttcactaaaaatattttccgaagcacaagaaaataacgaaattgcaatacttatcacactaacaaaacgtaataattctttcatatccttttattttgagttaatactattgtaaatatacaaaaaaatatatcacattgtataattcaaataagtaaataacaataaaacaccagatttcatccactctcccaaaatccatttatattattctaaaaaacttcaattatttatcttacatttatggaatttctgttctccccgcatctatgtaataacatttcccccgggaattgcgaataaacatagaaaggaaaagtataattaaacagataacgatatgatgaaaagattacttattatcacggtattagtattcggcgtacttgtcgctttcggacaaaaaaatgtttccgacaaagaaaacgagacagcaccgaaaacagccttaatcgaggcgcaaaaggattatcagaaagcagtaaaagaaaaaaattctccattactgattcaatcattaatccgccagatcaaatatcaatctttaattgacatagacagtattcctcccatgttacaaaacttggaagaatacatagaaacagaccagaatattgttgaaaaaagtattcttcactcattattggcagaactctaccaaatgtacttcaatacccaacaatataaaatcaaccggagaaccccaatcacgggttacgtacctcgcaatatggcagaatggacaggtaatatatatagagaaaaaatattccaacacgcgctggatgcagtaaaagcccgcccccaactctccgaggttaattgcctcacgtacaaagaaattctcgtactcgggaaaaactcaccggcacttcgtccgacgatgtacgatttccttgtgtatcgcagtattgacatattaaacactatttctcgttacaataaacaagaacctatcacgaacaagcaactactgttcgccccagtgaaagaatttgtacaaatgcccatcgaagtaaaaaagatggatgcttattcaaacacgctcaaactttatcaatcgttattacaatccgagatcgcggctgaacgcacggatgcaattcttatttccgacctagaccgtttggagtatgcgaacaatgtcatcggtttaagtcagaacgattctttatacattcagtctttagaacaattgtcacaacaatatagcaaaaacccttacaaagttgaaattctctacaaacttgcccaatattattaccagggaaattatatttcaagcaatagagatcctcaaaaagccttggatatatgtaataacgggatacgccagtttcccaagtatttccggatagacgttttaaaacaattagccaaggaaatcacccaaactaccgtatcttattctataaatcccaacgtgtacccgggacacaaacaagaggtgaacctttccttcaagaacttatccgagatttcaatctcgctgtacaaaatcacggaatccactctggaatacttgaatttgaacaaaagagttccaaaacttgaaaaaatatcaactcacacgtatcgtcttcccaagcgattggattctcaggacacgattctacgacttcccgtacctaacacgggacgctatcagttaacaatgtcttacgcgaataattccaaagcggactcatcctatttcagttccagccgtctatctaccatcgcccgtaaaacgggagaaacaagttataatgttcttgtttgtgatctcatcagcgggaaacccatcgaaggagcaaaagtaaaaatctacaagagaaacggacaaaagtacagtcttgcgggagaattttcttccgacagaaacgggattgcaacgttgaatgaatccaatcctgacaattattaccaagtaaccctaggagaagataatcatggtacaataaaccgccttccctaccaatacattggtcgtaccgatgccctatcatcctcggtaaaccttttcactgacagggcaatataccgtcccggacagatcgtgtacttctgcggcatcagttgggaagccacccaaaatgcgtcaaaagcgcttatcgggaaaaattacacggtaaccttacaagacatgaatcaacaggttatcgcaaaacaagaagtacagacaaacaaattcggctcctttgccggaaagttcaccttgcccaaagaagtattgaatggtatgtttatcatctctactgatggaggtaggcaaatgatcaccgtggcagagtacaaacgtccgaaattcgagatcacgtttaactcgctaaaggatgcctataaattaggggaccagcttaccgtttccggtattgccaaaacttattccggtgtcaacatcgaaaatagcaaggttacctataccgtacaagcccgtacttttgattggggcctccaagaaaatatgattgcagcaggaaaaacacaaacgaatgcaaaaggagaatttgaaatttctttccaaacgaaagaatcacccaatacacctgcaatatacagaggattcgaaaattacacagtttccgtcacggttacaacgtccaacggggaaactcaggaggcacaatacccgattattatcacaaatcaacgttatcaattaacctccctcataacccctgaaatcaataaagatcttccaagtaaaattctggttacaacccaaaaccaactcggttaccccctgtcagaaaatatcacatacgaactactctctcttaaaccgttacagaagttaggggagcaatatgacgaagggaatttacccattgacaaaaaagttcgagaaggaacgttcactaccggagaagacaaaaaactggaaatgaatttatcatccttaccttccggtgcatacttattgaaatttgcgggtacggggaacgataaagatattacttaccaaaaggtcgtatatctttattccactcaagacgaacgacctccctatcctacttactattggtgcgtgcaggagaaaacgacatgcgcccctggtgaaaatgcccaaattctggtaggttcgtccgctaaaaacgtatatgtgttgtatgaaatttattccaaccagaaattcatggaacgcaaacgcttcatactaaataattccaatacaaccctgtctattccttacaaagaaacttatggaccaacagctgatgtctttatcagttatataaaagataacaaattcttcttggaaaacattactttaactcgtaaagaaacaagcaaacaactggatattaccacgaaaacattccgggatcaccttacccccggacaacaagaagagtggtcatttgttgtcaaaacggaacaaggaaaagctgttatagctgaaatgatggcaggtatgtacgatgtctcgctggataaaattcattcacatcgttggaacttcaatcccgtctactccacttatagcatgagcccaagatggagatatactacctatccgctaaacggttatttaagcgaacgcatcaaatgggcaaatgtccccagatttgaatatgatgtattaaatctatatggcctaaatcagtttggattctctaacggggcgcagatcatggtaagaggatacgatggagtaccgggagccttaacggaagaaactacgacagacgacgtagcggttgttgctttcggaaaagtagcaggagtttccagcttaagcaattcggatacgaaattctacatcagagggctatcttcttttaaagaatccagagacgaggctccggctgccgatgaacttgcctccccggaaatcagacaaaatttccaagaaacagctttcttctttccccagcttttaacagattcaaccggtaacgtgttaatcaaatttacagtaccagaatcaaccaccacatggaaatttatggctctggcacacacaccgaccatgcaattcggacaaattgaaaaactcgtcgttacaagtaagaaattcatgattaatacgaacttgccacgatttgtacgtacaggggataaagtcgtattacaagccacaattaataatctcacgtcggaaatacagcaaggagaagcttaccttgagttattcgttccctctaccaatgcagtgatcagcaaacagcaggtaacgtttaacgtcaaggctcaggaaaatcaaaccgtcagctttgaatttaccgccccggaaaacatggatttactcggatgccgcattattgcctcttcttcagaattcagtgatggagaacagcacgtactgcccgtggtttctaatgcaactttagtcacccagacactccccatattcacgagtcaacaagggcaacaaacattcaagctgaatgccccgaaaggcatcaccccgtatcgcctgaccctagaactcacggcaaacccgatatggtatgcagtgttagcactaccaacaataaacacaccacaaacagataacgtgaccgaaatcacagcatcctattatgtcagcacacttgccacggccattgctaatgcaaacccacaaatcacaaataccatccggcaatggatgcagaaatcggatgcaaccctaacctctccgttagaaaagaccccggaattgaaatctatcctgttacaactttctccctgggtaaccgaggcccagaatgaaactcaacagatgcattcattaggagaacttctggatgttaatcgccaaaattacatctcgcaacaagcgatcgacaaacttgccgaactacaaaatgaagatggcggatggtcctggtttaaagggtttaattccagtaccttcatgacagaaaacgtgctggaagctatggcaagacttgtctctttaaatgttacaagtcatcctgaaaaagtgaaaaagatgcaaatcaaggcattacaattcctagataaacaaatacaggaatcctacaaacatgtgaagacagccgggtattctcaaatcttgtacttgtacacacgtagtgcataccgggatattccattaacaaatgcactagaagcccacaagtattatcttggtcaactggaggcgtcgtggacaaaactttctctttatgaaaaagccttgaccgccattgccatggaacgttacgggaaaacggatatcgcaaaacaaatcattcgctccctgaaagaatactccacgacaacccccgaaatgggaatgtattgggcaaacaatcgttctaccctgttcacgaactccacgattcaaacccacgtggccatcatgagtgcattccgggaaatcgaaggaaattccacggacatggagttgatgaaacaatggttattgcggcagaaacaaacccagagctggggatcaacaccaagcacggtagacgccatttatgccttgttgctcacgggaaataatcaactgacatcatcggaagatctgagtgtcaaactcggaaacaaaaatttaaatgtttccccggaagaaaaaacgctcggttacatcaagcaaactttcatgggtaaagaaattactccaaaaatgatgaacgtaactctttcaaagaaacagcaacaatcaagttggggtgctctatatttacaatactttgaaaagctagataagattaccagtcattcaggcggtatctctgtgaagaaaaatctcttcattcaaaaagaaggagataatggaaatactctgacgccactagcaggacaggatttacaagtcggagatcgaatttgtatccgaatcacggtaaccaatgatcaggatatgcaattcgtacatctgaaagatctgagagccggatgtttcgaacccacggaacagctctctagtaaccgttggcaagacaatattggttattaccaagaaaccacggatgtcgcgacaaattttttctttgacttccttccaaaaggcactcacgtgttcgaatacacggtatggattgcccaaagcgggacttatcaagatggcattaccacattacaatgtatttatgctccacaatattcagcaaatagtgatgctggaagtcttaccgttcagtaaacaaaaagaaaagttgagaattaaattctcaacttttctttttatagtctcacatttatttctcttccagaattaagcggaaacctgatccgtgtacattttctattttgatcgctggatcatctttaaaatattttctcaacttggtcacataaacatccatactacgagccgtgaagtaatcgctagctccccaaatctcgttcaacgccttatcacgttgtaacaggccatcccgatgataatataataattccaataaacgagactcttttggggtcaacttgataacgtcatcaccttttgtaatcgtacgcaactccgtgttaaacaagtaagctcccaactctatcaacttaggtttcacttccgtttcctcgtgttcgcaacgactgagaatagctttaatcttaaaaatcaataactcggaatcaaacggcttaacaatataatcatctgccccaatctcgtaacccaatttcatgtcatccttcatacttttagcggtgatatacacgaaaggtactgtaacgtccagctcccggattttcttacctaaagtaaaaccatccatctcgggcatcatcacatccaatagacacaaatcgaacttttccttacgaaatgcttcaaagccatcgactccgttcgtgcagtgtatcacatcgtaatcggataactccaaataagatttcagaaccgacccgaaacaaggatcgtcttctaccaagagtattttatgtcccatatctatttatttatatatttactatttcaactctccattttaaagataatctctacctgagttcccttgttcttcttcgaggttaactggatctctccgccatgcaattccacgatcgatttggcatagctcaaccccaatccgaaccctttcacgttatgcacgttcccgctaggcactcgatagaaacgtttaaacaccttgtcctgcgcctccttcggaatcccgattcccgtgtcccgaactccaataataaaacggttcccctcctgtttcgtgtatatgtatatattcaacgaatcatgggaatatttgatggcattatcaatcaaattacagacaacattcagcatatgtacctcatctgcagatattacataaccttctgggtctagttcagctcgaataactcctcccttctcttcaacttgtagtctgaaatgctctacggcctcatccaccagcacgttcaaatttacaggaacttttttcaaatgtacttctcgccggtccaatttagcttgcaacaagatcctttccacgtatttattcatccgctcattctcgttgcgaatcatcgaattaaacttcaatatctgggttcggtcgttcaacaccttctctttctcaatagcagacgtagccagagaaatcgttgccaacggggtcttgaactcgtgtgtcatgttattgataaaatcattcttgatcacggacaatttctgctgccgcatgataatcacgatcgtaataatgaacacgctcatcaaaccaataatacaaaaacccgaagcgataaacatccatcccatattattatagaaaagagaatccttcgtgtcaaacatcacacacaggttagcatctttcgtggtctggtcattggggaacagttccacgtaatagaatccttttgttcccttttccttgatatattgtacgatttgctcccgagtcataatcttccacgtgaacgggttatcaattcccgtattgatcatttcctctttcaagtaaggattcaaatcaacgttctccaagcgtttctccacctgcgccatctgcgggtctttctccctcaaataacgaatcacaaactcccgtaccagatccatcattcgctgacgttccaacgaatcggccaatctttcggcctccgatgtcgcagaacgcatcacctgataaaggatattattatcccgatccgtttccaagatatagccgggtcccatccgtcctcctggattcatgaaaatcctcaacatgctagagatatttcctccctgcccttctccgactttacctttagaaaaggcaagcgaaaaaagagagatttcgttattacccgggtcttcatccgtcaatacagaatcctgagcgtgattcatcgtagaaataacttcctccacttgtgtgtagcgttctttcaaatcattaaaaagacggatattattggtttgctcaaccagattaacagctttccctaaaacatcgtacacctttgaggtgaaacgagcttctccttcccgcatactatatttcatccaaatccattgcacgctcaccaccgcaataaaagcgataagcataatgatagataatattctgattattatttttttaatcataagctgccatatacaatcagcgaaaatagcattttttatttcatcatgcaatgacttgaaaagaaaatatcatgaaaaagaggtacccgggtaaggtacctctaaaaaacaactaagtaataaaaacgggaaaattaaaaccactataatggttttatgctttattttagtttgctctctaacactttgtaaatgttactttctttattttcaactgtcattttattgaacagtttcttttgcaaatccaaactatctactaactggtctttaatcaaaaataaagaaatttctttacgcgggttagcaacaatcaaatctcttgtccaattagcttgtttcttcaagaaacgttgtttttgcaactggtgaatacccagcataacttcatcatccttggaaagtttttcttttttactgatcttttcaatacgcttgtcaatcttggcaatatcttcaccaaacctttccttgtacattttcttgatttccttgtattcgtccatcaagcctgaaccgtcagcttcaatttgatccgggaatttgattttacctttgatccagatcatatctttggtatctaaaatggcctcaacagtagccttcccatcaatatcaatccatactcttcccggaattttaaactgatctgttcttaaatctattttaccatctttcacctcttgttgagccaaaatcgtcaagcccggttctcccggcatctcggccaataattttacagttccgttcagtccttctacttctccccgtactttcacagtatcactatcgcatgcacagaacaaaagtgtggcaagtactaaaaataaactaaatcttttcatagtaaataagttttgtctcccattcatgtaaaacatgaatgcaaatttcatctgttattttatcaagctcctataaataaaccatacataacagcgagtaatattactccctgtaaacatggacaaatatacaaaaaaatttataaccccacacttcttaaaagtaatttagcagagcttgatggtttcggagcatcaacatcgacaattcgcccctccggatcaatcagcatatagcgaggcattacagtaaccatatagcgagaatagaaggcatacgtgttgtttacgacataatgttctccggggagattttttacttgtcccagccattgggaagatcccatgcaaaaagtagcgaaaagaatattcttatctttatactcttcaacaagttttttccattcagtctgaacctctttatctatctctccatagccagaagcccaaacagatatgtataggaatttacccctcaaatcttttaaatacaatgccttcccgttactatcctgtaaagaaatattcggagcggtagcccccggagacagcttacgccagcgatctaccagttgttttatcttcaccattttactggtgtcagacacttcattccaacatactgccaataaataatcggcatcctttaacccgttttcctgaaaataattataaacaacctcagataacaagtaatcccgaacctttacactattgacatttgaacggatataattaaccaagcgacgcatactgaaattttgtcccttgtaataaatataattcaaaacaaagcgttgatagcaatcaaaggctaacatctcctcgttgttaatgtcgaattcagacacgaaattatcatacaacatccccggtttatacagtgtatcaaaggccacatgactacgaggataatgtattgcctgctccgcaacgcgatacctgatgcgctcccgttcctgtttcgtgaattcttctcctaaattctttgcttccaacaaaacaatattagtattgatattctcccgcattctattcacaaaatccttctcgttcagtttatataaattaggatcataaatgaaatatcgattttgttgttccttcaaataaagattaattgcgctcaatgtacctttaaactgcaaggaattagacacattcctcacgttattcatactaatttctaaatcttctccaggtgttaaaaaaacttgaatcgaataaggaatgaaacgagcataggtacccttttccagttctatcttaccggaaaaataatgtttctcatctaggcggaacttatgaagactatcgtttacttgaaaataaacaacagtatcacctgtctcaacccggcccgacacttgcacgcttttattacgagtacaagcaacgaaaagaataataattattatacctacaaaactcctcatgcgtcaacacattaatttttagaatacaaagatatatattcagcaaaaaactatgtgttaaaaaaaaggtaaataaaaaaggcaaccacccggttgcctttttgcatatcttaacagataattattttgttattgcaatgaagtcattgttttcaaagaatttggcaaattccatatcggttgcagccaattgtttgaatgaaccatccaaagaacatgcttttctcaagttctcgattaccgcagttgcatcattggttctagcaccaataacagctttcaagtaataagacatcggacattctttgttttcagcattcaattttttcaaagcctcattattattcccagcaagcacgttagctaaagcagcattcacgcaattacattgaccgaaataatttacagcagcagcataatcaccgctcttgatagccacgattcctttgttatagttaacttcgtcaccagcaccggtagcagcaccaaaataaatttcagcttgtttcaaatcgccattcttcaaagctacagcacccaagttgttttgaacaaccggattgttagctgacattgagttagctttattgaaattagactgagctgcagcaatattacccatttcaaattgaaccatacctgcatcgttgaaacctctccagtcattcgggaattgtctcatgcaagtttcatagatagccaatttgtcattgttgttatcgaataaagtcgcagaataaagcaattcctcaacattcaattcagcaggacttgatttagctaaagctttcaattcatcatctgatttaccaatcaactcggtatttacaacaaacaaagatcttcttaatttcggaaggatttgatcagcaacaaccgcaaaagcagaagcgatatttctgatttctctctctcttacttcaggatcagaatgcatagacaatacgcgaagaatcaattctttatcttggatatttgattcttccatagctttcttgaatccatcccagtcttcagctacaacgaaattcttgaagaaattctcgtctttatattgctcaactttacctttcttcatttgctttttcaagaaagtagaagaactcttttcacgttggttagctaatttctcgttgaagtcataagcaccatcaggagaagcgtatgatctaacatcaattccgttcaagttcatattttcttttgcagcagcttctttgatataagcctctaactttttcatttcctcagaagtcatttctttagaacgaatgtttgcagagttaatcaaataatagatagcagcctcttcttgttgtttgataatccgttggaatttatcctctccgactgaagttgcaggagcgttcactaccaaagtttcagtagcaatcacaccatcaccaatttttctcggatcgaatttcacagttttggcgccttttgccccggtaatatcgatttccaaatcagaaagtctcattgcatcctcgtaaggaatacggctcatgtaagaaacagtcttaccagcttcgtaaggaatcacttctgcattaccctgaactttctctccttggatagctttcatttcataagctttctctcctcccttgaaacgcaatacaggggtagcctcaatagccacttttttgttaaaatatttagccgggaaagttacgtctatcttcaaatcaaccattcctcctttagccactaatgtctccggagtaacagaatacgtgatttctcctgcacgtttcttcattttattcaatgaagaacaggagacagttattaacccagataaggcaacaacggcaacaaaacctaatgtttttttcatactcgtcttaatttttattgtaatactcaaattagttcacttcctttttcacaaaacaaatgtataaatttttattaatatataaaaggctacacaaattttgtaccaaaaactaatgaattttatccaaaatcagtttctccgctctttccagagctttactaaccccctcaggatttgatcctccggcagttgcgaaaaatggttgtccaccgccaccacctttaatttcttgagcagcatctttgacgatctgcccggcatgcaatccgaagtctttcaccagagtatcgctgaacatcactgtcaaatgaggcttattgttaaagacaccaccaatcaccaaaataaggttattcaactccccttttagttgaaaagcaatatctttcacgtttgccggggacatcacaaccgtcttcacgatcatgttaatatcacgaattacacgcttttcgttcttccacccttctttcatgatccgtaaactctcctgcgtgaatttctctacatctttccttaacccctcgttttcgttcaacagttctctaacattctctaatacacctcggttagacttaaacatactatcaatttccttcaacatcttgaaataattcaagatatattcttccgccttcgctgccgtaatggcttctatacgacggaccccggcagaaacggaactctctgaaataatcttgaagaacccgatttgccccgtggcatgggcatgcgtacctccacacaattccacagattccccaaatttcaccacacgaaccaaatccccatacttctccccgaagatggccatcgcgcccattttcttggcttgtccgataggtatagcccgactttcttccaacgggtaattcttacgaatttcttggttcactatagctgcaactttctccaactcttcgtcggtcaccttttggaaatgggaaaagtcaaaacgcaaatactcgtcactcacgtatgatcctttctgctccacgtgcgttcccaatactttccgcaaagcataatgcaacaagtgagtcgacgtgtgattattttccgtggcaacccgcttgtccaaatccacctttgccgtgaacacctgagtcaaatcctccggcaaacggtctgttatatgaacagttaatccgttttctttatgagtatctaaaacattaattttttcagtttctgaaatcaaccagccgcgatcaccgacctgtcctccactctccccgtagaatggagttatattaaacaccagttgataaagcgttttccctttcgtactcacccggcgatagcgggtaatctgcacttctgtttcagtgtaatcataccccacaaactcctgtgtatcatcggcaatcaattccacccaatcatccgtattcacggcagcagcagaacgggaacgttctttctgagcttccatctcggccttgaactcccgacgatttaccaccaatccgttttctttcaaaattaactcggtcaaatccaacgggaaaccataagtatcatacaactcaaaagccacattccccggtacagtcaagaaatcttccgccttggttttctcaataatcttatccaataattttatacctttatccaatgtacgcaagaaggcattttcctcttcttgtattacccgctcaatcaatacccgctgggaagagagttccggatagtgttgccccataacctcaattaacaccggcaccaacttatacatgaatgcatccttctgatccaagaatgtataagcataacgaactgctcgacgcaaaattctccggatcacgtaaccggctttcacgttcgaaggcaattgcccgtctgtaattgaaaatgcgatcgtacgcaagtgatccgcaatcacccgcattgcgacatctgcagccgcatccttcccgtattcttttccacttaatcgggcaatctccccgatgatcggagtaaatacatctgtgtcataattggacgtctttccctgtacggccatacacaaacgctcgaatcccatccccgtgtccacgtgatgactgggcaaattctccaaactaccatcagccttacggttatactgcataaacaccagattccagatctcgatcactaacgggttatccttattcaccagttcacgccccggtttcaatactcgttctgcttccgggcgcaagtctatgtgaatctccgaacaaggtccgcaaggtcccatatctcccatttcccagaaattatcttttttattcccgtacagaatccgatcttcaggcaagtacaatttccaatactccaacgcctctttatcttcttctaaatgatcatccttacttccctcaaaaacggttgcatacaatcgatttttatccaaacccatctctcccgtaaggaactcccaagcgtaagcaatcgcctctttcttgaaataatcaccgaacgaccagttacccaacatctcgaacatcgtgtgatgataggtatcatgtcccacctcctccaaatcattgtgctttccggaaacacgcaaacatttctgggaatccgccacccgggttgctttcggacgcacatttcctagaattatatctttaaattgattcattccggcattcgtgaacatcaaggtcgggtctcccttgatcaccatcggtgccgatggtactattgtatgtgatttcttctcaaaaaaatctaaaaatctctgtctgatttctgctgacttcataccttctaaatttaaaaatgacatacacagatcctgtctttcactctctatcaactccatgcttattgccctaatcctcgctcgaaaagaaattcagatccctttttgacatccttcctaccaagcgcatttcaaccgggattatcatgctatcactttgatctgccttgtttaccaagttgcaaatttagattatttctttaactttgcatcgcaaacactattttttattagcaactatgcgaaaagctgggtatcattttaattcggacacattatcttttgataaaatagaatcatctttaagaaaaaggctttggagattattcaagaaattcttttctagtttctccttggctattgtcatgctatacttggtatatgccttcattgattccccgaaagaaaaacttttaaaacggaaatacgaggaagttctcactcaatatagtttattaagtaacaaggtagaacatctagataacgtcttaaaagacatggaatcacgggatgataacatttatcgggtgatcttcgaaaccgacccaatcccatcatccattcgccgggcaggttccgggggagtcgaccagtacgaacatctgagacaaatcgacaacgcagatctgataatcgggacagccaagaaaatagatgaattatcaaaagcaatctatatccaaagtaaatcctttgacaaaattgaagaactagccaaaaacaaaatcgatatgttagcctccattccggctatccttccggtatcgttgaaagacaaaaatacacatcaggtaacatcttcattcggctaccggatgcatcctatctacaaaaccccgaaattccatgcaggcatggatttcacgggtaccatcgggactccaatctatgcaacgggcaatggggtagttatcgaaagtaagtttgacaagggatatggccgtcacgtggttatcgaccacggattcagttataaaacgctgtatgcccacatggataaaatcttggctaaaaaaggccaaaaaatcaaacgaggggacgttatcggatatttaggaaatactggactatccacgggacctcacctacattatgaagtacggaaaaatgacaagccgatagatcccataaacttttatttcaacgatctcacccccgacgagttcgagttattggttgagacggcaaataacacgggacaaagtatggactgatccaattttagattttaaattttagatttagagattctaaatgaatgtttaacaccgaaaaaacgaaatttgaaatgctcattttcaattttcaattttcaattttcaattaaatcatggtggctgaagaatcattaaaattgtattattctatcggagaagtagccgatatgttcggtgtcaacacttccctgatccgattctgggaaaaagaattcgatgtgattaaaccccacaagaacaaaaaggggaatcgtcaattcacgaaagcggatgtcgataatttccatttgatctatcacttggtcaaggaaaaaggaatgacactaaaaggagcccaacaacaactcaagaaccgaaaagacgaaacagaattacactttgaggtaataaaacgtttgaaaggtatcaaagaagagttgttatccattaagagccaacttccctgataatctaagttttagattctaaattctctatatgtatataaaagagattatttcgctcatagaagactatgccccgttaaaatttcaggcaagtttcgataattccggattactttgcgggaacccggaacgagaattaacatccatactactatgtattgatgtcaccgaagaggttataaaggaagcgattgataagggacacaatttaattatttctcaccatccactcattttcagcgggctaaaacatattactccggcaacttacgtggagcgctgcgtgatcgatgccatcagacacgacatcactatttacgccgcacacacgaacatggacgtggtatccaacggtgtaagcggacgtatggcagataaactcgacctgtaccatcggcagattcttcaaccggaaggcgacccgatgactggtaacggattcgggattatcggtgaattacaacaccccgttgaaagtatggcctttttacaacaaataaaagaaatattccggtgtgatcggttacgttacactacacctcatatactctccatacaacgggttgccgtttgtggtggagccggagcctccttcttcaagcaggccctagccggacaggccgacatatacatctccggggatttcaaatatcacgactttttcctcacggaaaaccgtattatgattgccgatattggccattacgaaagcgaacaattcacaaaagagatattttatgagatacttacaaaaaaaatatctaaatttgcggttcagttttctgagattaatacaaatccgattaagtatttataatatatggtgacgaataacaatgagaaaatgcaagagctgacagttgaagaaaaactgcagaacctgtatgaattacaaagaattgacaccgagatcgataaaatcaagactctacggggagaattaccgttagaagttcaagaccttgaagacgagatcgcgggattggaaacacgtatcgaaaacttgaaggttgaattaggtgaacttgacaaaacctcttccactcggaaaatggatatcaagaaagccgaagaagcgatcaaaaaatacagtgaacaattggataatgttcgcaacaatcgcgaatacgatgctttaagcaaggaaatcgaattccagaaactggaaattgaattacaagaaaagagaatccgggaagcacaaaaagctaaagcagaaaaagaagcgctgatggaagaatccaaaaagcgttacgaagacaaagtatctgacttggaggctaaaaaaggtgaattgaacgacattatcaatgaaactcacaaggatgaagagtctctgcaaaccaaatcggaagaacttgcagcaaccatcgatgaacgtctattgaccgcatatcgccgtatccgctccaacgcccgcaatggattagccgttgttaccgtggaccgtgatgcgtgtggtggatgtttcaacaagatcccgccacagagacagttagacatccgttctcggaagaaaatcatcgtctgcgagtactgtggtcgtattctcatcgataaatacatctgtgactacgacggttcgcaacaaaaagcagaccttgaagctctcctggatgcacaaaagaaaaaaggaagaagacttagaaaatcagaagaataaaaaaacaaggctgctcgacaaggcagcctttttacgaatatataattttaatctgaattaaaatgatcccaacaaactacgatccgcgaacgagcgaagagaaatggtatcaatattggttggaacacagatttttccactccactgttgataaaaagagaactccgtattgtattgtaatcccgccacctaacgtcacgggagtcctgcacatgggacacatgctaaacaacacgatacaggacgtactcgtcagacgcgcccgtttacttggtaaaaacgcttgttgggttccgggaaccgaccacgcctccattgccacggaagctaaagttgtggccaaacttaaaagtgaaggtatcgagaaaagggacctttcccgggatgaatttttaaaacacgcttgggcatggactgaaaagcacgggggaatcatcctcgaacagttgaaacgactgggtgcatcctgtgactgggacagaacctgtttcacgatggacgaaattcgttctgccagcgtgataaaggtatttatcgacctgtataacaaaggacttatctataaaggagtccggatggttaactgggacccatcggccaaaacagccgtatccgatgaagaggttgtttacaaagaagagcatagcaagttatattacttacgttaccgcattgacggaacagaagacgagtatatcactattgccacgacccgcccggaaaccattttgggtgatagtgccgtgtgcgtgaatcccaacgacgagcgattccgccatctggccgggaaaaaatgtatcgtacccttggtaaaccgggtgattccgattatccaagacgaatacgtggatatggaatttggtaccggagcattaaaaatcaccccggcacacgacatcaatgactacgagatcggttataaacaccatctcgaaaccatcgatattttcaacgatgacggtacattaaacgaaaacgcccagcttttcgtgggtaaagatcggtttgttgtgcgtcaagaaatcatccccgaattggaaaaagcgggtaacctggtaaaaatagaagactacaataacaaggtaggatattccgaacggaccaacgtggttatcgaacccaagctatccatgcagtggttcctaaaaatgaaggaacttgctaaacccgctttggatgctgtcatgaacgatgacattctcttgaccccagcgaaatacaaaaacacctatcgctattggatggaaaacgtaaaggattggtgtatcagccgccagttatggtggggacaccagattccggtttattaccttcctgacagcaatgattacgtggtagccgagaatatcacggaagccgtacgattggtaaaggaaaaattcggcaaagacattccggctgagcaattacgccaagatgaagattgtctggacacgtggttctcatcttggttatggcccatctctgtattcaacgggatactagaaccggacaatgaagatattaactattattacccgacaaatgacctggtatccggaccggacatcctgttcttctggatggcaagaatgatcatggccggttatgaatatcgccacgagaaaccgttctctaatttgtacctcacgggaatcgttcgagataagcttcatcgtaagatgtccaaatccctcggtaactctccggacccgattgatctgatcaaccaatacggggcagacggagtacgagttggtatgttattgtgcgctcccgcaggaggagaccttctctttgacgaaagtcttccggaacaaggacgtaatttcacaactaagatatggaatgcattccgcctggtcagcaactggaaagtcactgatctagaacaaccattgcattctaaattagctcttgaatggtttgaacaatacttgaacaagtgcaaagaaaccttgaacacccaattcgagcaataccgaatctccgaggctcttatgaccgtgtacaccggattccgcgacgagttctcctcttggttactggaaatcatcaaaccaggattcgaacaaccgattgaccgaaccacttatgataaaaccatttacctcttcgaggaaatgctacaattgcttcacccgttcatgccgttcatcacggaagagatctggcagaacttgagagagcggaaagacggagaaagtatcatggtttccgtaatgccaagccccggaaaatacgatgacaacttcttgaatacctttgagaatatgaaagaagtgatcgctggaatccgtacgattcgcaagcaaaataacattgccttcaaggatacaatctctttgagggttaaaagtaacgatcgctacccgctacaattcgaaaacatcattcgcaaaatgggtaatatccaagatgtagaaatggtgaatgacacggtgaaaggtgcatggagttttatttgcgacacggtggaatatttcattcccgctgtcggagaagtcaacacggaagaagtaagagccaaactgcaagcagatttagcatatgcccaaggcttcctggcatccgtgatgaaaaaactttccaacgagaagtttgtcaatggcgccccggcacaagttgtcgagaacgaacgcaagaaacaagctgatgccgaagcaaaaatcaaagccatagaacaacaactggcagagttaaaataaatcaactcaaaacaaacacgaaaatctccggcaaattaccattgaccggagattttttataccctttaccctcccccactctccccgaaaaagaaatccccatttaaacaagacgttttttattcacccactgatcagtcctgatcgggaaactagtataaaaacaagaaatctctacaacaaagaataacgtattttcttttagttttctctcaatactggacactttccccgatgtttatcggataattccacctgtaatccaactcgtcagtttctttggattcttttcgagctatcaactgaattatcttataccattttgtcaatcgattcattttactcctaataataacagactttttaaagagcgtgaataatatcataaaaaaatatacatttgtatatgcaaaaaaacatcccatttatgatcacgcacctccaaacaaatacatggataaaattactattcatcatctgcctgtatctgactatttcttgtaattccaaccggaagaatacagaaaaacaaaccggcatcccatcccccaaaaacctcacggcatatttcgattccttacaacaccacgggttctatattccctaccactccgattcaaccgaccgagagaaagttatgcataccgttagtcttctacaagagttccaaacaagaaaacgcaaattctacccggcgaaagaagtgcaagccgcacttgaactcatgcgtaacgaactgggatatataaacagccaccggggcgatgacttgacagcagaagacaacggattctttttccgttttctcgaacaggccgcccgtctgtgcccggatttgcatctgctggcagatgtaacctccgcggatcacaaggtcggggttattaattttcaagagtggtcgatcaacccgctatattcatttctcctttacgaaaacggtaaaggcggttggaatgtcactcccatagacacggttggaaatgtgaaaatcgaaaaaatattcaaattagacaagaacggtcagacttattaccttctttcaaacaatttcctccccatcacgttcacccagttcatcttcatgactgaaaacgggattacctctttattccaaggcaagcaatacgaagaagccctaaaagcatggtacgaaaaccgtccggaggactatatcatcacgtttaatccccaaaaagtatgctggaacttctgtcacgaagtcggagaatattaccaacccatcgaaaacaccaaaaccctttatttggaactcaacaaagaacagtcctatttttacgttgaataaaccatagtcttaaattgctattttcctctaattctattcatgttatttttttaaataactagaaaatgatatcaatatcggcataaaaaatactaaagctattattgaaaatagtagtcccccgatcgttccaatggcgaatgaaaaccaaaactcttctgctttcggcccatcaatcaaaaatgggaccaagccaagtaccgttgatataatggttaatagcacggcaataatcttatggttataagccttcacgtaaagtcgaaccgggttaatccgatttagccgtccaagatttctatttacgaaaccattatattcattaatcacgtaaattgccgcattcaccaccaaaccgctcaacaaaacaagtgatgcaaaaccacccgttccaaaatttacccttgagaaataaaatgtcaggaaagtacctataaacgagataggaatcaacgagataatcacaagaggctgccgcagagactcaaacagtatcgagcaggtaaaaaagattatcacaacaatcaacagaattaaccaatattgggaacctctatcatcgtaccacccgaaactctggttaaccgtccggaaaccgacaggcaaaatagcattaatctcttcggttgtctttttgataaacttatccgacaaatcatacgatcccataaaattaaaagccacctgcaacgaatactcctggttatttttcgtaattcgtgcagcaacattgcgttttcctatctctccgatattagcataacaaatctgccgatctcctgcagttaaataactgttcatcaaatgccacacgtcaaacttatcacgttccgaggaatgataatcaattgcaatccgttgatctttatcccgatacgttccaacagttccctcatccatcagtgcggccaaagttgaataacattgtcccaaattcaaacgattaagagcaattttttccatatcatatttgatatacatctccgaagtcggttctccttgcgattgccaataatcagaacttcccaactcgattcccacgtcattcactcgtttattggccttgaccttctcggccaccatttccgcatacttatacaaacgatcataattatacccgctcaaaccgattcgatgtgatctacgtcccaatcccagcgaattggaaaatccccgttcactaacacccgttgtactccaatctacaccgccaatcaacaaagcctctcgaataacctgtgattccagatattgagggaaagtcccatccttgtgttcatcggtaaattcaacctcgatggaaccacttttaccatccacttgggtcacaaaacgttttatctccttgaatttggctaaaaaacgatccatttgccacatcttttgattaagcacccctgcgtcatctccttctgtcaattgagcagaaatataaagttttacctcccgttcccgttgagaaaaagtacgtgatgactggatagatgaaaaaagccgtaatgtcccgccaaacaccttttccaatggctggcgtaaagttccctgacaaaaattactccctatagtcttattataaagatcttcataccatgccatctcttgtttttcttccatccggtaataataatcacttttacctaatttagaaggcagcaaatgcaccgggattccaaatgcaagtacgaaaatggtaatatatatccatttccgtttctgtgtaaaagtaatatagcgggtataaaaccgactccagctcacgattctttttaaacgcttacaacttttcttcatctgccgacaacacaactcactatgatcaataattgcaggcacgaaaaaaagagccacaaacaatgccacaaccagattaataataataatcgtggaaaaatgattcaacgcacctttcacgtaatcgggcataaaaaagacgatcaccaatgaaccgattgtagtaagcaatgccgccagaatagcgataaaagcactccgattgtggtaatagctataatgatcaaccatcacaataacagtatcgatcataatacccaacgagacagcaacacccgccaacgaaatcaagttaagctcaacatcaaacaagtaataaaaaataacggctatcaacacgttggcaaataatgaaatcgctataacagaaagataacgtctgctccggctaataatccaaacaaacaggaacaatatcgccaaacataaaaaagtacgtttaaccaatttcacaagttcctcccgtacctccttagcagcatcattcgtgagtgtcacgtaaaatccatccgtcaaatttgcttgaatcttttccattcgctctcgaatttccgcagatgctttaataatatttgtctccgtgtctgcaaaaatgctcaagtaaatcgtattcaaaccattgatacgataaaagctggtttcttgtcgctttttgtaatcaaatttagcaacatcattcaaatagataattttaccatctattgttgccaaaggagttttacctatatccggccccaaccgctcggtctctaataataaagtaatacgctctttattcccgtcacgatcaattcgatcaacatccccgacaatagaacgttgtcccaaaaagttctgaagtcccgacacgataacattagattcaagaccataccgctgcaattctatcgggttatactcaatatccaggtaaagtggcatagcccccccgaccgacacatcccgcacataatcaatctgtgtgagataaggtttaatattacgctcgacatagtcttttatattagcgggatccatatcggcattgatgatataagataagacctgtcgtgtgttctgtcgaagccctcccccgatattccctccttgtaaataaagaccacccgcaccctccggtaatttctcggcaatctgtttcagcaaggatgatatttcaaaacgcacggccgatacgttagctttctccttgagtacgacagtcacacttccgtttccttgtgatgacacggaagaagttttctccacgcccaccaccgaggcaaccaatccttccactttagaagtgatttcctgctctatgacccgttgtgatgccccgggccaactaaacgagatagtcagccttttcccctgttccggggatggatggtaagagattcgtaacagaggtatcaaagcacctcccaccaccatcaacacagccattatcaaaataagtgaaaaggcgggaatacgttctaaaaatccctttttctttatatcattactcataaaatcagtgtttacggtagatcacgtaataaattaacggtataaaaaacaaactgacaatcgtcccgacactcataccgataataatagaaagagataacgggtactgcaaatctgatcccatatcaacccggttcaagaacggggcaatagccaatatcgttgtcagagaggtcataataatcggttttaaccgactgtgcccaccagtaaaaacagcctttaataacggcataccatgtttacgaaggcgattaatcgcatccactttcagaatagaatcattgataataatgccactcatcacgaccaaacctatcatcgacatgatattcaaactctcgccaaatatccaaagcccaaacaaaacgaagaaaatatcaaccacaatttctgatagaataataagcggctgtatgatactttcaaactgggccgcgagaataaaatagagtaacgaaatagcaaccaacaggataacgatcaactcccgaatagtctcccgactcgaaaaatactctcccgtaaaggtcacgaaaaagtccttatcctccttaacgacctcttctaccgtctccatcacccgtttcacatcagcatcgtccacatctataacaaccggataataatcccccccactaccggaataaagtttcttaaaatcctcgcctttggtctcgttgattaccattgagagaggaatttcaaccccgttacggttacgcaccttacccgacaaaatatccgatgcttcggcccgcgtatcacccgtggtcacgggaacggaataccccccttgattaatacgaaacaaggtattctggctaatcatatttctcattttcgcataaacattaccgaacgtaacctcatggattgccattgcctccacatcagcaatataacgaatattctgttccatcatcgccggagggatcaacacgtccggcagggctttttctatcttgttgaccacacgagttacctgctctaccgtcggagcctgtccttccttactatgcaatcttgcaacaagcgtgcttcctttttccgcaaatatcatattaaaaatattgccggaaacttgaaaagaaacttgtgctttcgggtaattcgagaccacgtaatccgaaattttccgttctatccgtttcaagctctcgacatctttagccttaatatagatcacgctttcagaaggagtgatctctttggtatgtgacatcaaaaactgttgaacacccaccatcgaggttgtttgcaaaataaaactatctacttgtgccaacagtctataaacacgcagatcattttcttccaaagaaataccgctattccaatcaattgtcaaaatcgtatcgtcatgcgatatacgaggcaagcgactcttctccaccatttgataaacgaaataagcaagaggaacaagtagtacaaacccgataatcagcaaccgaccatgacgtaacgtccattttaacccgatctcgtacggacgatagtagtcaaacgtgaagaatctcgcaataaaccgattctccgtccatgccgaacgtttgcgatacatcagataaaaatacacgggcagaacaagcaccgacaccaataatgacgcaaacaaagcaaccgtcacggccattgcctgatcatagaaaagtgcgccagccgtgccacttaaaaagatcagcggcaaaaaaacggaacaagtagtcagcacactactcaacatcggggtaaaaacctcccccaccgcactggaaatagcatcatcaagccgcaatcctaatcgccacttctgaaatatattatctataacaataatcgagttatcaaccatcattcccgtcccgagaatcaaccccgatagcgatataatattcagagatattcccaaaacatgaaaagccaaaagcgtgaccacaagtgacaacggaatggttataacaatcagtaccggagatcgcaaatccttcataaataaaaagataattaatgccgccagaatagcaccgaccaatagattactactcaaattatccatggaatacgataacaatttggtctgatcccgtgtcaactcaaaacgaatgttaggatattccctctccaaatcagccatcagcgtggcaatactttcctgcaaatcagccatcttggcatcgttctgttttataattgccaacgtaacagccggatcatcaccactacgtaccaaaccgctccgtttcgccggacgctccacgatttcacacaactctttgaattgataaatgcgcccgttatgattgatatatatattctcaatatcttctttcgagataatccgggaatcaaagtgaatactgtaacgatattctccatctttaatacttaatgctcctaaggatacattattattgttaatcgcgttttcaagcaaattaatacccacgcccatagaagtcaacttcgtgtaatcaggaatacaaagtagctcgggggttacaacaccactcatatcgaccatcgccgtctgtggtagttgttcgatacgttttgaaataacatcccgggcaaattgccccagttcactgaaatcaatcccggcctcacgcagcctgtcatgctctttgggcgccacgttttttaacgacaggttaagataaaaagccgggatatcggtcacactggccttgatcaccttgggacgttctatatctttgggtaatgtcgcaacagctcgatccaacttctcgttcacgtcaataaaaatgatgtcaacattactgttcggctcaaaatccatatatatagctcccgcatccgctcgcgcttctgccgttatatttttcaatccggtcacctgagacaactgatttttcaacggtttcaaaagcgtgttatccacctcccgaaccgacaaaccgggagccgacacctggattgtgatctgcgggatatcaatagcgggcataagcgacacgggcaggtaccccatcgccacgatactcaacaccacgatcgcaacaacgctcatggtaaccccaataggacgctttaacaattcctttatcatgattaccgtctattattaggtgtcacatccgttccgtcggcaagattcaaattattggatgtaataacaacatcctcttccgaaataaccgtctgtttcttttcactccctttaatcacgtgggaatcaatattcgacatcacgacatcaacatacgtccaaaccgctttcccctcacggtaacagaacatcacctgaaaaccatcccgcagaaccaccgcatccttgggcaccacaaaactattcttaatctctcgctcaagtataatcttcacgttcatcccttccatcaagtagcggtcagcattacgcacccttgcacgaatcttcacctgtccgtgttcatcaatcaagggatttatctctgtcacatctccataaaacgtcttttcatcattaataaacgggataatcttcacatgttgccctttcgtcacctcttcgatctccgcctccaatatactgaactcgacatcaaaatacgaatcgtcaattaacgtacataacttattggcggaacgatcatatatcttggcatccagattggcaatacgcccactgaaaggagcaatcaaataacaacttgccaaacgacgtttcgctgcctccaactgatcaatcgcgttatcataaccggacgaaatcttcacattccgcaggatagccgtcggaatccctgtcgtgtctgccgaatatccctgcccgattaacttgtcctgtaaatctatattcgccttttccatcgcccggtaacttttttccaattcaacttgagcctctttcatatcaagagttgccagtacctctccttttttcacgtatcccccgttacttccgttgatcgcggtaatcacgcccgtaccgtcaaaactgagatcgcttttaaaaaccgcacgcaacttaccgttacacacgatctgtttctggaaagtccgttttttcaacactagcgtgtcaaccgtgattaacggactctggctttcacttttaccgatttctttctcgtctttctttttttcgttaccgcaagcgatcgcccccagcacgatcacgctcaacaacaggcttctatacaggttcattttcattatcattagtattttcacgagtgactatttctctactattttatcaaattcagcactgatatctcttttggatataaaatcgtacagggacaacttgcgcaattcgaaataagcgttccagaacgtacgcagttgattgatatactgctcgctggcactatccagttccttttgggccgtgttcaggtccgttaccgtgatccccccgttctggaaacgttttttggtgatatcgtaacgctcctccgcaacctgtaaggctttggctgatatattacactgccgggcttgattattgaattgcatcaccttgatccggatatcctgctggaacttcgtctcctcttgttccagttccgtccgggccaggcgagcctccgcttcagccatcttgacacgcccgcggctcatcccccagtcgtaaataggcatggacaaggataacccgactacctcccgatctttcaagcgactgtacactccttgcaggtcatccccggtttgtgagaatcccaggttagccctcaattccacctggatcccccggtctgctttggcctgagccacgcttttccgcgagttcaattcttttattttaagcgacacgttgtgagaagagttttgcaacgccttgtttaacacgaaatcgtattccatgaacacttccggcacgttcatcggcggttgcaactcgaagaacgtgctttccgccactcccaagtatgatttaaaattaaaaagcgccacctccaaatccaccttgctgttacttaccgttaactccgcattcatcatggacaattccagctgcaataactcgcttttagtcaccgtgccaatgtcatgccgttgttgagcgatcttgtacatgccgcgggtatctctcaagttctcctcgcttttcctgtaacttgtctgggccgacaaaaccgagaagaaataagaggtcgtttgaagcgttataccctccagcgattccaggtactgtttcttggccttctcgtactgcaagggctccgttttcttctgccatttcagcgtgttgaaagaacgtagcggttgcgtgtaattgatcgtgaccgggttcgagttataagttttcgtgtcgtaagagaactggtccaggcgggcaagcgaggtgttaagagacacgtttccccccgtgagcgcaattttctggttgatgtaaacggacaagtcattactcaaggtgttgttcgccacgtaactgatgcgcccggtttccgggtctctcacgtcaaccagcgaacggttataattacccaggttcccgcttaaattaagcgagggcaacaactgagccttgtaggaacgaaaactccagtattgcgacatgaaactgagttgcaccatctgggcctgcggggaacgggcatgagcgatcttgatcgcctcctccagggttagcttacccgtgaccgggttctgtcccacgccaaaactgcaaactagccatcccacgaataatagtaatagtctttttttcattcgatatatttgttattgtattatcattttaaagtttcacatccagcatttttctaatttcaaacttcatctcgtccacggcaagagaaggcaccttgggacgttttcccagcaaaatacggccataataattcatcatcgtcgtgtcaccccgttcggcttccagcttggtcaacaagtagagcgggtaaacacgattcggacacgtgtaataagctcgcagataagccgtcattccttggtcatattgttttaacgccaggtaattattacccgctatattccagaacatgggatcagcactatgtctgatacctcgcttcagcataatattactctcctcgtatcgtcccaccttatgaagtgaatgaccatattcaaataaaaatttaaaatcattcttcaagactggataaagtttcccgtactcctcgacaacgctttgataatcctcccacgtgtaataaacagcgttatttttccacttccggtacgcctctcggcgaccaaactctcgaaagtcaaaaaacaagaccacgatacccattattccgaacatcaaaacattcacgtaacgccctccccttacccgccgatccggtaactgtgccacggcaaaaagaaagacgatcgcgatagacgggatataaaaggtgtacgagaaaaatgacgcaacaagcaatgccaccgccacgcaactataagccgtcagtctttgtaacttaaaaaacagaaccattgccgttaacacaccccctactgcccccaacaacaaaaacaatgcaagtggttcattaaatgcagactccacaactcctgccatttctacatgacgattgtcctgttccaacaccttctctttttcaaaataatcatgttgagcctctgcaaaagccctctcgaaaccatcaatcccaaccccgaataaaggagttttccaataagcagacaccgtattctgccaaataaaaagccgtccgttggccgaatctttctttaacaggtaaaataacgtcaagaccacgatcatccccacgataccgccaccaatcacccaccgtcgcctcgtattaccccacgctacaatctctctgcgataaagtaacatcacccctaccaatgccccgatccacccggcacggctcatcgtcggaaccagagctaccaaggtgacaccaaatgtcacgcaagccgtcacgtaacgcacaaacatcaagttaatacccaccttccggtatccctttttcatcatcgcgacagcaagcacgaacactcctgccaaaaagatcccgcaaggcccgggattaaaaaatgacccggtcacgacaaaacggaggtgatttgaaataccatatcccagtagttgtcctaacaccaagcaagactggtaaatcccgccaaacatcacggcaaacgagacataattagccagccgcatggctcttatcacccgaaatacgacataaagaccaaaataagaaatacttaaatagaactctctactctgcatcgcatgagtcaagcttgcatgaatcaacaagtaaacaaacaacacgaacaccattgcatctccccggtaaagcgctttaggagcttttaccaaacacacgatcgccaccattgcccctaacaacaaagcaaagtagtttgagatgtcgatccccccgtaaaggccatccgtcacttgaaactgactcagtaaaagcatacatccacccaaaaatacaatggctctcatcatcattaatcattctttaacaaatcatccacacttatggttgtcaaacacgttttatccccatcttggttcaccagcaaaaccttatcatcaaaagcatacacatcaacaacagaatccgaaggggaagaatcaaacataaatgatgctgttttaccatttgatttgtcataaacccccaaacacttttttttcttccataaaaatctaaaacagaaatatttatccgattcgtaaatattcgatactaatatggcataatcctcctcactactattaatgaaatcgatacaatcatattcgtctctccaactcaaatcaaaaggcatattattctcaccaaaatcgatatagtattttaccgacacattttgcttatcatcaatggcataaatattattatagaaatatctgtaatatagtatttcactaggacgatacatgaaaaaagggtaaccgatataaatcccggattttatctttaaatccccgatttcttttacaaattcaaaatttttatcatacaaattcaactcacaatcttccatgccaccatacgcacgtttccccacgtaattaccctcaacagtttttattaaaacttggaatggattgtcttctcccttattcgtgacaaaggttacatcagaattttttccatttaaatcgcatcgaaaaacttttttatcctttacattatacatacaaatagtcttcccctcgacccaagtatcccaaagatggagaaatgttctattttctccccattgtcctgaaaaagacatcttctgagtaccggtttgcacatcaaaccccaaaaccttatttttacactgaacaatatattgatctccagcaagcaaaacttttttcacctcatcaatcaataccgacgttccatcattcgttaagcaaatttgtctggcatactctccatgcatatctatttgatgcatctttttcaaatccattcgaatgatcgtttcacgacttacttcagattgtttacagtcaagaatacagctcaaaattgcgcacacgattaaatatttactcatacgattctctttatttcatttatttactttcttcaataacctatcccaacgaaactcaccgctttcacgatcacgggagtaagtgatgtgagtaaccaccccgacaataaactcttcaggaacgaaaccccagtaacgggaatcgttcgaattcaacacctgatctccgcaaaagaagtagtaattaccttgaaacgtataactgtctatcggtttccctcccaatgtcagctggcgttgagcgttaaccctaagtttttcacccgtctcgtattcaatcaccaaccgatagagttgaaaattaacggtatcaagtatcacctgtccccccttccgaggcacgtagagaggtccgaactccttgattgtccaactgtaatgccggaaatcaaacggaaacgcatgtataaccgtattagcgatcaacgagtctggtgtttccgacaggcggcgttgctcctcttcgacaccaaaaattccattataattattattcttaaaatacccgtttcgaatctcgaccgtatcccccggcagaccgatacaccgtttaccgtaaacgtaattgatcttaaactcgatcctgtacttactccggttgatcgggaaattaaaaatcacgatatcattgtgttccaccttacgcaaccccttcattcgatggcactccaacggatctccgtctttaaagtcaagcctgtcataaatccgggctccggcaatcaacttattcacaatcacgtaatcccccggtatcaaggtgggacgcatcgaatccgtcggaattgcgaactgatccaccacgtaaacacgcatcgcgataataattccgatcaccaccccgattccaataaaggtgtacatcacccgtaagataatatcccagaaatccaacctttttttcattcctccatctttttgcgtccataaaataacaacacgcccatcaccaacaacaccccgaagaacgcccctctcttccatcgttccccgcttaattcttccccgtatcctccatcaaaacgataaggcgtgtataacaaattccatttccccacaatacgcccattcgcaaaagcaactaccccggcagccgtccgtaaaatcgatttcagcatcacgttatccataaaataaaccgggacatcgctacaaccgggtatcgcaataccaccttgagaggttgctacaaacaaattgatttttcccttttcatattcctcatgtaaagcggctaacttaccactcttctccggtgttatcttttcctttaacccgatcatgtaagtaggctttccccctacaaacacagtttccgagacatcattaaaaccggaatcataaagacgaaccacgttttttgcctcaatcttcgtacctacattatagggtaaaaaatcaaaaggcggcaaataaaaataagaataaagcggcacgaagaacgccatcaccagcaccccgatagttaacccgatctgccgataattaaaattgtttttagcctgcctgaaaacattccacgaatgaatcccggccacaacaagcaaaagaatattcttcgcgaaagtagccccattggaaagatggatagcctccccgaaacagccgcattcattgatcccgccgtatgggtcgatataaatcaagtaagtcaggatcgtgaatccaagaataaaaagagtcaccgttaccgccgtaaccctacgccataatcgcagcaataacaacatccccaaggtcatctcggcaacacagagtaacaccgaaaaagacactgaaaactccctccaactcgaaagctgaaacatccccaagtattcctcgatcttatacgagaatcccaccgggtcaaccgccttaacaaagccggacacgacaaacaacacccccaacacaacatccgaccacattttctttacaaagttcctcatccccaaaatcaattagtaatatactagccaaactattcttaaccaaactcgcttaccctaaaaatcattttgttacatatttcaaaattgtcactcctccattttccatatgatcttccacttctttcgatgcacgagggaatccgtcgtttaccaacatttcgtactcaccgaaagaattcaacaggcaaataaagcgtccttgttcatcaacacccaagggataaggcataaccatgctctcgccatcataattttgcgtcatcacgttatccttcatggaatacaaataacacccgtaagtatctcgactcaaaatttcaagggctatatagtttccattcgtaacaggtgtctctccaatataataactcccgctttgatttatcttttccatatcatctctatatttgtccgtaatctccttatcaccgaaatcaacagccactattttaatactgtccccttcgacccgatcaatgaccgaaaagtagctggccccgcaccaatgaaacaaaattttctcccgtgacgacgagaaataggtcatctttccaatcggggcaaattcattttcctcgtacgggaacaacttttttgtaatgttcaaatcattatctgtaaaaaacagccggtatctcgctttgttgagatgatactctttgttggcaggcgaaaatgcgaacacgtacccaccacgatccagcccttccacatcccacgccacgaacggcatcttcttgttcatcaagaaacgtcctgtttcaacatcatagatcttaaaaaaatgattataattatcaattatggcaatctcatgatccgtcacgcaaaaactcttgatctccaaatactcgttaacagcccgtccccggctgtttaacgtgaacaagaactttccggcatcactataaacaacaattttatgttgaaataaatccccaacaaatatctttccctcccgaaatacgacttttgttccattagaaaaataagccagcgaatccgattccaaagggagatatgataccgaatcaatgtcttgtgaaattgacgctatcccctcctctttaaatgtaatcactttatccgcatgtacattctctcgcatgtttgaatggcatgatgtgatcatgtacaatacaatagcaaatttaaacttcatcttcatatctaatttccccagtaaaagcatcgttatcaaagatgtaaacaactcatcaaaacaaccatatttcttattactaacacaacaactaacatcccaacaccacgcctcaatcacatttctattgtaaaaatctccatcacaagctcaagtagtttcagtaaaaattactgcggtttacctaatttttcttccacgattttataaaacatctcttttattttcttgttacgcactggattcccaaccaaaatcacattattattctcatctaacaaaaatgtatgtagtaaattatctttcggcaaatgagaatttgatttcgcaaaattatttttcccatctacaataatttgatatttaaattcgctatttctgataagcatgtttaatgaacgtacatcttttttcgcaggcgaaaaaacgaagtaaaaaacaagttttccattataatttttactatactcaataaagggattccatgagatcagactattgatcatacatgaagaacaagctagagaatcgctgtatataatgtatttcaatttattctctttattataagtcattgaatccatattatgaattatcaaatcttcaccttgcggtaaaataatagaactagattgtaataccgacaattcctttgaaagactctgttcatcacgacatgataaaatagcaaaaaacaatatacacaaacaaattatttt

SEQ ID NO: 10844 - DNA, 45619 bp, Unknown
  gut microbiota DNA sequence
ctcgtgatagagaccgccggacattatttctactgggtattagctatcccgttagcaggattcgctgccttcctgtgggatggaattttgatcggggctacggctacccgttttatgctatgggccatgttggtcgcttccggtagtttttttgtaatttattactgtttttccggggctacgaataatcatacgttatggttggcctttctggtttaccttgcactacgtgggattatgcagacgatatggagtcggagagtatttactttaaaatatctccaaagtctgagatcataaattgaaggtcggataagtttatttgcccgctttttattatattcgcgatgcaaatacgtgtagttgaaaataaacaaataaaacacatggctatagtattctatcaaaaagatgcaacagtgtatgccgtacactataaagaatcggaaaatcctttagatgtaagtaagttagaatggttatttagtggagctaagaaagttcaaagcgattcactggaaagctttttcgtgggacctcgtcgggaaatgattaccccgtggagtactaatgccgtggagattactcagaatatgggtatttccggaatcttacgaatagaggagtttactcgtgtggaagatgaaaaagcggcttttgacccgatgttacaagcattttacaaaggtctgaatcaagatacgtttaccattgataagaaaccggacccgatcgtgtatatcgaagatatccgggcatataaccaacaggagggattggcactgaatgaagatgaaatctcttacctggaaggtctgagcaaaaaattaaaccgtcggttgacagattccgaggtattcggtttttcacaagtgaattccgagcattgccgtcataagattttcggaggtacgtttattattgatggggaagaacaggaagagtctttgttctccatgatcaagaaaacttcccgaacgaatccgaaccggattgtttcggcctacaaagataactgtgctttcattgaaggaccggccacggtgcagtttgccccggcaacaccggacaaaccggatttctacacgcaaaaagatattaacacggttatttcgcttaaggcggaaactcataacttcccaaccacggtagagccttttaacggggcggcaaccggttccggtggtgagatccgtgaccgtatagccgggggacaagcatcacttccgttggctggtacggctgtttacatgacgtcatatccgcgcttggaggcaggtcgtccttgggaatcggctattgatcctcggaaatggctataccagactccggaagatattctgatcaaggcttctaacggggcatcagactttggaaataaattcgggcaaccccttattgtgggttccgtgttcacgttcgagcatgaggagcatgaaaagacatatggttacgataaagtaatcatgcaggcgggtggtatcggttttggtaataaagaacaagccatgaaaaagaccccagaagttggcgaacaggtggttctgctagggggggataattaccgcatcggaatgggtggtggtgccgtttcttcagtggataccggagtatatgccaacgctatcgaattgaatgcggtgcaacgttccaatccggaaatgcaaagacgggtatgtaatgccatccggtctatggccgaaagcgatgttaacccgattgtttccattcacgaccacggggcgggaggacatttgaactgcttgtccgaattggtagaagaaacaggtggattgattcacttggagaaattacctgtcggtgatcctactctttccgacaaagagatcgtgggaaatgagtcccaagaacgtatgggcctcgtgatgaaggcaaaggatgtggagacattgcagcgagtggctgaccgcgagcgggctccgatgtacgtaatcggggaaaccacgggagatcatcgattcgtgtttgaggatgccagaaccggtgagaaaccaatcgatttggagatgacggatatgttcggtaatcccccgaaaacagttatggaggataaaaccaaaaaggaacattttgccgatgttgaatatagtgaagataaagttgaagaatatatcgagcaggtattgcagcttgaggctgttgcttgtaaggattggttaacaagtaaagttgaccgttctattaccggtcgtgtggctcgtcagcaatgcgccggacctttacagttgcctttgaatgacttgggtgccatggctctcgattatcgcggggaaagaggtatcgccacttccatcggacacgctccggtagctgcattggcaaacccggcttgtggttcgagactggctattgcagaggctttgacaaatttggtttgggctcctatcgagcagggaattaaaggtgtatcactgtctgctaactggatgtggccttgtaagaatgcaggggaagatgctcgtttatataaggccgtacaagctgctagtaattttgccatcgagttgggaatcaatatcccgacaggaaaagattctctctccatgacgcaaaagtatggcaaggataaggtgtacgcccccggaaccgtgattatttctaccgtgggtgaggttactgatgtgaagaagatagtttctccggtactgaaaccggatcaggattctgaaatcgtgtatattgatttctcttttgataaattgcaattgggcggttccagttttgcccaagtgttgaaccgggtaggtaaagagaccccggatgtaaaggattccgattatttcgtgaatgctttcatggcaatacaacgtttgattgaggaagggtatgttttagccggacacgatatttctgccggaggtatgatcacgaccttactcgaaatgtgttttgccgacaatcgcttgggattggatatcgatttctcttacttggcagagaaggacatcgtgaagatcctgtttgcagagaatccgggtgtacttgtacagatcaaggattgtaagaaggttgctgctatcttggatgaagcgggagtggcttacaatttcttgggacgcttgggtaaggccggaaagttaaatatcaagaaagatagtaaaaacttccacttggatattccatcattaagagacttgtggtttaagacatcttatttgttagatcgtcgtcagagtggcaatgagttggcctttgaaagatataaaaactataagaatcatgctctgaaatacaagtttacaccttcattcagcggtaagctttcccaatatggattggatgttaaccgtgttaaaccttcaggcataaaagctgccgttatccgggagaaaggatgtcagtgtgagcgggaaacggcttgggcgatgtacttggctggttttgacgtgaaggatgttcacatgacagaccttgtttccggaagagagactttggaagacgtgaactttatcgtgtttgttggcgggttctcgaactcggacgtgcttggttctgctaaaggatgggccggagccttcaaatataacgaaaaggctcgggtggctttggaaaacttctataaacgtgaagatactttgagtttgggtatttgtaacggttgccagttgatggtcgagctagacttggtatatccggaacattgcgagaaggcaaagatgttgcataatgcatcccataaactggaatccgcattcttgagtgtggatgtcgtggagagcaattccgtgatgttgaagtcattagtcggatctcgtttaggaatctgggttgctcatggagagggacaattccaattgccttacggacaggaagaatataatattccacttcgatatagccatgacacttacccggcgaacccgaatggatcaccttttgccacggcagctatttgtagtaaagacggacgtcacttggcaatgatgcctcacttggaacgttctcttcacccgtggaactggggatattatgcggaagatcggaatggagatgaagtcagtccatggattgaagcatttgtaaatgctcgtttgtggattgaagagcataaataatataagtctcacgaatgcaaataggaaggagtacttcacacagaggtactccttcttattttgacattaattatccctgataaattttctttttatggggaatataatgagcctattttttgattattattcttacttttgccaaagtgtaaaaaagtacgatcaatatggatttgctcaaaaaaagaattttacaggatggaaaatgctttgaaggtggcattttaaaagtggatagttttattaatcaccaaatggacccaattttaatgaagtcgatcggggtggaatttgtgcgtcgttttgcgaataaggattttaataaagtgatgaccattgaggctagcggtatcgctccggctatcatggtggggtatcttttggaattgcccgtggtcttcgccaagaaaaagcaaccgaagacgatggaaaatatgatttcaacaacggtacgatcttttacaaaagaccgggaatataatgtttgtatcagtaaagatttcttgagtaaagaggatcgagtgctttttatcgatgattttcttgcaaatgggaatgccgcaaatggaattattgatttgattgaccaggcgggggcacaacttgcaggcatgggatttattattgaaaaagcttttcaacatgggggcgaagtactgagagaacgtgggattcatgttgaatctttagctattatagatagtctggataattgtcagataaaaataagataagccggcatgagtgaaacgaccaatcgtcaggttagctcggccattatttatggaatagaggaccgtccgccttttaaagaggctctttttgccgcattacaacatttattagccatctttgttgctattataactccaccgttaattattgccgaagcgttgaaccttgacttggaaacgacgggttttcttgtttctatggctctttttgcctctggagtctctacttttattcaatgtagacgggttggacctattggaaccgggttattatgtattcaaggaacaagtttctcgtttatcggcccgattatatctacgggattggcgggtggtttgcctctgatattcggggtgtgcatggctggttctgtggttgagatgctgatcagtaggattttaaaatatgccaagaaagtcattaccccgctggtatcgggaatcgtggtaacattaatcgggatgagtctggtgaaagtaggtattaccgcttgtggtgggggtgttattgctaaagaaaacggtactttcggtagtttcgagaatctcggattggctttactggtgttagttttgatcatcttttttaaccggagtaataataaatatctacggatgagttccatcgtgatcgggttagtcgtgggatatgttgtcgcttatttcatgggtatgatcgacttctcttctgtacagagttattccggggtaaatattcctgttccttttaaatacgggttagcttttagctggtcatcatttattgccgtcgggttgatttacatgatcacggctattgaggcttatggtgatattacggctaactccatgatttcgggagaacccgtggaaggagagaagtttattaaacgggcttctgggggaatccttgccgatggtttcaattctttcttggcaggggcatttaattctttcccaaattccgtgtttgcccagaataacgggatgatacaattaacaggagtggccagtcgttatgtgggatattatattgctgcttttttagtgatactaggactttttcctgctgtcgggctggtgttctcgttaatgccagaaccggttctagggggagctacactacttatgttcggtacggtcgctgctgccggaatccgtattatagcctcccagaatataaataggaaagccacgctggttattgcattaagtttctccttgggattaagtgtcgaattcattccggaaatattgaatagttgttccgataccattaaaaacatattctcatccgggatcacgacgggaggtttgacggcaattgtgtcgaatgtactgatacacgtgaaagaataattgtaaaaacaaccttatatggttgtttttctagaattaaccatatagggtgagtatgtattaattggaacatttgtacgttttacgatcgccatcttgttaggattaataatgattagattaattgcataaaatgataggaatagaagagatttaccctttggctgttgaattccggcgttattttcatcaacatccggaattcgccatgcaagaagtagagacgcaacgctatattgcggaagtactggaacgaaatggaatcccgtaccaaaaagtggggacgggattaattgcaaccgtggggaaaggagagaaatgtattgcaatccgggctgatatggatgcactgaaggtcaaggaagagaccggattatcctattgctctcaaaatgaaggcatgatgcacgcttgtgggcatgatatgcatatggccatggttttgggggcagcacttgttcttaaatccggagaagacaaattacagggaacgataaaaattatttttcaacccagtgaagagaaacgtccgggaggggctcgtttattacttcccgagcttttaaaagaacccgttccgcaagctatattcggacaacatgttttcccgaaccttccgaccggaactgtcggaattcgtccaggggcctttttcgcctcttcagataatattattttttccgtggaaggtaaaggtactcatgctgccatgccacacatgggctcagatcccatattggccacggcttgcttgatacaattttaccagacgttgattactaaatttcgagatccgttgatcccggcggttctttcgattacttctatccatggtggcacgtgtaataacgtaattccggatcgcgtagacgtgttgggaaccgtccggacgcatgacaactctttacggtataagatattcgaattaatcgaggaaaaatcaaactccatttgtgatttgtacggttgtacattccgtttggataaaacttggaatggattgcccgtgttggtgaatgataagagtttgacagaatttgtgaagaaaaatgcaacagatttactgggagaacaaaatgtgattctaatggatcatcttactctaggagaagattttgccatttacttggagaagattccaggagtattctgggtcttgggtgtccgtccaccggaacaggagagtatgcctccacttcacaatccgggaatggctcctgacgagaatgccatgaaagcgggtattgcgctgatggtggagaattgcgttcagatgttgagtccacgaaatgtataaaaaaatcccaaggctctgctccttgggattttttatagttggtacttcggataaaattactgtaaatctgcaatatttacttctatcgctgccggatagattctttccggatcgaaaaatgctgcacaactgttcaccatgtttttaagttgtggtttaacctttcccttaaaagcttctttgccatttactaccaatgtaatttccttgtttaaatccaccagtttgtcattcaaataaatgattactttcccttttgtcgcgggttgatagctcttttcaaaatccagttctataccccagttcggatcaatttctgttgctttataagtaactaaatcaatctttaaggaaatattattttcctgtatatccatttcataatgggttctggattgcgtatcatcattagaacgttcttcaacaaataagttatagaatccattacgatacagaccgtccatttcgaagttctcccagcttacatgtttgggataaggatttcgggtatattgtttcaaccaaggggttgtaagtttgtaatctataccatgtcccataccgggaatcagttctatacgatggataaagttacccggattggctttttctagtttatcaaattcgtctttcgtgcgttgcgtaagtttattcctgtaaaatcccctgtcatttgctcctgtcaatagagaaaaggcgatgtttctgcaattttcaacaggagcattcttcagaggttcccctccggccatcgggcctgctgcagccagataatccgcataaaatgatgctaaccgttgactaccgtatccgccttctgatattccgaaaaagtaaactttattgggatttatttttccagacacgaaagctaatcgtagcatcttttcccaagcaaactgctttgccttttgccaccaacgatagtaatcgcccatgttcggtatctgaggtatgaagtaaaccgatggagcatcatcgaacttttggcatatgttgatccccgttctccattcactggttttatctccggaaccatgcgtgtatagatataatgaaaaaccaccttctggttccgaatctcccttgtatccccagtagtatggcatgattgcattgggttccagttcctgcgggagagtccatttccccgaatttgctttctccagtttatcaagattaatcaatttctgctcggagaatttgttatttgcctccttccatgcatcccacacgatttgctgcatctttttcacatcggttgatttgagcctgcttttgtcgtcataggcatcagcattacctgacaggtgaccggagaaatgggtcgtgattttttcttttgtttttacatcctgttttttcaaggatacttcttgagccatgctatagttagaaaatgcaaggactattaacaagctcaacattttgaacgaataaacggtatttttcattttgttatttgtattttgtcttgttgcaaaactacaaaaaaatacacaaagatacttctttagagccattagagtgttccttggattacattatagataacccggtatctcactgataggttaattgtggatcaacgataggttaactattgtactcaataaaaaatgactggctaaatttaaccagtcacttataatctattactaatcctaaattgttacttgtaagtttttccggaaagttctccgcgaagaaccatcagtccgttcatagctaatgctctcatttcatcttcaccggcatatacttttatcggagcgataaacccgaccatctctttcacgtagtcaaccaagaaggggttgtgagcaattcctccggttaacaggataccatcaactttaccttttagcacggcagccatttcaccaatggctttacctacctggtaagacatggcatcttgtaccaatttatatttcggatcttctttggcctttatttctacttcgtaagcatcgtttgttccaaggtaagctactaatccacctgcacctttcaacattttcttgatttctgcttcggttttcttaccgctaaaacatagttttaccaactgaccggtaggaagacttcctgaacgttccggtgagaacggaccatcaccatccaatgcattattcacgtcaattacccgtccgtgatcatgcgctccaacagaaacgcctccaccaagatgtgcgataatcaagtttatatcttcgtatttcttcccaatttcttttgcataagtacgtgctattgctttttgattcaaggcatggaagatagaaactctcgtaaaatcaggatgtccggttaatcgggctacatcttgtaattcatcaactactaccggatctgcaatataagctttcgttccgttattaagagatttagcgatatcgtttgcgatcagaccacctaaattagaggcatgttctccaagaggagggttgtttaagtcgttaattaatgcttcatttacctcatacacaccggattcaatgggtttaactaaaccacctcttccaacgattgcgttgatttcgttaatattaaatccagcattcttcagttcggaaagaataatatctttccggaattggaactgtgaagccacgttatcaaatttcgcaatttcctctgcggaatgtttgatgttctttacaaacttctcagtttcatcttcaaagattgcaattttcgtggaagttgatcccggattgatcgcaagaattttaaatgacataattttaattgttattttaaatattaataattattctttttcgtacgttatgaggctgcaaaatttataaattgtaagcaaaactcaaagaaaaagtgataatttatttataatagagaatcaatccgaataagcggataaataaagggtatcgacaatagcttgagagatgatctttaaataatgtggggcattctttatagaatcttgaatggaacgggtatactggctcattatgaatactttatcgaaacgggtaaggacttgcttttctgccaatccgacaacagcatagaccggaacgttatgtttctgacacaggtttgcaacagttcccggaattttaccataaaaggattggaggtcgattttcccttctcccgtgatgaccactccagcctgtaaaagattgtcgtggaaacgggagagtgtcaggcagtattcggaacctgaaataagttgtgcgtttagtagagcatacatggcggcagttattccccctgcggcacctccatgttttaactgggttatatccttacctgtattctgttttaataaatcactccaaagacataattggttgtcaagcatgataatttgctctggcgatgctcctttttgtggagcaaacacagcggcagcaccctccggaccacaaataggattatcgacatcacacagtattgtaatatgaatttctttaaacttttgctgcaataattcggtgttaatacccttaatatctgtgatataatttctattcggagagttgttgacaattgtcaatcccatttcccgaagagctcctataccaccatctacgctggcgcttccaccgacacaaagaatcaaattattcgctccttgcgagatggcatgattgattaacactccgaaacctgccgtgttcgtgttcaaaatgtcatattcctctcgcttcaaatgtttcagaccgcaggcttcggctaattcaatgatagctgtatggtcttttaagtaatacgaagcgaaatgctcacgtcccaaggcatctactgttttcgtcttgatgggggaagcatgaaggtaatgtgccactattcgggctgttccatcaccaccatctcctaatggaagggagatcgtatggaatccacattcttctaattcagaagccagaattcgacaaaactcgaaagcatccaaacttcccttgaatgagttgggagctaaaagaatattacaattgtttatgaggttcatggctagatgttgtcaggatgcacgggatgtgcttggactcctttttcgttggccagcaattttttcccatcttcgaaagccttgcagtaatcaggatcaaacagattcctgtccggccattcttttacccgatccatggcgcgagccatcatgccttcgatcttatggggaaaacgaggtccggtccaattactcgtgttggtaatgaatgcccaacagaacccgtcccgttgacgctttaacatagcactggttccagccagagtcccggaacgccaccaatcaccctggttattggtgttcatccaaccaagaggcaaagcgtttttcacgcatttagtcataatttccacgctctcttttgtcaatatatccggatatgaatcatttgcgtctatggcagaaaggaaacgtaataattccgtcggggaggccacccagcctccggcaccataaagagcctcgatgttgtttcccccgttactgcgatacactagtgtatcccgtccgtcacatgaacggatcaggtccgcgtccgattgttcgtaatacttgacctcgttgaaataccggtctttatctagattatgggccaaatgcatatcataacacccggcaggaatgagtatgctatcctggataaattcttcgtagtttttcccggaaattttttctattacttttgacagtattccgtaccccacgtttgaataacaagtgcttgttcccggtgtgaaacctaaacgtcgggataaaacgaatttgatgatggtatttaagtctgccggtgccggaacattcatcttttccgcgatgtctatcgggcagaacatggggtcgcctgcacgatttgtgaatcccccttggtgacgtagaagattttccacggtgatatgattcatccgtttatcttttaccggggcataaagtgtcgtatcgttcaaaataccttcttctccaaatactttatcatccaaggatagcgttccgttttcaactaatttcatgattcctgccgccgtgatcagcttggaaaccgaagcaatccggaagatgtgattcacgtcggttttcacctcattttcttcatctgcataaccgtaccctttgctgtaaatcagtttcccgtctttcataatggcaagggaagctccttttatttcccattgatccataaaacgttcgatcgtttgatctaaacgtttggtttcaattagatctgaatattcattcgtgaataaatcatgcaccgctacggcaagtgtatcctgggggatggaatctttttcaacttgaatttctttcgtgaaaaaattccaaggcctgaagctgataactagaaagaatagtataattagtatagtatatttcattacatctgcaatctaaggaaaaaagcgtgatattccatgtcaaaaaaatatcacgcttgcaatattaataaaaatacatttttattcaaagagatcagatgtaaaacacctttaaaaattcttatttaataaattgaaatagtgttccataactttcaccagtagaggatggcgcgggtcgaatgcaatcccgtcgatatgagcgatgggcaatacgagcggggaagtccccgttataaaggctgcctgataggtggctatgtccttgtaattcactctttgttccaccacggtcagcccgttttcctgacagatatttaatacccgtttccgactggttcccggtaaaacatggggaagaggagccgtataaaacacgttatcccggataaagaatacattcgaacgagaaccttctgttatgcagttatccccatcgattaataaaacttcagcaactccttgttcctgaataatcttgtttgtcatttcccgtaatccggaattgatatatttcacttcggcattctctcggatggcatggcacgtcaccgtgtccactccatgttgataagcttcttccgtcgggtaggagtgttttatctggtaaacatattgttcgattcctgtcggggtaactctaatcacgtacttgatatttccttccttgatgttttcaagctgaatcaatcgatttaattggtcggccacgtgtagtgaattcaaatcaatggcaaggtttgatttttttattgaattgtcaagtcgtaaaagattgtcatttagaaatataactttacctctaaaaacccggcatacttcatatatactaaagccttcatttaggatatcttcggaatatttcttgttatcgatgggtttattattaaataacatcataattttctccttttatgtgtcgcgaatttatgctttaaaacgattatataaccggaaatgttcagaaattttagagagagaaaatggggcttgttactttcgataatttgcgctatttttggctgatatatggaaacacgagagcaaatagaacgaatagagcatttcatacgtgaagtggttgtgaatgagattgctaagttgcagggtgtgggtttgtcgtatatgcaatttgtcatcatggggcaagcgattgaggttttgggaagttttttagacaataaacccatgaaagccaagggccagtcagccaaacgtttttcccttggggtaaagaagttattcgggggacgttatcgattattaaatgataacggttttttgtatgataaacttcgcaaccaaatgactcacacgtttattcccgggggagatttgatattattgaaccaagcggataataaaaacgggtataaacatctacaaatagtcgagggaaaattagttttaatttccgaagttttcaatgaagatattcataaggcgagtgaacgtcttttagaagccattaaaaacggggtattatttcctaaaaatattgcttactagtacatggaacaacaggataaaatcatattgatcggggccgggaatgtcgctcatcatctgggcggagctcttttaaaagcgggagaaaatttatgccagatatacagccggacactggatacggctcggcaactgggaatgagaacgggaatatcttacacggcagaattgaatgagatatatccggatggagatatttatattttttgtgtaagtgatgatgttctaccgtctattattaagacgattagggtgtcgaataatgcattgcttttacacacttcgggaagtcagccgatggatgtattcaagtcatattcccaatattacggggtaatttatccgatacaaaccttttctaagaaacgagaactggatttcagggagatcccgttatgtgtggagggaaacacgagttccgtgaaagagcgaattaaaaagtttgcggaaaagttgtcagataaaatatacgagatagactcagcccaacgtaaagaattgcatttagctgccgtttttgcttgcaatttccctaattatttatatcaagtggcaggcaaattgctagaagacaaaggactatcctttgctatgttacgtcctttgatttttgagacagcacataaagtgatgctcctaaatccggaagaggctcaaactggaccggccaagcggggggacgagagtatcatgaatatgcacaagaatatgttgaagaatgacaaagacttgctgaaaatatacacgatattatcggaagggataaagggaacgcaagataaagaagagaccggggatcaaaagatatcgcaagatataatagatatgcccacattgtggtaaattagataaatacgaacgctatgaaattattcaaagaggaattaaagaaggtagaagcttttgctttcgatgtagatggagttttttcacgtcatgaaatgaatataacaccggaaggtgacttgattcgtacatcttgtacgaaagatggctatgccatgatgtattgtacgaagaagggctacccggtttgtatcatttctgggggacaggctcctggggtaagggaacgttttgagaaattgggagtgaaggacgtgtatcttggcgtggcgaataaagttgaagcgttgaacgagttcttgcaaaaatataatctgaacccggaaaatgtgatgtacatgggagatgatataccagactacaacgtgatgaaaatcgtgggtatgccggtatgtccttcggatgcgtgcgaagagatcaaagctattgcccgttatatttcagatacgcccggtggccttggatgcgtacgggatgtcgtggctcaagtcctgaaagcaaaaggcgaatggatggatacccaatgctacgtgaaatgtatgtaagttaaagaataagatgttggaaattctcaagttaatacgcctacgaacgattgcattcacggcatttaccatgtatgccatacgtttctttgttgtccagcccgtactggagaaagctggttttgccctgcaaatgccggaaggcaatttctcgttactggtaatagccgtgtgttgtctggtgtcggccgcttatgtcataaatgattattttgacacgaaagctgaccgtatttcgggaaacagacccgtgattgttgggaaaaccattagccgcagggccgcaatcattctacattccattttgaatgttgtggccgtgggaatcgcgtattatctggcgagagaagctcatcatgttgagatagtattcttatttttaatcatatcgttggtgttgtggttttattcctcccggataaaaaaacgttttatatggggaaatatcgtcgtggccattttggccggattaatcccacttaccgtgattgcattcgaaatcccgttattgagtgatgtgtactcggatgttgttttgaaaacgcatgttagttttgcctacgtgttttactggacagcatgtttttcgtattttctttttattaatatgctgatatacgagatcaacaaggacatatatagtataaacggagaccaggctgatggaatcgttactttacctgtaaaatttggtattccggcaacgagaaaggtgatcatcgggttgatcacgattgccattacatcgttgatcctatttttgttattcggatttacacgaaccccgatcgtatggatttattttgttgtagctttgattataccatacttgttttacggctatgcggtattgaagaatgacaagatgaaattccagttgcgaatgattcgtttgattatggttttgtgtataggagtcagtgtattttgtaagttgtgtgaatgatgcattctattaaaaattataaattaatattggcttctgcatcgccacggagacaacaattgatgaaagatgctgggtttaccttcgaagtccggttgaaaaatattgaagaaaaatatccccaagagattcatttggagaaagtaccggaatatttgtcgaaagtaaaggcttctgcctttcgagaggagctaaaggctgatgaagtattgataacagccgatacggtagtttgtattcatgatcggattttagggaaacctgcagataggaaagaggctatttcgatgttacgggagctatcgggaaatcgtcatctagtggtgacgggcgtgagtgtaaccactcgtacggaacaactttcattctcttcacggacaggcgtgtttttcaagcatttatcaaatgaagagattatattctacgtggatacgtataagccatttgataaagcgggtgcttacgggattcaggagtggatcgggtacattgggatcgagcgtatagaaggttctttctataacgtgatggggttaccgatacagaaattatatgaaactttacggaaattacaatttcaataaataacattcaaaaataccagtaaatgagaaaaattacattatgttttttggctttcattctgcagactttaccaagtttagctgacgagggaatgtggattcccatgttgttgaaaaaatacaacatagaagatatgcagaaagccggttttaaattaacagcggaggatatttacgacatcaaccaagcctcattgaaagatgctgttatcgggttgggtaatgaaggttctccgtttcatcacttttgcaccggagagatcgtgagtgatcaaggattagtgattacgaatcatcactgctcctttggcatgatacaagctcattctagtctggaacataactatttacgggatggtttttgggcacaatccatggcggatgaattggttaatcccaagataacagcttctattttagttcggatggaagatgttacggataaaatcaatgcgggattaaatgccggaatgtctgaaagtgaacgtacgaagaaggtgaatgagatatgccggaaattggaatccgaagccgttaaaggaacaaatttggcggctaatataaagccatattttaacgggaatcaatattttctttccgtgttcaaaatcttccgggatgttcgtttggtgggagcaccgaattctgctatcggtaaattcggtggggatacggataactggacttggccgcgtcacacgggagatttttccgttttacgaatttatgcaggaccggacaatgaaccggcagcaatatccgataagaacgtgccttataaaccggctaaattctttaaaatttcggcacggggggtgcaagaaggtgattttacaatggtcttcggctatcccgggacgacaaacgagtacttgacttcctacgcgatagatcaaattgcttctgttgaggacccgcataagatcaaaatccgtacggcaaaattggacgttatcaacgcggccatggagtcggatgaattgttgcgtataaaatatgccgctaaggcagcaagtgttgccaatgcttggaaaaaatggcagggagagattaaaggattggatcgttttagcacggcagatagcaagagggtgcttgaaaataatttcaacaattgggctaaaagtaatggaaaaaccgaatatatcggtttaacggatcgttacaaggcgttatatgacgctcgtaaagaatatattctggctgcagcttatgcttcggaggccgggctgggaggtgcggaaatcataaaatttgcccgtgaaatagagcaagtgttggataactatgacaaatttgaggataaggaacaacttaaagaatctctgaagaattacgtcgaggcattctataaagattacgacgtggccacggatcaacggatattgaccgaaatgttcaagttgtataataatgaagaagttggagaccggtggatcccatcagtcgttcgcctaagcccgaaatatgctaaacgaaatgggtacgatcgttatgctgccgacttgtttaaaaaatcaatattcacgcacaaggatgatttactgaaattcatcgacaatttatccgagaaatcaatcgcaaaaattgaaaaagatccgattcttggagtggctaccggaatttacacgttgtatgcggataaaattcgtcccgaattgagtcggattgaaagtgaattgaaattattgaaccgtttgtggattgccggattaatggagatgcagcctgataaaacgttctacccggatgcgaattcaaccttacgtgtagcttatgggaaaattgccggataccatgcaacagatgccgtttattacacgcactacacaacattgaaaggtatcatggaaaaggataatccgaatatctatgattatgatgtaccccagaaattacgggatttgtacaaaaatcgagatttcggtccttacacccaagacggagaggtgcccgtctgctttatcgcaacgaatcacacgactggcggtaactccggtagcccggttctggatgcggaaggaaatttgatcggtttaaactttgaccgtgcttgggaaggtgtgatgtcagatatgcaatatagtccggagatttgtcggaatatagctgtcgatattcgctatgttttgtttatcattgataaatatgcaggagcgcaaagactgatagatgaaatggtgatcattcgatgagagctattaaacgttctttctattgcttggtataatatagggttctatgaaaaataaccgtaatttaaccataaagtaaccgagaaaataccccacgctcgttctccaaccagagcttattcgtagctcgtacaatccggattgtatgaactacgaataagctctgtataaactttgaaaaagaggtagtttttcctttacttcttggtaggattacctatacttctcttctactctccacacgtacgcttggtttgtaaatatgctgtttattttgagcaggtgtggcattcgtaatgtttgttgcatatgcccaaaaaatgttggttattaatggaaagggaataatatggcttctattaaaataatatttagagagtcgatagtagagggaaagatgggatcttgttttatacaaatcatacatcaacgtaagatcggtattttgtccacgggaataaaattgtatgcgtggggaatgggataaggttaacaatgatgtcctttggtcggaggataatcccaagcggcagttgatcgtgcaggcggcacgagcgagattgtggcaggtggtgaatgagttacgggaaattgttgatagtatggaaatcaacaatatggattacactgcacgaatggttatcgaggagtataagagacgtttaacaaaaaatacgttattttcttttatgggtgaatgtattaaagagttaaaagatggcgggcgggagagaacttccggcacgtatcataatgctgacaaaattgtcgtgttgaaaaaaggaagtgtggcggaacaagggactcatgaagggttgattgctcagaaaggttattactatgaacttggtaaaaaatcagatagaattgggatgatttttataaaataaatcaatcccccggcttgatagtcgagggattgatcatttgacccatctatgtttttattttgtcgaggacaaaagacgtttgtttaccacatcccagtttataatgttccaataattttcgatgtatttcggacgggcattctgtgtatccagatagtaggcatgttcccaaacatcaatggtcaggattggtttcttgccatgttttaatggagtatccgcgttacctgtttgtacgatttccaatttgccactcttgtctgcaaccaaccaggcccatcctgaaccgaataaggtagtggctgctttggcgaatgcctctttaaaagcatcgaaacttccaaatgatttatcaatcaattcttttatttttcctgttggaacaacctgcgcggcgttatggggttggaaggtttcgaagtaaaaaatatgattgtatgtttgcgcggcattattgaaaataccaccttcagatttggtcacgataccctctagacacatcttttcgaactcggtacccacgatcaaattgttgaggttggtaatataagtggcaagatgttttccgtggtgatattggatggtacgttcgctgatataaggttccagtgcattttccttgtaagggagagagggcagtttgaatttgttatcctcaccttttgtatttatcacctctgatgacatcaacacgtccaattctttgtactcttctgttttcatatttttatgttttaaaattgcttttgtatttacaaattctattatagatgatacgataaaatatgaataaagttactgctttctatgaaaaaaataaaacggatagttactatttttcactacccgttttgatccatgcgcgtggataactctatttcgtcagttttgcaccgaattccagtgtcttaagattcgttgaaaaagtatcaacaaaagttttaatcgccttttgttgttctgtaggtaattctgtactacttaagataagcgggactgcagaaagaagtgcttttacgtaagaagtgtttaaatataccgtcaattcattgtttgctattttgtaattcaaatcaatagaggggacgggaatatttcctaatagagccttgaaaccatcactttgagtactgacttttataatgtctttttgaatcgtgtaagttgtctttaaagttgcaggttggccattcatggtcattaatatttccatctcggtttcagaagtaaatttaataccttggaaatattgagacatgtatttgttcgcaagcacgggtaacgccattttaatcatggcaacattgatccccgtttcgctgactcccggaatccctttcggaagaactcctgacggaattaatccttcagggaaactgatctcgtcaccattatattctagttcaaaatgaatgtcagccgcttttcctgaataattccaagtcccgataaggtctttgtcgttattttcatcatcgtcatcgctgcaagagaagcttactacagttacaagtagtacggaaatcaagtaaattaatttgtttttcatcatagataaatttgaaatgtttgtttataattttattgttatagatgccccgaatcgagagggagcaccggattggccggatttcatgtattccggtaaattatttcccacgggactgttgaacatatagcaaaagaaatttttatctaaaatgttcttaccccagacgtggaaatcaatgtgtttaccggaaatacccagatccatgttccaaagaaaatagggatcttgtttcatggtgtttgcctcgtcaaaatattgggttccgaaaccggtaacagacgtggttgccgtgaaagatttgaataacgaggactttattgcttgggtgtacgatatccccgtgttcatcgtgaattccggggccatgacaattttattaccctcgtattccttggttaagtggtgatagtattccgaatcgctatatccggaggaaagaaagtaaaccagtcgcggcaggcattcccagcttaaatcgatctccgctccaatactgcgagcgtctcctgcgttcttgataatcggtcccatcatttccataacgaagatttgctgatctttccaatcaatgtaaaaaagtgccccattcacgttaaaccgtccgttaacgctaaagtatttagctccaagttcataattccacaatgattctttgtcatattccaactctacaacttgagtagtcatttcatttgaaatgatattgtacccgccggctttataccctttagatatattcaaataggtggataattgttcgttccatttttgtaggacagagaatttaggcaaccaagccgcataggaatgcttttcatcccaatcgtgataaccggtgaaccggtctgcatcatgaaataacaaactgtcccggtaggagagagacgctttctcgtaatcatacctgattccggcagtaacgaacattcccggtaaaagatttttcacggtaatttgcccgtatccggcaattccccaagtggatgtgttgttataatacaacgcttgatccaaatccagcgggagaagcaaatgacgttcggtaccgaacgtggccaaataatcattcgtcaagtccttgtaaaaaccaaatgttcctaccgtccaatcgattttatcgccccgggaggactggtagttgatctcttgcgtgatcagatcttgttgggattcttttccattttgaaatacatcatgatacgtgaaatctgcatccaaaacctgcttatctttagcccgggaataggacgtgatccagttcaaccgggtttgggaaaaatgtttttgcacgtttacgtacgtggataataaatcccgtttataggatgcgtccgcgttgtaattaacccggtaccggtgtacttttaacgaatcgatggcatggtaagcgtaaccgtcatcaaagctatggttgtagtttagaccaaacgccactttccaagtggcatccgtgaacacgcttccctggtaacgaatatcgtatgaatccgatttgttcgattttcccccggtaaaatcattcttgaaatacccgtccgtgcgattataggcaaaagacaatttgttgtatagaactttgttgatgggtaaattagccataaacatgtaattctgagaattgtaactggaaataccggcttttgcctgtaaagaaaattttgtcgcgggaggatttgtccggatgttaatcaagccgataatgctgttccggccatacaaagtggtttgcgggcctcgcagcacttctatttgcttgatgtcgtacaaatcaaatatgaaggcgtttttgtcaaaaatcgggactccatccacgtacaaaccgacgggcggggttccggataccgttccaattccgcggatatagagtggggtcgataatttcaagccaccttcctgcatgtagaaattcggaacgattcccgacaagttgcggaggtccggattattctcgtttaataaatttttcccgctaatcacgctaagggcaacgggaatctcgttaatggataattcccttttttcggccgtgatgataacttcttttagttgtttaatagcactgaatgtagagtcatttgtttgcacggtctcggaccgctgggcgaacaaatgcccggaaatacatgtcaatagtaaaatgctatatattatccgcatttgatgttgttttaaattaaagaacttatatacaatttacagcaagtcaactcccttatccttcgggtactcggtaagaagtaccaatttttcctctgtttatagagaaggtggcacgaagtgacagaggagttcaagctccaagacaagctcttgaaggattacgaaaaatagataaagggaggggccctcaatgtctgtaatacaagattaggattgtcatagttagcaaaatagacatattgtttggttttcgatcgatcgtctgttatttttaagtagggagaacttgaagaaaaaactatctcctcgtcttctatgtcctgacaataatatatctcgtttttcccgattcgatattcgatagttctttcctgtcccggaactgcttccggaagtcttatttcagtttgtgaatagaaacagatcacaaaaaacgcagaaacaagcaaatagacaaatatgtttaccgacggtccgatgaaaaacatggtgcaaatctataaaataattggatatggatgactgaaattctttgagaacatggttaattagaactgttctaaattttgggaaaatataatttgagatgttgtatttataaaaaagataacgatatttgcactcgatataaaattgtaattattacaaataagaaatgaatacagttcaaggaacacgggaatatttgttaaagtatgacatcaaaccatccatgcagagaatagcaatcatggattatttgatgacacaccgggtacatccgacggctgacgaaatttacaatgctttatatccgactatgcccactttgtccaaaacgacaatatataacacgatgaaattattctcggaacagggggcagtgaaagctcttgtgatcgacgagaaaaacgtgcgattcgacattgacacgtcaagtcacgctcatttcatgtgtttaggatgtggttgcgtgtatgaccttcccattgagaatcaagaagcgatacaattagaaggggtaggggaattgattatcacagaaattcatctttattacaaggggtattgtaaaaaatgcgccgaagagaacagaaaaaacatattattataacattaaaaaagtgcgttatgaaaaaatttatctgtaccgtatgtggttacgtgcatgaaggagatgaagctccggaattttgtcctcagtgtaaacaaccgaaaagcaagttcaaagaattggttgaaacagagggtgctctgacatttgttgacgaacatcgtcttggagttgcaaaaggagttgatccagaagttctcgagggattgagagcacatttcaatggagaatgttcagaagtcgggatgtatttggccatgagccgtcaggctgaccgtgaaggttacccggagattgcggaggctttcaaacgttacgcttgggaagaagcagaacacgcggctaaatttgcagaattgttgggagaatgtgtttgggataccaaaacaaacttgaaaaaacgtatggaagcagaagctggtgcttgcgaggataaaaaacgtattgctactttggctaaaaaattggatttggatgctatccatgataccgttcatgaaatgtgtaaagacgaagcccgtcacggtaaaggtttcgaaggcttatataatcgttacttcaagtaatctattgtaagttactttataatattcaaagagatcgtcaaggcttagacgatctctttttattaataaaatagcacattttttacatgtatttcatgtaactttaccttataagttcccgtaacaacactcgaaattgaatttaacacggagaattgtatgagaacttatagatgcgaagacgtcactttatcagagagaggaattgatagtaaaggctggttgtgtaatcctcaagaaaaaggtaaaaaaccggcgatacttgttttaggtcctaaagatgcctccaacaacacggtattattacaatatgccacgcgattggcaaactatggttttgtcgttttaggaatggaggaaactcaggatgtaaaagcagccattgattatttgagcttgaaagatgaagttgacccgaataaaatgtacgccatggggatatgtaacgggacaaatgaagttctggccagtacagaagcggaaaaacgactaaaagccattgctctggtggcgggatgttacaaacgcaaggaggcatcgcgggtaaaagttccaaccatcgttattcacggggggaaaaacgaaaaggagtatcaatccgcccaacgcgtgtacgacacgatctgtgccgaggaaaaattagcgatatgggaaggttctgtgactcatgcacaatatttcgaagatcctcttgttttggataaaacggtacggaatgtcttccgttggtttaaaacacattgacaacacactatattaggccttatctatgggttatgacaaggttatactagggttataatctcacgcgaccgtttcatcccccgtatagcccccttttcccgtcctttcccaagggcgatgaaagagcgatgaaagggaggtgaaagggccgaaagagattaaatccctgttataaccttggtaaaactcgggttttacctataaacgggtatacttaaaagtcttaccaccacttgtaaaaatgatgaatggctccatgtccatgtcctattcggtatccggctgccgtttctatggcctcgtgcaaataattcaaagctttttccacggctatattcaaggggaaatcatgggctaaataggaagccacggaggatgataaagagcatccggttccgtgcgtgttcggggtgattattttctttgccgggtaacgatattccaaatcatgctcacaatcaattaaaacatctgttatctcttcacattctaaatgcccggcttttaacaagatattacgagccccgatactcttcaatgcgggaatggaaagatataaatcttcttgagagcgtattttcttcccggaaagaatctctatctcgtaaagattcggggtgatgacggtagctaatggaaataattccttttgcatcacggcaatggcttcttgctgtacaagcagatcgcccgaggtcgccaccattacggggtccacgacaatgtacttgatcgggtaatcggctagtactctcgtgacggtttgaatcacttccacggaatgtagcataccaattttgatcgcatccacgccaatatcgtctaaacaagctctgatttgggcgtctatgacattcacgggaagaggttcaatggctcttactcccaatgtattttgagctgtcacggctgtgatggcggtcatagcgaaacacccgcaggccgagatcgctttcaagtctgcttgaactccggcaccgccaccactatcggaaccggctatagataatactctcttgtaggttttcatgacaagtatcaggtttagaatgatcgggcatataatacgaaaatcgtcggacgtttatttatatccgggttcacgtgtttccaatcctttattaacatggtttttatgtattcattttctgtcgtaatatcacaggctattgtgaggcgtgtggtgggagacagggtagctatcatatcctcgaataattgcacgttccggtagggggtctcgataaataattgtgtccggttctccacggcagattgtttctcgtaagttttcaacgttttaatacgttccggcttggaaatgggcaaataaccattaaacgaaaagttttgcccgttagccccggaggctaccagagccaataaaattgaagagggaccgactaaaggaattacctgataaccgtgtttatgggctaatgccaccaattctgctcccgggtctgcaataccggggcatccggcctcggagataatgcccatatcttgatcggccaggtaggggagataggtttcaatatcttttatatccgaatgttcattcaagtctaagaaaacgagttcgtcaatatttatggccttatctattttctttaaataacgccgggtatttttcacgttttcagttgcaaaaactttgatattcttaatgatatggattacatcaccaggaataacccgctctatcggtgtttccccaagtaaattggggagcaaatataattttcccataataaaatgtttggggcaaatatacaggattattccgaatcttattatttttgcatgacacaataaaacgttctacatggaattttcgatgtcagaatataattatttttcagtcttcaacagatgaaagtaacgattttaggaagtggaacttcacaaggggttcccgttattgcttgcgaatgtcctgtttgtcgctctacggatgagcatgacaaacgtttaaggtgttctgccatgattgatatcggggacaagaaactgattatagacgccggacccgatttccggactcaaatgctacgagccggggtaaaggacgtgactgccttgctgttgacgcacgaacataaagatcatatcgggggattggatgatattcgggcttttaattgggtcaaaaacggagaggttgacatttattgtaaccggaggacgaaagacattatctgcaaggattatgattacgcttttgcagaattccgttatcccggtgttccggaaatgaatattcatgtggtagatgaagccccattctggatcgatgatattaagattgaacccattacggtcatgcatcataagcttcccgtgacggcattccgtattgataatttcgcttatatcacggatgcgaatttcatatcggaggtaagcatgaagaaattggagggggtcgaatacatggtcatcaatgctttgcgtaaagaaatccacctttctcactttacgttgaatcaagccattgatgtggtgaaaagcttacacgtgaaacaggcctacatcacacatatcggtcatcagatgggattacatgaagaggtctcgcgggaattaccagaaaatatacaactggctcatgatatgttatcatttgagttctaaaatcttattgtccgctccgatttcctttttgttaaatgcttgctgaaaggcaagagtgaatgtgaataaaaaaggacttaaaatttccgttaatccactgtttttattacatttgtgggattttagtaatataggggtgaaatttagaataatgccctataaaacaatgcgttaatagtgtaatttaatattataaatggaaaacgtcggagaaaaaattatcaagatcaacatcgaggaggagatgaaatcttcgtacattgactattcaatgtcggtgattgtgtcgcgtgcattgcctgatgttagggacggtttgaaaccggtacagagaagggtattatatggaatgagcgaattgggtgttacgtctggtaaaccattcaaaaagtctgcgagaattgtcggagaagtactcggaaagtaccaccctcatggcgatagttcggtttacatggcgatggtacgtatggctcaaagttggtctttacgttatccgttggttgacggacaaggaaacttcggttccgtggatggtgatagccctgcggcaatgcgttatactgaggctcgtttgatgaaggtaaccgaggatactttgatggatttagataaggataccgtggacatgattccgaacttcgacgaatcattgaaagaacccagcgttctacctaccagaattcctttgttactcgtgaacggagcgtcgggtattgcggttggtatggcgactaatatgcctccccataatctaagtgacacgatagacgctatttgtgcttatatcgatgacccggatatagagatcgatgacttgatccggatcataaaagccccggatttccccacgggaggaacaatttacggctacagcggggtaaaggaagcgtatcacacgggaagaggccgtatcgtaattcgttcgaaaacatccgtggagacaactcctcatggtcgggaaaaactgatcgttcatgaaatcccttatatggtcaacaaggctgaattaatttctcgcattgctgatcttgtgaacgagaaaaaaatagatggtatctctaatatcaatgacgaatccgaccgtagcggtatgcgtattgttattgatttgaaaaaagatgccattgccaatgtcgtactgaatacattattaaaacatacggctcttcaaacttcttttggggtgaacaacatcgcactcgttggaggtagaccccgtttgttgaatttgaaggacttgatccggttattcgtggaacatcgtcatgatgtcattacacggcgtactcaatttgaattaaagcaagcggaagatcgggcccatatcctggaaggtttaatcattgccagtgatcatattgacgaagtgatccggattatccgggcatctaaaactccggaggaagcgaagaataatttgatcgaacgtttctctttgacggaggtacaagctcgtgctatcgttgaaatgagattacgtcaactaacaggtctagagcaagataagctaagagccgagtatgacgacatcatgaaattgatcgagcatttgaaagaaattctagctagtttagaattaagaatgcaaattatcaaagatgagctacttcaggtgaaagctcaatataacgacgagcgtaaaacagacatcgtttatgcctctgaagaatttaacccggaagatttttatgctgatgaagaaatggtgatcactatttctcacatgggatacatcaaacggactccgttatccgaatacaaggttcaaaatcgcgggggggtaggttcgaaaggatctgccacgagagatgaagatttccttgaacacatgattatggccacgatgcataataccatgttattcttcacggaaaaaggtaaatgtttctggctgaaagtatgggagatcccggaaggaaccaaacaatccaaaggcagagctatccagaatttattaaatatcgagccagatgataaggtgaaggcttatatcaacatcctcaatttgaaagatgaagagtatattaataataactatattgtattatgctcgaaacaaggtattgtgaaaaaaacaaccctagaagcctattctcgtccgagagcaaatggtgtaaatgcgattacaattaaagacggggatcaattgctagatgcaaaaatgaccaatggtaaatgtgacattatgatagcggtcaaatccggtaaagctatccgtttcccggaagaaaaagttcgtccgatgggtagaacggcatccggggtaaagggtatatcgctggataacgaaggagacgaggtaatcggtatgatttgcattgaatccggtaaatccgacgtattagttgtatctgaaaatggatatgggaaacgttctagtatcgaggattatcgtatcacgaatagaggtggtaagggagttaagaccatcaatatgacagaaaaaacaggtaacttgatcgccttacttgacgtcacggatgaagacaacttgatgattattaacaaatctggattgacgataagactggatgttagcaccttgagagttatgggacgtaacacacagggtgtgagattaattaatttgagaaatgatgatgctattgcagcagtagcgaaagtatctgcttcaaaagaagagaatcttccggaagaaggacaggagggaacgaaagtagcagagtcgaatgatgaagaataattatttacacatgatatctaattggaacacaaatttttaacgtatgaaaaaactatcttttatcattgcccttctgctttgcgtgaatatatctttcgcgcaaaaggggaaagtaacatcagctgttagctttttcacgcagggaaagctggataaagcgaaagaactgatagatgaagctattggccatgagaattgcgtgaattgggcgaaagcttatatggttcgaggacaaatctatcaagcaatcttcgaaactcaggatgagaattacaaaaaactctccaaagatccgttaagtgtagcttgggactcttatcaaaaagttatccaactagacgataagaataaattcgagaaagatttaaagacccagtatgctaatctggttatagattttacgaatcaaggtgttgtttgttataatcaaggaatgaaaacggatgatacaaaagattttaaagatgctgtaaacaattttaaacgagtattggaaatcaacgaatccccgttaggaacacaaaaagtagacacgaccgttatctataatgctggagttgctgcacacaaagctggcgaccttgatgaagcaattaaattctacaagaaatctttggaattgaattatgaagccggaaagatttacgcaatggtggcaaatatccttctaggacaaagccgtgctgctaatgaggccggagattctgttacaggaaaagcgaaacaagaagaagctgttaatttcttacatgaaggacacaaattgtatccggatgataactacatgctggttgagttgatcaactattacttgatgggtgataccccggctaaagctgaagaattcctggatgctgccattaaacaagagccgaataaagctgaatattacagagctaaaggatctttatacgaaaaattaaatcaaccggaaaaggctgaagccatgtatatcaaaactttggaattgaatccgaatgatttctttgcgcaatataacttgggtaacattcacttgaatcgagttattgaagatcataaagttgtacaggatatcgttgatgcaaaggaatataatgctgcattagataaagttatggagaaatacgaggccgtaattccttattttgaaaaagcgttggaattgaatccaaatgacaagaacacgttgaccacgttgaaagaattatatttccgcttgagaacaaaaaataaagtttatcaagagaaatatgacaagacaatggaagctttgaatagcttgtaaatgtcataagaagaaggagatatataataatccttcttctttttggtattcaattattatcataatataaattatgagactattattattataaaagaaaagaatactttttcttttcatgatcctctaaaagttactatatttgtaagttacaaaattaaaatttcattcatctaagaatattattcatgcaaaataaagttgtaattattacaggagcttcttctggtattggtaaagcgcttgtttatgaatttgcaaaacgtggtgcgaaaattgccatgggtgcccggaatttggatgaattacacaaaatcgaaacagatttgaaatctcgaggggttgatgccctttccgttcaaacagatgttacacgggaagcagattgtaaaaatttgattgaaaaaacggttgagcgatttggtaaaattgatattctcgtaaataatgccggaatatccatgcgtgcgctatttgaagatttggaattggatgttatacgtcgtttaatggacgtgaatttttggggaacggtttattgtaccaaattcgcactaccttatatattaaaagcaaaaggtagtttggttggaatcatttctgttgccggttttttgggacttcccggaagaaccgggtattctgccagtaaatttgccgtgcgcggattcttgaataccttgcgggtcgagaatttaaagaaaggattgcatgttcttgttgccgctcccggattcacggcttccaatatacgaaaaacagctctagtagccgacggacatcagcaaggtgatagcccgcgggctgaaaataaaatgatgagtgcagaacgatgcgctcaaataattgtaaatggtgtcgtgaaacgcaaacgggaaatcgtgatgacgctggttgaaggaaaaatatctgtgtttttaagcaagtggttccctagcctattggataaacttgcttatagtcatatggctaaagagcctgattcgccgttcaaataacgaataaaaagcacatgagaaatcttgttcttgttatttttatatcactattatctataaattctctttttgcccagaaaagagaacatacacgtgttatgcctaaattgtctcgttcttacgtgttaccattaaagcataacaagacggattctctttatcatacacggcctcaattcaaatatatttatttgcgtcataaaaatcaacatattgacgatcctcacgttcgctatgctttggataacttgaaaaaagaaagaatgaaatattatgagttgtacaaagctatcaatacattaagtgattatgcggaaaacgagcacattaaatatatgctcaattacgtgagaaactattttgaaacggtacaggcaaaagaagaagccattcggcagattcaagatcgtataaaaagagacagcatcgatttttataaagaacacccggaagattccatacaatgtgataaactgttgaaccagaatttgaaaacattactctctttcatgaatcaggacgtgaattatcaatggttgaaggaaaaaagtcgtgattctgtacaaattacgttattatcagcctctaaccgtcctaaaaatttatggcttaacactggtaaaacacaatattatcgctttatggccgagaattttattggagacacgatcggtacttgggtaaaagtaatgccaaggggaaatcaactgaaattctttttggatgaaaatgtttatcaatatcaaaaatactcggaacctaaagaaattgttaaagaatgtcttctaaaagctcctgattcaatgtattttgttctatcggaaatgaatatcgggaatatatcccaaaggcgctggatgtactattccgatgtgactttttctttcggccagggttttattagtagtaactgggccagcggtggtgaaaactcgctgtcaattctctctgacttaaagtattttgcaacttataaaaaaagtaacacgacgtgggaaaactctatccgttatcgtctgggagctttaaaaagcggtagtgaagacttgagtaaaaatgaagataagctggaactccaatcgaaactgggaataaaggcttttaaacattggaactacgccacgcagttcgatatgaataccgtgttattcaaaacaaagaataacccaaacaaagaggttgttgcagcctttttgacaccggggaatttcacgttatctttgggtttggactataaacctaagaataacatttccttgtacctgtctcctattgccggacaatgggtatatatgcgtgatacaaaccttgttgcgcccagtcgttatggattggaaacagggaaaaaattcaaaagtgatgccggagcaaaaattgaattaaaaaaccagcatgaacttttcaagtttttgaaaatagacaatcatctgattatattctccagttattatgaacaaccggaaaaattgacattagactggcgattaacgttgaactttaaaatcaattatttcatgcagacctccatctatgccaatgctgtttataaccagaatgattctaaaaagatacaattgaaacaaacattaaacttaggagtatattttagattttaaagcgtatgatgaattttgaatcctgcgagatcaacaatatcgtgatccatgatatcggcaataagtacgaggacgggaaattacgtctctcggaagcttgttttttaccggatgacatggatgttcacaacctacttaaaagttatttccttgcaccttttaaaaaggatgcttattaccgatttgcccctattgaagataatttataccacaatttggtgtataatgcggttaattccatatttgaggataactcgaatttttacgaggcttcgttaaatatcgcgcagcatttgttcgaccaatcgaaccatcctaacataaaagccggagagttatacatggtacatttcaagaattgcgtgctggaagaaggaccttgtgatgctattgggattttcaaatcagaaacgaaagatactttcttgaaaatcatcatgaatgataatagctatcaattggaaagcgagtcgggaattaatatcaagaaattggataaagcctgtttggttttcgatgttgagagtgaaaacggttatcgggtaagtattttggacaagacaaattccacggaggctgtttactggactactgattttttaggattggaacaatgtgaggataattatttccagacatccaattacttgaaactctgtaaagattttgtacaagaggtttataatcaagaaaatgatattccgaaagcggaccaaattgatatgcttaaccgctctatcgattactttaaaaaagcggatactttcaatgaaaatttgttcaaagaggaagttgtctccgatccgcagatcatcgatgcttttgagaatttcaaaaactattacgaggaaaagaacgaacttgcgttaaaagaccaatttgatgtgtccaatagtgcggtaaaagacgaaaaaaaatattttaaacacgtgttgaaattggataagaactttcatgtttatattcacgggcaaaagaagtacatcgagaaaggatatgactcggatcgggatatgaattattataagttgtattttagagaagaaaactaacatttcctgtttatgagtaaaaaaatcaggagctttgttatcatattaggtgtattggttgttgtcgtcggtctctgtgcgggattaggatattattatattctggctcccaacacgagtgtcaaagatgacggtattatctatttgcgggataacagttctatatcacaagtgcttgacacgttgcgacgacacgggtatatcgaaaacgcatacacccccagcgcggttgccaagctaaaacgatttgcttcacccgtgaaatccggaaggtataaaattcggaacgggatgaataataacgagttgatcaacatgtttcgttccggtaaccaatacccggtttacttcacgtttaataatatgcgaacgttggatgaatttgtcgaagaagctcatgaaaaattaggtacttccaaagaagaattactaaccttgctgaaagattccgatgtgcttgccgatttaggatttgattctaccacgatcatggccatgtttattcctaatacctatcagatctattggaatactccggctcttgatttgttaaaacgaatgaaaaaagaatatcatcgtttctggaatgaagatcgaatggcaaaagcatcagtaattggactttccccggaagaagtgatcacgttggcttccattatagaagaagagaccgttaaacctgaagaataccctgtcatcgccggagtttacatcaatcgactgaaccggggaatcaaattggatgcttgcccgacattgaaattcgtgttgggagatttcacgataagtcgtattctagatcgttatttgaagattgattcaccttataatacatatatgtatgccggacttcccccaggaccaatccggatggcttccatcaaagtcattgatagcgtattgaattatcaaaaacatgattatttgtatttctgtgctaaaagtgacttttccgggtatcataatttctcgaaaacactccgtcagcataacatttatgcccgggagtaccatcaagaattgaataaacggaaaatatggaagtaaaaccacactgtaaaataaatggtcaattttaaatctaaaatagtaaaatagtaaatttctttgtaaatccaaaggaaagtagtaactttgcgggcgataaataatttttattacattaatgtattaataaacaatcagttatgttgaatcattacgaaaccgttttcatcacaactcccgttttatctgaaatacaggtaaaggaagcggtagaaaaattcaaagctgttattaccgaaaatggcggtaatatcgagcacgaggaggcttggggtctacgcaagctggcttatccaatccaaaagaaaacgacaggtttttatcacttaatccaatttgaaggagaaggtactctagttgacaaactggaaacttcttacagacgtgacgaaaaagtgattcgtttcttgacgttcagattagacaagtatgcttacgagtatgcattgaaaagaagagctaaaaatcaagtaaaacaagaggagaaataagccatggcacagaacgaaagcgaaattagatatttaacccccccaacggttgaaatcaaaaagaaaaagtactgtcgattcaaaaaagcaaaaatcaaattcatcgactacaaagatccggaatttttaaagaaattcttgaatgaacaaggaaagattcttcctagaagaattaccggaacttctgtgaagtaccaaaagaaagtagcaaccgctgtgaaaagagcaagacatcttgctttgttgccctacttaaccgacttgatgaaataattttaaggaaggaggacacaaatggagataatattattgacagatatagcaaacttaggacataaggatgacatcgttgatgtaaaacaaggttacggacgtaactaccttattcctcaaggttacgctattttagcaacaccttctgcaagaaaagttgttgcggaaaatttaagacaaagagctcacaaagaggctaaactgaaagcagaggcagaagcaattgcagcacaattggctgaagttaaacttactatcggggctaaaaccagttctacgggtaagatcttcggttctgtaaatagcatcatgatttctgaaagtttgaaggagaaaggtttcgatatcgaccggaagaagattatgctgaaagatgtaaaagagattggaacttataccgctcttatcaaacttcacagagaagtgaaagttgatgttgagttcgaagtagtttcagaataattaaaacaagtcattaacaagacttaaacgtatttccaaacatattccaaacgctaaaagcaccccaaaagggtgctttttttgcgaaaagtcttatctttgtatatattttggaagaacatatatgagtaagcagagcattgagttgaaaggcgtacgggttcacaacctgaaaaatatagacctgaatatcaggttaaaccagtttgtcgtgattaccggagtttccggaagcggtaaatcttcattggcttttgatacgttatatgcagaaggacaaagacgttacgtggaaagtttgtcttcctatgcccgtcaatttttggggagattgaacaaaccggaatgtgactacattaaaggaatcccgcctgccgtggcgatcgaacaaaaagtgaatacctcgaacccgcgttcaaccgtggggacatccacggaactttacgattatatcaaactgttgtatgccagaatcggtaaaacctactcccctatttcgggtgaagaagttaagcgtcatagcgtggatgatatttactcgtatattttagaagggcatactgatcagacggttgttatcatggcaaaattggccgggacgacaaatgaaaatcttcctcttttgattagccagggattctcacgaataaaatacggggatgaatttatacgtatttccgacgtgatcgagaaaaatatcccgctggactcttcaaaagagatgtttcttgtgatagaccggattcggataaatgacgagaaagacacggtatcccggataaaagattccgtagagacggctctttacgaaggaaacggaacctgttatattgatattgaaggtgtaacacgttcgttttcaaataaatttgaagcagatggtctcgaattccaaataccgaccataaacacgttcagtttcaattcccctatcggagcttgtccgaaatgtgagggatatgggaaaatactcgggattgacgaagatcttgtgattcctaacaaatcgttgagtgtttacgatgacgctgttatgtgctggcgaggagaaaaaatgagcgagtggaaacattttttcgtacaacacgctcacaagataaattttccggtacataccccctattttgagttgacaaccaaagagaaagaccttctctggaatagtgaaaacggaatatacgcgttttttgaatacttggagtctaaaaagtttaaaatacagaatcgtgtaatgattgcccggtatacgggaaagacgaaatgcccggtgtgtcacggaactcgcttgaaaaaggaagccacgtacgtgaaaataaacaaccggtccattacagaactcgtggatatgccaatttcggaattgaaaatctattttgacaaccttcagttatccgaacacgataagacaattgccgcacgagtacttccggatattcataatcggattaatttcctgctggatgttggtctcggttacttgacactaaatcgtttatcctcttcattatccggtggagagtcacaacgtatcaatttggcaacttccctaggttctgctcttgtcggttctctgtatattttggatgaaccgagtatcgggttgcattcccgggacacggatcgcttgatacaggtacttcatcgccttcgtgatatcggtaataccgtagtggtcgttgagcatgacgaggatattattaaagccgcggatgaaattattgatgttggtcccctagccggaagattgggaggagaaatcgtgtatcaagggacattgcaaaacttgaaaaaagcggatacccttacggctgattatatatatgggaaaaagaacatacccgttccggcaaaaaggagaaaatcaaatcgttatatactcctttccggagctacggaaaacaacctcaagaatattgatgtcaaaattcctttggggataatgacagccgtgaccggagtcagtgggtcgggtaagagtacattgatcaagacgattctggtacctgccttgaaaaaatattatggagactattccgatcgtaccggaagtttcaaccgcttgagtggggacgttgattttattcatggagtagaatttattgatcagaatccgattggtaaatcttcacgttctaacccggttacttacttgaaagcatgggatgatatacgtaaaatatttgctgacgaaaaattatcgaaattaaacgggttcaaaccggcgcatttttctttcaacgtaccgggaggacgttgcgaagaatgtcaaggtgaaggtattatcaaggttgagatgcagttcatggcagatgtctatttggaatgtgaacattgtaaaggaaaacgtttcaaagatgaagttctggaagtaaaatacaaaggactgaatatatacgatattttggaaatgaccgtgaaccaagcagtagaatttttctcttccgggacaagtcatagcgaacgaagcatcattagcaaactgcaaaaattgattgatgtcggtttgggttatatcaaattggggcaagcatccagcacattaagtggtggagaaagtcaacgagtaaagctggcttaccatctcagtcaagaaaatgcagaaccaacccttttcgtgtttgacgaaccgaccactggattgcattttcatgatattcataagttgatggattctctgaatgccctgatcgaacgaggacacacggtattgatcatcgaacacaacatggacgtgatcaaatgcgcggataatattatagacttggggccggaaggaggaagtgaaggcggatatctcgttttcgagggaacaccggaggaattgataaagtgtgaaacctcttataccgggaaatatcttgcagagaaattgcaagagaataaataacgaatatgttcatttggaatatttaaatatgaagaagttaatagatttcactgttacagagaataaaagattaaatcatgacaccattttgctggtgttgcattcggaagaattacctgaaattcagccgggacaattcgtgaatgtacgggtggatcattctccctcaacttttttacgaagaccgatttcagtgcatgacgtggatgaagcgcgcgggttactttatctttttatcaaaatcgtgggatgcggaacgtcaaccttgggcgatttgcaaattggtgataaagtgaacgtgatgttacctcttggcaatcatttttcgatcccggcttccggtagacctttacttatcggtggaggttgcggggtggctcccatgttgcatttatcccggatcatgaaagcacgggggttatcacctgtcgtgttgatcggtacccgaacagataaagatattcttcggaaagaagagtacgaaaaatatgccacggtatactatacaactgaagacggttccttcggggaaaaaggatatgtcacgcaacattccgttttgaaagaaaaatttgatcatatcttttgttgtggcccggaagtgatgatgaaagcggttgcagggtatgcgaatcaaaataatattaattgtgaagtatctttagaaaatacaatggcttgtggtattggagcatgcctctgttgtgtaaccgacacgaaagaaggtcataaatgcgtgtgtacggaaggtcctattttcaatataaaagatttaaaatggcagatttaaatataaatatcaacggcttatccctgaagaatcccgtgttaacagcatccggaaccttcggatacgggactgaatttcaggattttattgatttagaacgtttgggtggatttatcgtgaaaggaacaacgttaaaacatcgtgaaggtaacccttaccctcggatggccgaaactccttccggaatgttgaatgccgtgggattacagaataaaggtgtagactatttcatagagcatatttatccgacgataaaagacataaatagtaatatactggtgaatgtatccggttcaactatcgccgattacgttgccacggcagaaaaaataaacgcgttggatcatatcccggccatcgaattgaatatttcctgtcctaacgtgaaagaaggtggtatggctttcggaacaagttgtgtttcagcttctgaggtggttaaggaagttcgaaaagtctacaagaaacacttgatggtcaaattatctcctaatgttacgagtatacaggaaattgccttggctgtagaaggcgcgggtgcagattctgtatcacttatcaataccttaatggggatggctgttaatgtaaaaactagaaaacctgtattaagtacggttacggggggattaagtggtccttgcgtgaaacccgtggcacttcgtatggtttggcaagttgctaaagtcgtgaaaattcctgtggttggtttgggtggaataagctgtgccaatgacgcgatcgaattcttattggccggggcttctgctatacagattggtaccgcaaattttattgatccaacggtaacaataaaagtgatcgatggtattaacaattacttagatctaaacggtttcaagtctgttaaagaaattatcggcttgatataaaaaatagacaataaaagaaagtgagtcaaaagtccgttcgattttatggatttttgactcattctctttattctttctcatagtcctcaaaactgccatcttcaaaaaataatataatccgttttattttttttgtctgtttcgttaaagacctgacgtatgtcatcggatctcttgtttcttctgattttacatttttatcggacataataggtgtattttgtttttccgtcgattccatgtcaaataacgtaggctcggttactaccgtttttttttcttcttgtataggagaattatccattgatccgtttcctgtgattaaccaagtcagattgagatccggaaatgttttcgcgatattattgataatatcaaaaccgggtttattcctgcctgcaagaatatgggaaattgtagaagcatttactccaatcatagctgcaaatttcgttgcagtcaatccctttttctcgataatttgattcaaacgttcttgcataagcttgttattttgtaactttgaatattacaaatgtaattatttgaatcgagaaatcaaaattacatttgtaattcatgatgattacaaatgtaatcaatgattcgtgatgatatttgtcaatttatattctatggttgtaatatacttgttatcaacatgattcatagtatttatatcttttaattgtgccgcttatgttatgagatatactaattattaataatcagtaacttacacgtattcgttacaggggataatacttatacttaaactttatattatcgtttaataacaactgaatattagtgaattataatttgaatttaaatcaaattaacaacggacatattctgaattcgttattatggttaaatcattattaaatataaacatcatatattatgcgtttatttattggaattcaatactatagattgatttgtttataactgttaatccgtgaagcaccttgaactagcagacacttgtaatgattacatttgtgtattcctctccccttttcgcaacagtacatgtgttacaaatgtaatacatggctttcatcacgacaactttacaaatgtaattttcctctattttgttatattcaacaaaaactctacatttgagaaataaaaaaatatagtcatgaatataccagagaaattaatcgaattaagacgcattatggatcgagaaaatattgcggcttatatcatatccggaacagatcctcacaatagcgaatatcttcccgctccatggcaacagagaaaatggatttccggttttaccgggtcatatggtactgttgtggtcacgaaaaacgaggctggattgtggactgacacccgctatttcattcaagcagagaaagaattggccggttccggcataaaactccataaattgcgtgttcccgatgctgtagattatcctcaatggttggttgaagtgcttgaatctggaactaaagtaggaattgatggcttttgtatgtctgttagtgatgtacgtaacctaaaaaatgcattaagccctaaaaatataactatccagaaacaaatagatttgctgggagaaatgtggtttgatcgtccggctcttcccgtggaaaaaataattcgtttggatacaaaatatgtcggggaatctgccggagaacgaataggtaaaattcgagagtttatacgcgataatcatggtgacgccatgttattcagttgtttggatgaaattgcctggttatataatattcgttgtaacgatattgcttataacccggtagccatttcttacgccattgtagaaaaggataaagctcatttattcatcaaattagacaagatttctcaagaaatagaacaacaattggcagaagatgggatcgagttacatgattaccatcatttgttcctctttctggatgaacagaataaagaaaacacgtatttcgttgatactaatacttgcaactatgctgtttttaatcatctggcgaaaaaattcgaggtacgtgaaatcgaatcacctattcccttactgaaggctgtaaaaa

SEQ ID NO: 10845 - DNA, 859 bp, Unknown
  gut microbiota DNA sequence
actggaagcagcagaacaattaactcggttccgctctcaggataaagaatacgtgtcggatagttttgggtgtatttctgcctatggtcctaatgcagccctaccacattattccgcaaccccggaacaacaatcggaaatacatcccaaaggattatatctcgtggattccggtgctcaatatatgcacggcacgacggacataacccgtacgatgccactgggagaactgacagaattggaaaaagaggattacacgcttgttttaaagggtatgattgatcttagtatgctatattttccgaaaggatcgaaaggatgtaatattgatatagttgctaggttgccattatatatgaaccttaggaattttggacatggaaccggacatggtgtaggatattttctcaatgtacacgaggggccgcaatctattcgtccggatttaaagaatcaagaaatgttgccgggtatggtaacctctaacgaaccgggattgtaccgggaaggtttacatggaatccgtcacgagaacttgatcgtgtgccaacccaaagcggtgaatgaatttggagaattctatcaatttgaaacaataactctttgttatttcgatacttccgccctattaattcaacttttgaatcaaaatgaaatcgattggttaaatgcttacaacgaacgggtttatcaagaagtatctccttatcttgaagaacaggaaagggtttggttgcgaaataagacaaaagcaatttgataagaattaagcgagagtttgttccgagataagtcaccataaacgaattatagccgtttcccctacgtttgaaacacgtgtgatgaaacggctatatat

SEQ ID NO: 10846 - DNA, 1360 bp, Unknown
  gut microbiota DNA sequence
gttacttctgtcttgccattatcatcaatccaataacggactacctccattgagtaaaaatcggctttcttgcccttgcgataatgagccgtcaaaaggaacaccctctgcacctgtaagccgtcttgggttgtcagtatggagtaataggatttgtctttatacttacgctgtaaggtgttgcgtatctccaactttgtatcgcagcgagggcaacggcaggtcttttctctggtctcgctccattggtgtccgcaatccatacaggtggtcataccgcttttggtacggaacgcataatgatttaagcaatggcgaaatgcccataactcttgcttctcggtcagtggcagtaaccgctcattggcggttactaccttgtgctgtaatctcgtcttggctctcatagtcctaaatcaaatagtgatggttgggtaacttcctgtttcgttgctttctgggttggcttgggtctgctgttacgttgttgtatcttccgcagttcctcgtcttgataggctttgagtgccttttccctcgcttcggcttgctcttcgggagtaagttctaccctatgattgactatcacaccgcagttgacggctttacccacctctatattgtcttcatcataatagtgggtacagagagaataaacctcattgtcggtcattccacaaccgccctctttgcatatagccattgcttggttgagtacaaatgtgatgcaatcgtccaaattcttgttctctttggcatacgacacggcaaagagttcatccgtcttggctctctcgtccaaatatgcctttatggtctgcttgaattgttctgttcctttcatatcgtctgttattttgcttgataataaatacttggctcacttgaaacattgtagatgtatgctccgcaccttaccaacaatgcctgtttaccataatacaatcgcttcattcctttgacactgcctgtgttatggaagttgggaaatcggctgatattacagcgttctccctgctctttggtcattcttcgtgttctcatagcattagaaatgatagtcaatcactccaccgatatacagcaatgttcctggctctaattggcttaccactcgcagaaactcgtaagattgttcggcagctccgttgatacactgctcgtccatatagaactgataggcggtatcaagcggatttttgaggtacttttcaagttggtacacctcgccaatccaaagagtgcagttttctgtggtaacggctttcgccttttcttgcaaggttgccacaaattcctctttccatttgtccgcaccgccattgtaacagattgtatcatctgaaacaagctcaaacat

SEQ ID NO: 10847 - DNA, 1830 bp, Unknown
  gut microbiota DNA sequence
gatcaactctatcagttgaaataaaatataacttttccccacccgacgttgcccggtcatcactttgatcaaagacgtgcccatgaatggctctattttcttcaaataatgctctctatattttatattctccattttcattataattaaaactttccccaaaaatacgaaaagttttcattatactgaaaactttcaacgaataaagcaaaagttttcatcatactgaaaactcctccaacctctctaacacaagttgggtaaacacctggtacccatctctccccctgtgcaagggggagttggagggggtagtaccccattataaccccaaaggggcagccgaagccacccctttcccttatcgtccggaacgtttccgttcccatcgattcttacaccaagccaccacgaccgagcttatcactcctcccacgatactcaatacccccgtcactaaatcatctgccacctgcgagagaaaagcattaaatcctagcgtgaaaaatattccggtaaaaaaatacacgctcatcataccgtcaaataacgactatccgatgcagcactcccgttcctcaaggttgcgaaacaatacaccttcacgttagcctcgtcccagtcctcgggaagagcataactcgtgttaccattttctccccgatctctcaacggaacgatcttggcacgattcaacacggtttccagcaacacgccatacactttatcatccgccaacgcgtacccctcctcttcttcctgcatctcctgctcgaaagaatacatcttactctccgaggcgtacgtcacggtcactttaggcgtgtacaacaacccctcagccatttttaaccgatcaaacacgatggttgccacgtgtttctcgtccacctccacggcagcctgattcactttcacgaaagcattcgaagtcgtaccatttcctattcccacgaaacctttccgaatcaccggaatcaatctccgagacaactgaaccaacaccttcatcttcgcccgttggtcaagcatctccggagtcgggttatcccttcttgaaaagatcttcgccttcgcgatattctgcttgttcgtgtaacacatcgtcacgttaccaacggacttctttaccttgcctaacaaataagaattaaattttgccataacattaaaatttaaaaatgaataaatcagaaaatttaaaatgatctcacactccccacgtgggccctacacgaaaaatgcaagcaatttatttcaatttagaatgtagaatttaaaatttagaatgaaaactcagcccatgcggccggaatcaaaaatctaaaatttaaaatcaataatactgaatccactctgctaccctcaacgccggtcccggatccaccttccttggtgtcacgtccgaatgccccacgatatccccgatcggataagtatccaccagcaaaccacacacctcgttcaacacccgcatctgcacgtccgtgtaatcatgccagtacgtcggcacctcacccgaatcctccgtgtacacctctttcactggtacttctttcccacattccgccacaaactttcccccttccagtcgcaactgccctaagttatccagttcgatcccaatcgaataatgattcagttcgttccttcccctgtaactactcttccccgcgtgccacgcctcgatattaaacggcaccagttgtatcacctgcccgtcccgtccgatcaccacgtgagccgaagccttcacatccggcctcaccaagaattttgccgaagattcggcactcgtacctgccgtgtaatgtaaaataatcatatccg

SEQ ID NO: 10848 - DNA, 24304 bp, Unknown
  gut microbiota DNA sequence
ttttaataatatataccttcaacaaacgatcaattattgaaatacaaatttacattattttttgacacttgtaaaaagatgctattttttttaatggctaattattaatacgttcgaaattttttcttaacaataagaaagtaatcctctgaagatcattaattgatcgtttatttatatttcacaccacttgactactacattcttattctccaaaagataaaacaatttctcagtactaatatctattaatactcttcgtatatatatggaaaaacacactaaaatgtttcaaattcactcttttattgacgtaaatcttctattgttacatttgttggtaaaaatttattggcattccctccattcatgaatatatcgcgcacgatggtcgaactgataaaagtatgttcgggagaagttaaaaggaaaacggtttccacggaagaatccatcgccttgtttgcctgaccaacagcacgttcgtactcgaaatcagcagcagtacgtaaacctcgaataatgaaattagcacccatttgctcgcaaaaatctacagtcaaaccagaataactcatgacaataacattatctacatcttcgaaaactttacgaatgatggcaatccgggtatccacgtccagaaactcttttttaaccgcattaatccccacggcaataacgattttatcaaacatttttaatccacgtttcacgatttcttcgtgtccgattgtgaacggatcaaaagatcccgggaatattgcgattctttccatgacgtacttattaaatttcaccagagttacggataaaacatccgatctcaagttacaaattaaaatcatatttttgaagattcaaaaaatttgttagtttttctcagatatttcaggtatattattaggaaaattattttcttttgaatagatttgatccagaatttaaaagaacacataacaattaattcttataaaacatggcacgaaaattactaattagagatctaacacttagagatggtcaacaatcttcatttgcgacccgaatgaaccaaaatcaagtggaccgcgtattacctttttacaaggatgccaagttctacgcaatggaagtatggggaggagctgttcccgactccgtaatgcgttatttgaacgaaaatccatgggatcgtttggaaaaaattaaagccgttatcggtgatgtgtccaaattgaccgccctctccagaggtcgtaacttattcggttacgctccttacacagatgaaattatcgaaggtttctgtaaaaacgctatcgaatcaggtttaggaatcatgcgtattttcgatgccttgaacgatgtgaacaacgtgaaatctaccatcaaatacgtgaaaaaatatggtggtatggcagattgcgctgtttgctacacgattgacccgaaatatccgaaattaagtttgatagacaagttgaaagggaaaaagaatcccgaacccgtgttcacaaacgaatatttcttgaataaggcaaaagaaatggaagctctcggagctgacatgatcacgatcaaggatatgagtggtttgattaacccggctcgtatttccgagatgatgcagttattcaagagcaatttgaagattccggtagacttccatactcactgtaccccaggctatgggttaggtgccgtcctttccgctattgtacacggagttgacatcgttgataccaatatctggaatttcgcaggcggtcctgctgctccggctattgaactgatttacattttctgtaagaaattaggtatcgaattggatgtaaacatggaagctgttgccaagatcaacaaagagttgtacacgattcgtaaagaattggaggcatacgatgctgttaaacaattcccaaatccgttcaacccgcttacagatacacttccggctaacattgacaaattattcgatgatgctatcgctgctgccaagagtaacaacgaagaggccttgttgaaagcttgccatgctatcgaagcttatttcaacttcccgaaaccgaacgaactcgtgaagaaagccgaggttcccggtggtatgtacaccaatatggtagcccaattaaaacaattgaactccatggagattctggaagatgccatgaaattaattccgactgttcgtttagctgccggtcttcctcctttggtaactcctaccagccaaattgtaggcgctcaagcagtgaactgtgccttggacatcaagaatggtaaaccgatgtattctaacgtatctaatcaattcgtggctttggtgaagggtgaatatggaaagactccggtgcctgttgatccagaattccgtctgaaaattgccggtacccgtgaagagatcccgtatgatacatcaaaatatcaaatgcaagaaaatcctgttttgaccgaattcggtggggtaaaattggcagagaacgagaaagaagtcctcttgatggaacttttccccgctgtcgccaaaaacttcttgacaaaacagaaagaagctcgttacatggcaactcataaagcgactcaggcacaacaatccgttgaagttcaaaaagaagaaccgattaccgggaaagtagttgaagctccaatgccgggtaacatcttcaagatccttgttaaaccgggtgatgttgtaagtaaaggacaaaacgtacttgtattggaagccatgaagatggaaaacaacattacaagtgattacgccggaaaagtaaaacgtatcctgactcaagaaggaaaatccgttactgctggggctaaattgatcgagatcgaaatctgattggattagcaatataataaaggaggagtggtaaaagtcaatgtacttttaccactttttttattctaacaacataccataaaaatttactcctgccatcatgacaggagtaatatattaaaattcaaaccattttttctctcggatcaacaaggattaatatttaggaaaaccaatctcttccccattctctgcaatatactcgtccaacgtctcacaatcggtatcctcatcttcttcatactccatagagagattgtttacccgggcaaactgatggcagctcttgaaatctgcatatcgttcctcaatctcttcttcaaataacgcaactcgctcggtctccggcatcccctccaattcctcttcatgttcctgcaaaatacccagaataaattctgccgcccaactacctaattcacgttccaacacccaatcagatgaatgttcatccagtatacggtatatttcatgtaaatagggagtattcccccaatcttcatatagctgaatcaggtcgtcatcttccccatattcttcttttagcctttctaacacctcattattcatgtctcttgatttattgtattcgacggctaaattaagaaaaaatattaacattacatcggccaggcagaatttggttcaacgtaatctcaattcacatatacgactctcgataccaaagaattgaatttgtaaaaaaaggctgaaaatttcacatgaagtatagtaaacaattaaaaacaagtacttcaataccacacttacaaattctagttaaaagccgaagaacgtatgaaatatttctgtaactttgagtgcggtataattctccacgagaaagccgatgtgcaatcttttattagtttagttttaaacacacataaatttgaatatcatgatgaagaatttattactcattctttgcttttttcccatgttggcattagcccaggaagaagatcaaagcaaatacatggtcggagccgttccggaagtaaacggaaaagtagttttctcacaggaaatcaacgccccaaatctttctaaagatcaaatttttgatgccattttggcatgggcgaatacccgtttcaagacagataaaggaaactggggaatggttgcctattcgaacaaggaagagggacaaattgcttgctatggaaacgaatacattgttttcgctgataagactttttctctggatcgggcaaaaataaactaccggatgaattttgtttgcactcccggtaaatgcaacgtggaagtaaccaacatcacctacctttacccggaagacagccgggaacgtttagctgccgaagaatggattacggacaaacaggcgatgaataaagatcaaactaaactgatcaaccggattgcaaaattcagaatcaaaactattgatctggttgaaagtttgaacgaaggggcgcaaaaaagcttaggcacacaaaatgcccctgtagccacaacgacaaccacaacgccccaacaagttgctcccgtgcaaaccgtagccaccatatctgccgccccgggagatgctttacaaggctacaaacgtatcgctcccgacaagattccgggaaatattattaaaatgttatccgaggactggatgttaatcacggctgggaatgaccagcagtttaacccgatgacggcaagctggggaggtctcggtaacctgtacaacaaaccggtgacgttctgttttatcaatcccgcacgctacacttatgacatcatggataaaggggatacctatacattaactttttacacggaaacttaccgggaagctctgaattattgcgggcataattccggtaaagacaaggataaggtaaaagaggccgggttaaccccgatcaccactccttccggtagcaaggcattctcggaagcctggatgattatcgagtgccgcaaaatggtttctcaaaccatcaacattgacggtatttctgacccggaactaagaaaacaatgggccggcaaagctatgcacaaaatgtttatcggagagattttgaatgtatgggtaaaataatccataattgaattaccctactcttataatagctttgaaaaatcacgatagctaatctatcgtgattttcttttttaaatctttcttacctttgatcactttcacaaaatcaaacgttatgaacagggttaattattgtatccgtgtagttttattgctagttaccgttttgcttttcaatcggcttaatgcacaagaaatacgtttaaaggttatcaatcccaaaggcgagcctcaatttggagtatacgtggtcaatcctagaaatcattatttactgactagcaccgatattgaaggggaatgtgttattaagacctacaaactacaccctagtgattcgttacaattccaaggcatggggtatcaaaccgtaaaatacagtgtgaatgatttacttcgcatgaaacgccttgtacttgttcccctgacatatgaactggaagagacgaatgtggaaaaagggatctcaatgaaagaacttttaaaaagagcctcctcaaaactcaagaaacaggctcccggcctcgaaccgatatgcaaatattttggtaaagccttatacgaaaaaattaccgaatgtgaagagaatgtagtagaataccgtcgggagtacggttattatttctcttcaggtgatgttaaatcacgaaacacgtgggatacggattttcgatcttacatcgtcccgttccacgttgccagaagttacaatctcacgaacgatggaaaagacacgcttaaacccacattcataacagacgaagaaacccgttttgatgtcggaactcgtaaaatattcacgtttatgcgaagtattcaattattcggtcctttattcagcgacattcgcaattacgatatttatcccctagaatcagaaaattctgactaccgatttgccttcaagaccaaaagtagcgcttatcctcaacgaacacgcctcacgtgtaaaggtactttcaccattgacgggaaccatcatgaattgaagtccatggattttgattacgtggattaccaactactccgacaagtccttttatccaaacaccgtaaggtaaattccccattttcaacaaaggccagtctttcttttgcttacactccgaccaaagaatattacattcgctcctgcacgcaagagaccacttggaaagatgatcttggagaaaatttcattgtactggaacaaccctcccgaagttctccttctgccaatcatttagtcgaaaaagaagctttctactgtttcaattaccagcaggttccagccagatggcagactgcccgcatattatccaaaattcacctggcacaacgttattccatgggtacttacgagccacaagttttccgagaacttacaccattactggataaccggaaagccatacaggatttgaatcgatacatggatatcgaacaacaatttgaattgcattcaaatcgtccctactacgaacagtatcttatcatcggaattaaaagtaacaagattccaagagtggatattcacgggaaattgacctcaaaccgggaagatttgttctccttgataaaaaaattcgaacaagaaactgaatagtttattccggaatttcaatcttttcgcctaaatgacgaggttgtttgttgataaaaaaatcgacaaatacttttacccgggccaacaattcccgcatttgcgtctttagtccctcgtaaacgctcacgtctttagcattatacccgatagcatgtatcccgtagtgacgagccagatagatcgctctttcattgtgaaattgctgagaaataaccgtcacgctatcctgtccgaaaatctctttcgaacgtaccatagaatcgagcgttcgcaatccggcaaaatccagcaccaatgattctttcgggatgcctctattcaccaaagaatctttcatggcctgaggttcattataattatggcggcggttatctccactgatcaatatatacttaattttacctgactcgaacaactcctctgcggcatcaatacgattcttgaaataaggattggttttcccgcctttcacccggggagaagtacccaacaacaaaccaactttattataaggtataaatgtcgtatctccaaaaacttttccttcactgtatttggaaatccgataattacaaaataatattcccagacaacacacgaatacaggcaacatgataccataaaagaacacacgcctcaccactcgccaccatttaggagtttccatccgggaagggctgcctgttgaaatatgatcctgccgttttttcaataccatttttaccttctttcctacaaagatacggattcaagtgatatttattacctttacttgtcacaataaaaataacttttatgctaaccctttctcaactctctcaatttcttaaagataaccgaacaaattttgagatcatacaacatacccatcccatcctttctggacaaccccttaaaatcaacccgcaagatatagttcgtctcgtccgaattactattctcccggatgaatgtttcgtgtaaataaaccgatccggtttccctcggtatctaaaaagtaagcaaaataatcttttgatccctcacaagtttcacaaggttccgtgacaatctttcccccggccttcctcaccatggctaaagattcatccatattttccgtataaaatgaaatcgtaatactgttagaggttggcaggtatccttttaaactaaaaatacagccgatcggttgctgatcaccggaagaaataaaagccattttctcttccccgtattcgacaatctccagtttctctccgaaaaccgtcccgtaaaactgaactgccctctccatgttgatagcaggaatctcaaaaaaagctacgaatgttttcatgttgtatttattttattgattaacacaacaaaagtacttccttatcacccctcaattattggaaaaaagagacattctctgttccgataaaacttttagttccttctatacacctagaaaccattcaatactatcggcatcctcggaaaaacacattaattgaaaaagagttgacgaagtatgaccggttaaagctttgatttcattcgccagatgagccgcatcgtaatatccagtatggaaagccaatgttgccaaatcaacctccggcattcgatttcgaaattccacggcatacagaaaacgtatcacccgtaagtattgtttcggcattaatcccacgtaagtcgaaaacacccgttcaaattgctttttactcaaacaagcataaccggccagttgttccacgttaaacattccccgacactgtaataaacgagtcatgaccatccgcatccgattattctcaaattcattccttcgctgcaaacgacctaacaaaaatgtctccaaaccatccacccgttcgtcaaaactggcaagattcatcatttgttcttccatatctttcccttctcttcccaacacctcttccagagaaacgtatcggtttatcagctcattcagcggtaaatgcaaaatgtcccgtacccccacaggggtaaacacgaccgacatcagccccaccctacccgtgggtaaaatatctataaattcggttcgctgcccataaagtgtcgcccgaggatgagattcttctccatcggacagaataagtttgtacgaatcccgataataaaaaacgatttccatgaatccctgcggagtaagacgatgcggctcgcacgatggacacacatcctcaagatccaacatccaataatactggacatatccggataattcccgacaaggcggtctgtattggtatttactcattcgaggaggaataacacatgaaccagtgcgtcactttttcactgtaagtctttgaaatcggaatatcgggaactttctcaactccaaattccaaatagactccatctttctcccgacggattactttaacatgctcaaaattaaccatataggaacgatggcacctcaagacattcgtcccttcaaatgtctcttccattgccttcaaagtattacgtaacatgaattttgtcaccacgcctttattcaaataccaaatctgcacgtaattatccgcagactcgatataaagcaagttcgaatgtttaattgataaacgtaattcacctttctcatcccgaaaagcaataacactcgcccccccagtatctcccttcatctcttcaagcatctgtaacttctgctccttatcccgccaagaaaaataaagcattaaaatcgcataaggcaataaaaggattaatgacgtgttttctgaggcctcccaaaaagtttccatcacatccctctccggccgtaaaaaacaagaataaaccgtgtaaaaagtagacagaaagaaaatttccaacacgatccagataccatactctatataattaagtgtatgtttcctcgtgtaaaaatacataatcacacgactgatcgccacggcaagtactccggtaagaatgaccagactcgaaaaaatgaaaaacttaaattccgataccggataccacgtcagagaactgaaaggtttgtagatattgataaaaatcagatcaaaaaaagcagtgaataataccaggcgtatcaaatttgatttctcgtaatagtaagctggtatttttcgggtcaacacgttcatctctctctaatttttataaatttcaaacaaagatacatttttctcgtaaaaaatttcacccctaaagagcaaatttcatccctaaatatgagattttgtccctttaggttcaggtgcacaccattaattttgaaaacaaagaattgtggtgtttgtttgtattaaaattaatcgcaagagctatggaaatctcaactagaacaaaacagttaaaggctattttttcttatgacaagaaagttatcctagaagatcaaccactggaaattcgtccttatcattttatccagaacatgggagtaaatgaaatagaacaatttcagcaattgctcccgacaaatgaattttgttctatcccggacaataacattcaggagaacaaaagtttttcgtataccatattcacgcctaaaggatcacgaaagacgaaccaggcaatcctgttattacacgggctgaacgaacgtaactgggacaaatatctcacctgggcagaatatttatccttagccacgggtaaagcggttattttgtttccgatagctttccacatgaaccgtactcccggtaactggtataatccaagagcccttatgccttgggtagctcgtcgtaagcaagaagtggaacatctgaataattccacgtttgtcaacgtggcattaagttatcgtctatcagacacccctttgcgtttttacatatccggaaaagagtccatgttcaatttatggcagttattccgggaaataaaaaccggacaacacctcctgtttgaaaaagattcatccataaacattttcgcctattccatcggagcgttcctatcacagattctgatgcttgccaacccggaacatctattggatgatagtaaactattcctcttctgtggaggctccatattcagccaaatggacggaagtacccgggatatcatggatcaagaggcgtatagaagagttaagaattattttctgaatgatttcctgacaaaaaatgatgaacatcaaacgctccccgttttgtatgaagaggatttcatggaaaaagcgtttaaagcgatgatacgtcccgaggtaatgaagaattaccgggaatcatttttcgaacgaattcaagaccgtctacggattgtcacgcttaaaaaggatacggtaatgccaacacaaggagttattgaggcactaggccccaaatgtgttgatactatattggaagaattagattttccgtacgagtattctcatcaaaatccatttcccaccaacacgggagccacacctgaaatgctttatcaatcttttaccggaatatttaataaggtagcgaatttcctgtaacagacaaagagatttcacacgaacacttcccttaaaacggaaacaataaaggcaacactaaaaccatcacgatacccataatcacctgcaaaggtaaaccaaccttcacgtaatccataaatgtgtacttcccagcagacatcaccagtgcattaggcggtgtcgaaaaaggagatgcaaaacacatacttgctgctactgtcacggcaaacaggaatggataaggacttactccaatatctagtgcagccttcaaggctatcggagctaaaaggactgctgtcgctgtattactgataaacatggttaacaacgaagttgtaaagtaaatccccgccaacaggataataggcccgaaatcacccaaataactgaccaaaccggatgaaatcatggctgatgcccccgttttctccaatgctaacgacatcggcaacatggctgcaatcaacacgatactttcccaattaatcgttttgtaggcatcttccacattacgtaaacatccggtcaacaccatcaataaagcagctacaatcacggcagccacgggagccacgggaatgaaatcgaaaaccatcgcaataatcattagaatcataatcgttgccgcaatcggggctttgtggtccaatgtcacttttgcagcctctgccaatggttgaccgacaacaacccattccgattgcacttcattcaaacgggcaatatctttccacgttccctgtaccaacaaagcatcccccgaatgcatcttttcatctttcaaatcctgtaaaagatattttcctccccgctggattcctaatatgttaatgttatatttttcccgaaaaccggagtcttttacagctcgattaatcaattgagaattcggcatcaataaaacctcggcaataccgatctctccgaacaccatatcatggggaactttttcttccgaaacttctgccgtatgtgtatccaataaatctaaattattatctttcgtcaataattcgatttgagcaaaagctcccaaaacatacaacacgtcacctatttgcaaggaagtattcgggcctgccagttcctgatcaatcgtcttcataaaaggattctgcgactttgattctcgccggatttccaaaatcgtaacattatattccccggttatattcaattcggccaacgtctttcctcgaaatgtagagtccgatttcacacctacccgaaacagattctgagcaatttggtattcataggctaaatcttttaatgatttcttccgtgatttattctccgtcttcttctcgcccttcttaaccagaaacatccgacttaaaggtatcaacacaacaattccaatcaatacgcaaataattccaaccggggtaaacgaaaaaaatgacaatccctcaaatcctccctctaacaaagcattttgaatcacaaggttaggcggagtacctatcagcgtcgccattcctcccatgctactcgcaaacgctaaaggcatcaaaaaacggctaggactaacattcgcactaaccgccatactgaccacaatcggtaacatcagagccacggttcccgtgttactcacaaatgcaccgatggcagaagtaaccaacatgattaaaataaaaagcttcaactcgctcttacctgccaattgaagtattttactactgatcattttagccaatccggtttgaaatatggccccccccaccacgaacaaccccaccatcataatcacgatggaattagaaaaacctgaaagcgcctcctccggggttaatataccacatagtatcaaaagtaccaacgcacaaagcgcaaccacatcagaccgaatttttccatttacaaaaaagaaagcagataatgctaaaataatcagtgttataaccataaattaaactattatatcataaattactctatcgacccacccacaatgtccatcaactcggccgtaatattctgttgtctcaacttattgtattccaattgcaagtttttcaacaacttaatagcattatcatttgccatttgcatagacaagatgcgagaggcctgttcagaagtctgattttccagtaggtaccgatacatcgtggaatggataaccaacggataaatcgtctccaatatctcttcgcaatccggctcgtaaatatatactttatttcgttctttatctgaaagagctttcgtttcctgaggtacccacggaagtaactgctcccgactgatgatctgtgttcccatactcttataatgagcataaataacttcgacccgatccacatccttctccaaaaaacgatgaattaattcatctgccaatgccgttgctccttctgcatattgttttttttcgaaaagatcggggatcggcataacctccacccccctcgttcgttttatatcgttcacgagctttctccccacgggataaacgaaaacaggcgatttaaccttaccatcatactcttttaatgtctccaataatttcttgtataatagcaggttaaaagcgccacataaaccttcattggcagcaaaaataacaattgcgacccgttgaaccggacgatcctgacttaacggagactgataatcattaatttcacttgcaatatgatccagtatattttgcaactgttccatgtaaggacgggcatgattcaatgcattctcagactttctcaaccgggcagaagaaatcatcttcatggctccggttatcttttgagaagaatgtaccgaatttatccttcctttcaattcacgtgttgatgccataatttttactttatgaactaattaaaagtctgccccacttccgtggctacttcttctaataatttagatacattctcatccagccccccctcccgcaacggctctaaaatctctttttggtatttggatcgcaatatctccagaaacatcttctcaaactcggctacatgtttcaaatccacgttacgcaacaacccttgtgtaccacaataaatcacggcaatctcttcctccacgggcatcggcgcatgctggggctgaatcaataactgagcgttcttacgtcctttatcgatcaccatttccgtcactgaatccatgtctcctccaaacttagagaaagcctccaattcccggtactgggcttggtcaatcttcaatgttccggcaatcttcttcatggcttttacttgagcattaccaccgacacgagatacagaaatacctacgttaattgcgggacgtaccccttcgttaaacaatccggcctcaaggaaaatctgcccgtccgtgatagaaataacattggtcggaatatacgccgacacgtctcctgcctgagtctcgataatcggcaatgcggttaatgaaccacctcctttagcagtgggtctcaacacatccggcagatcattcatcgtctgtgccatctcatcactggatataattcgtgctgcccgttccaacaaacgagaatgtaaatagaatatatctcccggataagcctcacgcccggaaggacgacgcaaaatcaaagaaatctcacgataagcgacagcctgtttggaaagatcgtcatacacgactaatgcgtgacgaccactgtcccgaaaatactccccaatcgtcgctcccgcaaagggtgcataataacgcatagctgccgagtcggatgcgtttgccgcaacaacgaccgtgtactgcatcgcacctctctcctgcaacgtgttcaccaacatggctacagatgatgctttctgaccaatagccacgtaaatacaataaatcggatcaccgttatcgaaatttcttttctggttcaaaatcgtatccacggcaatagatgtctttccggtctgacggtctccgatgatcagctcccgctgtccccgtccgatcggtaccatggaatcaatcgccttgatccctgtctgtaacggttctttcaccggttgacgatagattacccccggagccttacgttccaacggtaactgtattaattccccttcaatgggtccggctccgtcgataggttcacccagcgtgttgacaacccgtccaagcaatccctcacccaccttcacggaggcaatacttcccgtacgtttcaccgtgtaattttccttcacccgatcaccggcattcatcagaatcactcccacattatcttcctccaagttcattgcaactccacgaaccccgttctcaaattccagcaactcgttagcctgcacattatccaacccgaacacgtgggccaccccgtcaccaacctccatcacggttcccacctcttcgaaagccatcttcgtatcgacctccttgagttgcatttccaaaatatctgatatttcattcgctttcaacataaccctaaataattttagatttaatgattttagattttaaattcaggcctcacaaggctaacacgttcttcttgtcatcctcccgaagaattcatttataatctaaaaatccaaactggagactcatctccttcagctctttcatcagtgaggcatctagttgccgggatccaatctgtaatataaaacctccgataatcgagggatcaaccttatggacaaactctattgtcttatcagtatgacgccgcacgaactctttgatcttatccatcgtctcgtccgacaactccatcgccgtgatgatcttcacccggataatcccgtttgctgcccggtaaatcttctgaaacatcaggcaaattgacctgacatacatttcccggtggtttcttatcaacaaacgaatacccttgatgtatgcctctcccggttctatcccgatagccgtggagagcagcatttccttatcctcgggtgataacaacggatttaacaaagctttctgcaagtcgggatgagcgatataatttttctcgaataatttcatcttctcatacactgcatcagcagcatttaattcctgcgcgtatcgaaacacggcctttgcataccttcgagcaatcaatccttcgtccatactctcctcctttactctttattctcaagctcgttcaacaacttaccgatcagttccatctggttcttatcggtagccaagtccttacgcatcactttctctgcaacttgcaaagacaaagatgccacttgtttacgcaattgtaattctgcttcccgttttgcctgttctatcgacaagttggcagcttccctcacttgttttgcctcgttttctgccgcttttcgggcttccgctatcatctcccgtttcagccgttctgtctgctgcaatacctctaattgttgcttacgggcttccgtcaacaaatctttggcatcctcttgcgccttttcgcgatctcttttagcctcccgggcatactctacgcctttatcaataaaatcagcccgctcgtccatcatccggacaatagccggccaggcgtattttgccagaatgccgaaaagaatcaaaaagacaaccagcatccaaaacactaatccgaattccggtgtaaataatgacatagcttctttttatacaaacaatgctaataaacaaacgataattgcaaaaagagcaaccccctcgatcaaagccgcaatcacgatcatattggttctgatattgttagtctcttccggctgacgggcaatagcatccatcgccgaagaaccgatcttaccgataccaatacctgcagcaatagctgccaaaccagctccaacacatgcacctatcttagccagacttaacccggctgctgctacttccaataaaatcaaactttccataaccttatttattaattttagatttaatgattttagattttaactttcctcactctcgccaacccgataaagattgttgaaagcaacataaacacgtatgcttgaataaacccgatcaacacgtgaatcaagttcataaacacggcaaacaatactgaaaatacagttgtaacacccaataccacctgtcccatcacactaaataaaaagattaacgaaatcagcaccaacacaatcaagtgtcctcccaacatattagcgaaaagacgaatcatcaaggccaccggtttcgtgaacactccgaatatctcgataacaggcaataagggtaccggacatttcaatcccataggtacatccggccaaaatatctctttccagtactctttcgtcccggaaacattaatcaccacgaaggtacacaatgccaagactagcgtaattgacatatttcccatcacgttcgccccacctgggaatacagctatcaaccccatcatattggatacgaatataaaaaagaacaatgtcaacagatagggtgcatatcgcttagattcctttcctagcacactgacaataacttctttatataacatttcgacgatcatttccagaccacccattcccttacgcggggccttaaactttttccttttataaaatcgaactaacgagaacacgatcaacatcgtgatcagcccgctaatcatcacggaaaaagcgtttttggtgatagaaaaatcacaaggacgatattcgtctccggtagcatctacccccacgattttcccttcataagctccttccccggcaatatgaaatcctttatatgttttcccgtctgctaaacgtgaagaactgaaaaaataccattcccctccattatcccgaacaatcacgggcagaggtatggttacctttccgataatcgtccatccatactcgtctcccaaatgctcgaaaatagtccttttagggtcaaaagccttatcctcccattcctcctgctgcatcacggaatccacccgcacggcaagcttgtcctcgacctgttgcgattcttccccgctaacacccgttgcggccagtccaaccgcacccgcagtcagtgttccgaccaatagaataagtgtcaacaatatatatttcaaatcattcttcataggtgcatcaatttatacaaaccaccacattattgtcccgaacttccacaacacccccgcaaatctgtacactcttttcctcttcaacccctttatagataatttctcccggagtcaatgtagatactaacggcgcatgattttccaacacggtaaactgccccaccgtaccaggcaatttcaccatttgcacctcacctttataaatcactttctccggagatactattcttaaaatcatgaccttaattattttaaattttagattctctaattccttttcttcgcttgttcaatcatctctttccctttcttgatcacatcatcaatggttccggcattcataaatgcctgctccggatattcatccatatctccatcgagaatcattttgaaacctcgaatcgtttcttccaatggaaccataaccccaggaattccggtgaactgttcagccacgtggaaaggttgcgataagaaacgttgcgcccgacgagcccgtgctaccacgattttatccgaatcagataattcatcaacacccaaaattgcaataatatcctgcaactcgttgtaatgttgtaataattcgaccactctttgcgcggtttgataatgttcttctccaacaattgccggatcaagaatacgcgaagaagattccaatggatctaccgccggataaatacccaattcggtgatcttacgactcaacaccgtcgtggcatccaagaaactgaacgttgtggccggtgcggggtctgtcaagtcatctgccggaacataaatggcctgaatagaagtaattgaaccattcttcgtggaagtaatacgttcttgtaacttacccatctccgatgccaatgtcggctgataacctactgctgacggcatacgtcccaacagggccgatacctccgacccggcttgcgtgaaacggaaaatattatcaataaagaacaaaatttcttttccaccagcattcgaatcccgaaacatttccgcaactgtcaacccggacaaagccactcgtaaacgagccccgggaggttcattcatctgtccgaaaaccaatgttgcctgcgactggctcaccttctccatgtccacgctctccaaatcccacttcccctttgccatctcctccttgaacttgtcaccatagttgataacccccgattctatcatctcccgcaacaaatcgttcccttcccgggtacgctctccgacccccgcaaacacggaatatccattatgtcctttggcaatattattaatcatctccatgattaacacggttttaccgactccggcacccccaaacagaccgatctttcctcctttagaataaggctccaacagatcgatcaccttaattcccgtaagcagcaattcctccttaatagacaaatcttcaaatttcggtgcctcccggtgtatagaacttgtttctttgtaatccaatggggccaggtagtcgatagcatcacctgtcacgttcaacaaacgtcccttaatctggtcccccatgggcatcgtcaaggttcgccctaaatccaaaaccttcataccgcgatataaaccgtcggttgtatccattgctacacaacgcactgtatcttctcccacatgttgttccacctcgacaatcaacttcgagccattctccctctcaatctccaaagcctcgtaaataggaggtaagtcaacccctccaccttcaaaaatgacgtccacgacaggaccaatcacttgtgtcacgtatccgactttctgtgtcataatatatgatttaaacgttctttaaatactaacttataactttaacgtatattcactcagaatagtttcttcccggccatactatatttaggccatgtactagattccaatgatacgtttatatgattattacaaattaaataatcatcttattcatccagtaaatataaaatccctggatatgtttcatagacaagtaatcaaagatttcatcacgccacgcgtcatgactattctttccatcaatatcttttttaagaatctctttcgcagaactcacccgtttgtctttttgaatttctacgtcctcgggtaaatccacaatatccgtcaacataaatgacttctccagaaaatcatacacggccgtcagatcaattgccgaaaaagtagctgtaatctctgaactattcatcgattctccggtagtctccactcttctttctcttggcatgtcctccggcatagcttgccctccaaaacaaaccatcaaaagtaaaattggtatcgcccgcaaaatccacttcataattcaatctatttaaatattcaataaacaactcttccgctataaaacaatttccgtaccaaaacttaatctcttacgaatactaaattttcattttattaaaattgaggatattctaatacaagaatcccccccacaaccgacacatttttaccgattcacagcttaatactctcaagagcttttaatgccacttcatccttggcatccaacgttaatactttagagaaaaatgactttgcctccccgtattcttcttttgccagatcaggattcccattgttttttgtggtaatagcatcagcaatcacgtaatgataatatcccaagtatttataacattctatcagttcccgtttataacgttccggttgtactaatcctatttctattactttctcgtaatatggttttgccaaccccttcgttgtttccgggtcaagcatggaacttacccgagcccgccaaaaataactcacgtaactattaggaacttgaaaacttaactctttgaataaagaatctgcttttatcagctcttccttttgcaattccggaactgaatcctgacaagccagattatagtaacatttccccaatttcaacaaatcttctgcagccggtttctcctcaaaatcaaaatattgctgataataaaccacggccgaatccaaatctctatttttcacgaaaagatccgcaatatctttcaataactcctgacgcttacaatccgcattcaacgcctttttataataagtaattgcctcgttatattcttttttcacggtcaactgttccgcataacaaagataatcctgacaaatctgactctcttcgggagtagattctataaaatgctttatagcttccagacatttttctccattctcccgtttagaaagacaataagcatataaacgtttagccaccagatcttccggcttttctttcaacacggattgaagtacaggcaacatcttttcatactgtttatcaaaatacaatataccggcataccgcaacaaatgatcctgatcataataccctgactgaataaatttagaataattatcagcagcagccttactatctccggccatttcatacaactcccccaatatacaatagataccacaaaattcaggagattcttctcgggccttatccaacttttccaatgataagaaacgattggccgacatatacaagcgagcctgttttaagtatgcccccacacaatccggactaaaataagctgccatttcgtatttagcacaagcctccccgactttcccctgtacagccagaatatctccttccaccaagtacggcaacccacttttagcatccaactctctcgcctgattcacgtattccattgcttttgtcatattacctgcatacaaatacgctctggctattgccaactgcacgccagcatctttcttatcttttttgcttgtaaacacctctttgaacaactcttcaccgttcacatctttccccaacttcaatccaactaacccaatccggttgtaagaatagtcaggcataaactctatccctttctggtagtatatccctgcagaatcacgaagtcccaacaccagataacattctcctagatagtaacaagtttctgcttgcaaaactccctcttgttgttgtttcaaattatccaagaaaaaagccttagcagccccaatcattcccgattcataaagatttattccgaccttattgtctgctgccttcacgctcgtcgctgccaacaagcaaaataatccgcatataattaatttcgttttcatgatcttaaaattattcgttaaagttgatccctcacgttcacgatattcacgggcatcgtggcaggtaacaatccggccttcaaaatgattcgctgccctcttgctcctgcaaaaaaagaggttaacccggttgggagagcgctccgggggtcattcagtaaaatgtatatatcgcgagacaatggatattgccccgtgtagaggtaatactggtaaggctggtaactattcccataagtaggtaactccgcacgactgatccgtgccacctgtatctcttttcgaaaatcccggcataaagaatcctgttcgtcactaatccagttgaccccgattatccccatagcaccgggagttcgagtaatatactcgatgacatcccgattcgttccggcggcatgacatcgatcagacaagttaccccgcccgcatattgaatccagcacgtaacgtactgtgctggaattccggtgatcaaacacaacttgtatttctcccaatttcgagtccgccgacaattggttccaacgtgttatctcaccggaaaatattttctttaaagtactcacgttaaatatcgaatcggcattttgtctgtttacaatcaaagcaacaccatcagtagctatcttgatggactctggaaaaaacttattgctgtggaatgactctaattcgtcccccgataaagggcgtgtggccaacacccagcgtacgctgtcgcgtaacaacagggttattgcatccacttcactcgtatatatcgggacgatacctgtctgattatattgcgcttcaaaaactgcaatctcttcctcggccaagggagacagcgtttcgtcgactgcaactcgaattaccccgctaaacaaggtatcttgtactcctgaagttttccctttacaagccacaagggagatcaggcataacagccaaaagccgattcgaatattcataacctttttaatttttgatttacgatttcaaccatacaaatcaacgtctttttcaatctaaaatcatcaatcgtaaattctttgttttattattgtaatttaaacgtgatcggtaaagtgaaccgcacggaaaccggttcaccacgctgtcttccgggaatccatttacgcatggcctttaccacgcgaacggcttctttatccagcgtcgggtcgaccgtacgcaacacttgtacatcacgtaccgccccgtcccgtccgatcacgaattgtacgattacttttccctctatattcatttcttgggcaatagaaggatacttgatctctttaccaatccatttcatcaaagcagccatacctcccggatattcgggagcttgttccaccacttgaaagacctcatcttcacttgccacgatcaatttatggtcttccagatcagcaatatccttaccgttttcctcgtcattacccttcacgtccgccacggaaatcgccgctttcgcctggttcacctcatcctgtgttttaatctcgtcttcctcacgcacctcttcatctttcttaatcacgggagccgtaaacttaatcgtcgtcttcaacgtcggtggcggcggaacattcaccgccacgatcttgttctcttcctttacctccggcaaatccatcttcaaatcagacaattccgtcaccgtaaccatcttttcctgcgccttaacgggcttcaggaaacgaacaaaagccggaagaaccattgccagaaccacacaacctataatcacgacataggccgtcaagtgacgccggggtgagtgtttacgcaactcgtaagccccataatccttattctttccttcgaatatcagatcacaccactctaccgaatttacatttatatcctttgccatggtcttattgttttaactcccggtactcgatgacttctttcaaatcatcggcatacccgtcgtgtgtcttatcctgtaacaatcgtaaatcccccggagttatatccatgatcgcataccgtccgatattacatatctgcatctcatcgagaacatcaatcaaatttttgtaattcgcaaaatcggtagccttaatcaatataacgggtgaatccttatcttttctgatctcggcagcctctttcagatactcctcgttcgagatctccaagtttgctttcttttgtttcaattcccggatcttctgcatcaccacctgattacgtcctaacaggatggcacgcaagccgttcggggaaaaatcggtttcctgcaccatatcaggattctcgtagtccggctctcccatataataatacac

SEQ ID NO: 10849 - DNA, 2693 bp, Unknown
  gut microbiota DNA sequence
taaaaacggtcaaaaataatatatcctaacgagaattaaaaccaattcttagttttaaattctcgattatcttctgtcgtcttcgtattccatggtgattttggagccgtatctccgatcttccaacttggttgcctcggtgataacggatttttgtcctccggctttaacgaaacgcaaacaagcccggattttcggggccatactaccttcggcaaaggttccatcttccaaatatttcattgtgtcggcataatcaaggaattccaattttttctctgtcggtttcttaaaatccttataaatataaggtacatccgtcaaaatgtagaattcatctgctttcacccgatttccaaccattgctgaagccaaatccttgtcgattacaccttcaatcggttgaatatcccctttctcatctatatataccgggataccaccaccaccggttgtgatcacgatatttccctcgcgagccaaacgctctaccaagtcagcattcataaaatctttaggatccggagaaggaaccactcggcgccaaccgccttccactttgatctcttctttgaaaacccaacctttctcctgtgccagcttgtcagcctcatccttcatgtagattttacccacccgcttggtcggattctgtaatgccggatcgttcttatcaacaatcacctgtgataccatagaaatcacgttacgttgaattccgtgctctttcaagatattacgcagattacgctcgatcatgtacccgatttgtccttgcgtgaaagccacacaaacatccaacggcatggctgcattgtcatacttctcgaccccggctgcattatccatcaaaacgttcccgacttgtggtccgttcccgtgagaaataatcagattatatccttcttttatcaaatacaccaaattctccaatgtgtcgatggtattggcattttgctcttcaatcgtacctttttgatttcctctcagaagagcattaccccccaatgcgataactgctaattttttttccattactcgtattttatttattattttcttttctgttcgaaaaattctgtgtccacaaagctagcgaaattagttatacaaaaaataggtaaaatccttttttctcgaaagacaaaatattgaaaatcaacttactgtataaatattcttcccgtttttataaatatgcagcgtaaaaaccggacttttgaccgttcggaaaaaatttattatttatttctcttaaccatctctttttttgtacctttgcgatatgcaaaacgaaaacaaaccattatcgagaaatttgttccagcgatttgcaaacaaatacactttcgtggggttgctatttgttatctggatcgctctgttcgataaatacagttttatcgaccggttacagttgcgttcaaaaatcaaccagttagagaacgagcaaaagtattaccgggaaaaaatagaagaggacaaacgtaagaaagaggaattgttgggaaaccgggataacttggagaagtttgcgagagaacagtatttaatgaagagagaaaacgaagatatttttatcattgtaaaggaatagtcgattgggaagaattattgctattgattacgggaaaaagagagtgggcatagccgtcaccgatccatgccaaattatcgccaacagtctaaccacggtcaggtcacacgaggtattgcaatttttgcaggcctattgctcgaaagagaaagtagacttgattgtcgtgggacatcccaagcaaatggacaacacggattcagaaagcatgacctatatcaaaccctttcttaccgctctcggccgcaagctaccggatatacccatcgttatgcatgacgaacgtttcacttccgtactggcccacaaagccatgatcgaaggaggggcaaaaaagaaacaacgtcaggacaaagcgataatcgatgctattagtgcaacgattatattgcaatcgtacatggaatcacaaagaaatctgaatatttaaaaatgcttttacctatttacatttatggacatccggttcttcggaaagtttccgaagacatcaccccggaatatgcgggcttgagtaaattactcgacgatatgtggcaaacaatgtacgaatcagacggagtcggactagctgccccgcaaattggaaaaaacattcgtgttttcgtgatcgacggttccccgttcgaggaactggatccgaattgcaaggattttaaaaaagcttttatcaacgcacatatcttagagcgttcgggagatgatgtacctttcaacgaaggctgtttaagtatccccggaattcacgaagacgttatgcgaaaagaccggataaaaattgcctatcgggatgaaaactgggtggaacacgtggaagaattcacgggaactcgcgcccgcattatccagcatgagtatgatcatctagacgggattgtcttcacagaccacctgtctgcactgaaaaaacgtttactcaaaggaaaactgaataacatcagtgcaggaaaattcaaacaaagttacagggtcgtgttacccaagtaaatcagaataatttaaaattttaaatgtagaatttagaatgatattctatacctacattttaaattctacattctaaattttaaattctaaattagtttgcaccctattt

SEQ ID NO: 10850 - DNA, 36670 bp, Unknown
  gut microbiota DNA sequence
cagtaaatcacttccctggtggctcaagaaataggctatagccttgttcttgccatctttacccgagtataggtcactgacagccaactctagctcactcaattgacgctcggcaagtccgaatttattcttccagtaagaattccaacctttgctatcgtaaacgggagccaaccccgggtcggaataaaaacttgcaaattttttaaaatcaccgacatactcgtcaggaacgacaaccacgtcatcactaccatcatccgtgtttagaagaacattataatctttgtccacgtaatgagtcaccaaagctccactgggatctataaataccatcgggtttccggaacaataattatatggcgataatgaaatgaaactctcttgaaaaggatccaccccgaaccatctccctagcccgctatcgtacatcctcgccccgtaatccaaccactccaaattccccgtcacctgctcctccttgccgttatacttgaatcggttcgctgcgagttgcgggtagtcactcctcacctgtctcgccccgaaaggatagtaatcgttccgctccaacacctttcccgtgccgtcaacgatcacccgaacgctacccaggtgatccgtcaagaagtaattcacctctccttgacccccgtttgaatctcccggcctgatcaccccgtccctgaaactcgccgattcaagtagcaaccccgctccactcttcctgtatgtcaaagaacccacgtagtcaaaaccgttcacgtcacccttgtccctaacccgtaacttcgtgccatcggcaaggtaatcgtactttactttcaactcgccgccaacagtcttgacttcactcaacaaatttaagacattataaccgaaatccaatgctcgacggctatcattcgtcatgttcccgttcttgtcataagcgtaagtgccggatgctgtaccaccacgggaataaacatctcccgccagcgtggaggaaacgttctccgtcaagcccgtcaaccggttacccgtgcccagcccctcatcctcaggctcgtcaccaaacccgtcataaaatgaaaatcgaggaggttcttcatttttcctcctcgatgatttttacattttaaattaatatctaaagtaactttagagtaaacttttttcaggataatacatcactcaaaatcaggataaacgaaatcatattttcctgtttgcatccggtggactatactatcgggacttatcacaattccaatttctgcctttctattttctcctttcagttttccaacccaggtaaaatcattatcattgatcttccaaacatgccagttattagatatttttatttgttctcccggtttagaaccgtaatcattagtatttctaaacaaaacatgatcagttttccccacattagcaatattcccaacatattcccaatatcccatcttaagcccaagttttgttatacaatgagcataaaactcaacttctccattcacgatttccaacagattgggatttttatcgtctggatactccgtcttgaaaaccctaataacatcgctgtttaattgggtaagatcgctaattacatattgtaaatacttcttcttattattgtccatcttaaccgaaaagacatctcctattctcgtgtttgctcttttcattattttttgttctttcactatttaataccgtattgccaccagtttttaggcgcaattgaatttattttattcaataataaacctccatttttgggcaagccgtatcgattaattaaagtttgttccaagactctagcttcagttcttgacaagccggttgcgccatttattacataatattgtaaaagagactttgccgttcccgacttcaagtgttctgcaaatctaacagccgattcccgttctgtaattcctatatatctaaccgttcccgctttatctattccttgataaaccacgttagttccattcttaacaagatttttgaacatccctttcataacaaatgtcatcgaaagcccatccacccatgattctatacttctcaagtgataccaagtctcactccaagctgccgccagtaaatcacttccctggtggctcaagaaataggctatagccttgttcttgccatctttacccgagtatagatcactgacggccaactctagctcactcaattagtagcaaccccgctccactcttcctgtatgtcaaagaacctttttaaaaaattaaagtactttttgtatttgaggagagtttttatttttctcctcaaatacttattgcctattcagaaaaattctaggataattcacccctatttttcccaacaagaaatacaaagtagtattccactttctcctagctttttcatactttcaggatcatactccatattacactgcccttcatactcgtataatatccatattgaaatattttctcgagatattccgattgattctaatttttcatatttaccttccaataaagaaaggaaatatacaagtatttctgaaaaattttcacctgattgaataatttctatcccccagtttgcataaagaaaattcgaactcacaccaataatattattaagttgctcctcactacaactctttgatgagagaatttgtaatcgatatatatacattttgtttaatattaaaattaaaaataatcttcagccttcaaacctgttttcaatgttttacctcgaaaagttccttttgcacccttcaatattatttctccacgttcaattattatatctggatttcccccaacaattttgtcaaatgattttagtccccctacggttttaagcacatcaggttttacaacacgatgaaaatagaatctatcaatcagaccaaaaccttttataaaaatacttccacccttcattcctggtgttggtgcaattcctcctatataaggaactccctccaatcttccctctcgactaaccttccaatcaccaacaattcccgaataagtatcgtatccaccaattcctgtataataacccaaattttgccagaatcccgacaagggctcgcgaacaaaagctcctgcataaggaaacatatctacaattggaagtaaatccgcgacaaacgacaaacccacaaccacggactctccgtttctcacggttccgtaatatgtataatacttacgcgtttcatcgttataactcaaatttcccgtgaactcggcgtctgtggcatgatcccatccattaaaatcatgaaccccggaaccactcttcaatgaattaaaaaaagccgagattaaagccgggtcactcgtgctccagtaatccataccgttcgcatccacgtttatcaccgggttattaccactaaaatgataaggactttgagacaagtaattttctgataaaggatccaccccgaaccatctccccaacccgctatcatacatcctcgccccgtaatccaaccactccaaattccccgtcacctgctcctccttaccgttatacttgaaccgattagccgccagttgcgggtagtcactcctcacctgtctcgccccgaaagggtagtaatcgttccgctccagcacctttcccgtgccgtccacgattacccgaacgctacccaggtgatccgtcaagaagtaattcacctctccttgacccccgtttgaagctcccggcctgatcaccccgtccccgaaactcgccgattcgagttgcaaccccgctccactcttcctgtatgtcaaagaaccaaggtagtcaaaaccgttcacctcacccttgtccctcacccgtaacttcgtgccatcggcaaggtaatcgtactttgccttcaactcgccgccaacagtcttgacttcactcaacaaatttaagacattataaccgaaatccaatgcacgacggctatcattcgtcatgttcccgttcttgtcataagcgtaagtgccagatgctgtaccaccacgggaataaacatcccccgccagcgtggaggaaacgttctccgtcaaactcgtcaaccggttacccgtgcacgtgtaaaccaggttatccaccagagtgcctcccgcagtccgctgcaacgtcttgaggtttccgttacggtcgtaagtcaaacccctctccaggtaactacccgctaacgtcgaccacgtcgtcccgctcttctgtttctgcgtcgtttccttcaagcgattaacaccgtcatacgtgaaaccgtacatcaacgctacattcatcccctgctgccactcccactcgctgatgttaccgttccagcaggccacgcctccacccgacgggctctcgtatcgtaacttcatcttgaaaggggtactctctttgctcgtcaaccaccctctcgggttgtaagccagcgtctccgttgtgtttcccagtttcctcgaaacaagcctacccaccgcgtcataagtgtaaaccaccgttgccgggctacccccgttcaacctcgtcgtcgatgacagcagccggccacggtcatcgtacgtgttctcgctctccagcacgtccgtccggctggcgctcacctggtgactctctcgctgttgaaccacgttacccgcgaaatcgtacttcacgtcaacacggctcgtgaaaccctccacgttatcgctcactgtctggatcacgcgacaacgatcgtcgtaataagtggtcgtgatgagccacttctcgggactggctcccaggactctcgtcctcacgctcgttaccagtcccgtcaccagatcgtggtagccggaagcgtaaccagtcgtcggttgaaaggcaagcaccgggacatcacccgtggccgtgtaattatcatacagggtgtattgcaagggcacccgattacccgccgggacgtaattatcactacccgaggcggcatcttgtaaatcccggtgagaccggtccgttcccgttaacaccacctctcccgtctcgaccacccggttcttaccgtcgtacaacgagtaactccacttgtcggcgttccccgcccgctgcttcccgtcctggctcatcaccaaacggtcacgcttgtcgtgaaccaggtaaaccggatcacaacccggcaactgtttcaagattaaccgaccgaaacgatcatacccgtaatagtaaccgaacaaccggatcgcctccgtctcccgggtcgatgtcgtccccacccgggcactcgcctccggcggcaacacgtaccgtaacaaaccccggtcatcaagcacgctgtacgtctccagccggttatcatcaccctccacgttcacaaccagcaccgtccgatcctggttgtccgtgtaagtttccacccgtttaccgtcctcgtcggtcaccgtcaccttctgcaaggaacccgccgcgtaatacccggacaagaccagcgacccgtcacccgacacccggtaaagccgaacctcgttggcccggttcagcccgtaatccgtcgtcacccccttcccgttctcgtgccagttcttgcccggtcccgttcgcttcaccacgcggtcaagcgggctgttatcgtaccccgtcaacgtgtacatgtaacccgattccgactccccgaacatcttccatctcgccggggataaagcgtcacgaacaaagcccccgtgattaccttcaagagcgtaaggaacatgctccctttccacccgacccagtacaccgtaacgacacgctttcacgatatcactcgtgttcccgggagaggcgttgacttgtatctcctgtaactttcggccgaaaccgtcaaggtaagtcacgttgttgatcgtcctagccccgtccccggaagtcgtggggtcgagatagatcgtctccaccacgtgaggctccgtggaagtgtaatgaataccgttatcccggtccacggtcacgctacccgtcatcggcacgaaataatcctgcaaaccagcctccatcgtgtacgtccccgtttccgaaacgctaaaggagagaaccccgcccgtgccagcgcgggaagccaccaccgtgccaccttttaacaagcgataagtcaggatggattgggaacccggtaacgttatcgagacgggctggctgttccggatcgttcctcccccgccgaccacgctcctcgtgatctccggccagatgcccacctcgccgttcatccaggcctctcgaccgtcttgacaagccttcacacggtaatgaccgtaaccgcgtaaacccgaaaaccgctggttcgaaatccgggccccctccacccgcacgtcgttacaatacaactggtaatccacgaaaggctgctgcccgctcaaggtcaccgtcccggtcgaaccctccgcaatctcgccacccccgcttaaattgtacacctccaggataccgccgggggcttgcaaggcctgtattaatattctatctaccaggtttaacacgagaaaagactgtttcgtagtgtcactacaattgggtccgcgcccaatcacgacctgcccctcgagaggagactcgggagtaacgaatcccaaaaagaatgttgaatcccacgtcacgcattcccccgccaaaatcgaacgcgtcatctcttcaagttccgctctcccttgaggataatccggtgcaagcgtgaaaggtatcgctttgatttccccgtccttggacaacatcaccctgggcgaagccgcaacaacgatctttccttctaatactccataataagaaacccgtgcgctaccgttcatatcgcgagagacatcaccacgagtggcttttatcgtgtaattaccacctgttgtcaccaaaaaatttaaaggtccccccgttccgggcaaggaagcttgcaaggcagccccttgatacaagtcatacgtcacaccctgttccgaacccgataaagtcacgaaagtccttttcccgggatatatcgtggcattaccactaaccgtgtaacttttagggacagctcccggaccgtattgataaaccaaacgatgccgccccgttaacaacgacaggaacacgcaccaacggggtgtccccgtggtgttttccttgatcccaaccacgagccgccccgtcaaggatgacgttggcaccatctcgagcaccctgacccaagtccacgattgctgttccaaagaactatttatttgcgtcatcactagctgtcggtccaactccgtttgagtacgatacagcaactcaaaataccccgaggctccatccaacttgatcgtatccggattccccgataaatccagactaggataagcttgtcccatcgatagcaaggacaggaacagcatgcatattaataattctattcgtttcatcttttcagattttagattatcaattcaatttcaccacgttatactggtaatctctcaccacgtttccacgctcgtccaccacccggattaatcgtcccgccgcatcgtactcgttcaactccgcacgtccgttctgatcgaatttacagaaaacagaaccgtctaaattataggatatagcctcgaaagaaacatcagcgggtagcaacgcaacatactgcacgttctcgtacggcttactaaccgtcacggatgtcacgttctcgtacggactcaagtcgatctcgaaactttggaccgaatacccgggagtagcggtcaaacgaacactactcgacgagctccctcccgcatgaacgacactatagtacacggaaccgacagccccgttattcaacacgaacaatctcaaatgcttggattcgggaattaccgttatctttatagttcccgtgtaattcaaatattcctcctgccccgccagatccctgtatttgaaaaaatccggatcgcgtattatatctcgctccaccaagggacacaaattataaagcaattccggtaaattcgttaactccagatactcacgaggtaattgcatatatttagtgaaaaactcgttcacatgtcgtcctctatttgcttgagcactatcgatcaaaacgttatattcttcaagcgtcatgtatttcttggaggcaagccccccgatcaaatccaacatcatccggtggcccgaactccagctatactgcctgaattcgctcgtttgttgcgagggatcaagctcttgacaaacatcataaagttgcgaggcgagggaataaaccgccaccaggccacgcactttatttcgaaatgaatactcctccccgtattttttcaaatccgctgctgccaccatccgtgaagtggcgtgattcgctttaagaatgacctgcccattgttaaaatcataacaaagagcctcatctcccgcattactccgcactcccacgggtaaatacaaccgatcactttgctcataatcaatcgcctgctccagcaagtaacgggatgatccttgagtgaacaaaccggcgtcaagagacggaagcacggacaaggccaacgtttgggtagatgtcgggtaaaaagcatactttcgtgacaccccgctataatatacattttccacttctacggattcataaagcgaaactttttcaacctgtatcgtgtcacccttcaagtggatttccttcaccaccggggccaatatattctttcgtttcatttccgcgaacaccgggctggcagcatcctccatctcggttacccgtttcgtgactaccgtgcgcgttccacccctcgcgtctgtttgaactacccgggtcgggtaactggactctttcaagttatcgtagaaaaactccgttttttgatagggagttcccgtggccttggaaaaatccgatatcgtggcactatccgtcacctgtgtttcaaaacggtatacattccgttctttcaacaaagtcttgcccccgtatttaatattatagacctgaggaggtatcttcacgctcgttcgaggttgtatattcggcaaataagtctcataataaggagagaacgaatgataagagtttccatcactatacaaaaatatacttccttgattacgataataattctccagaaattcctcgtccatgtaatactcgtaggccttcacctgtggcaacacctttttgtaatttaaggccgtatcccccggtacgaaaaaagatcccattcctcccgcaaacaaatcactcgaatatttacaggtctctatttgtttgagattcccactgttatcgtacgtggccacggccaagggtaaacccctcaaccaaaaaacgtgagggaaatagggcatcatcgggggaacaacactgaacaagtacgctttcatcccttttccccggattatctcttgcacgtacgggtaaaaaagaccgttattaccggtactcataaaagccatatcttggtattttaccttggaaagcaacactcggtccgaaaaaccgctatacgagacaatttccgtgttcgaacaactcgtgaaaacggaaataccgtgcgtgggataccggtaatacacggtatcgcacgtctcgctcttaacatcttccacgagtaaagatttcacccggattcccccgaaatcattcgggtacctgaaactgttgggttcgtaatcaacggtcactgttcccccgttaggaaccgttatcgtttttaaagaacccgttttagaatattcaaaatcaggataagggagatacccgtcatcatcatttccgcgcttcctccttaaatatccccagacatcagggagcgtggtaacatctgaaggtctcgcgtaataatctaatttgattcggtgaatttcgctctcttctttatccaggaagcttagataattcagattatcccccacgttcaaaagtacttgggaaattgtccgttttaacacgtccatcaatttgactcgttttaaacgagttccaccccacgaggaataatattcaaattccaccgctgtccctccacacgcaatacggtgtaaaatcggggatttaacatcaaacgtggtacctccccctacttctctcgtggttacgttattattcacctcctccaaactttgtatcacgtaacttttagccgtgcggaaccacgaggcagccattctggcgttatgcgaagaaacatcctcgtacatgcttatcaactggttcaacgtctttattaacccgttggaagcattggttacactggaaaagttcgccaattgccccatgactctaaaattggcattaattgccgcagctcccgcttcgaaattcgggttacgtatccattgcccgctacccacataagtatataaatcattattcaattgcatttccagcgaaaaactattcaaataacttttcgcttcgttaatagccacattaaaatccctctggtatttcgagaaatcaaacacccgttcccgcatatttctcccgtatgtatatttcgctttatacccggaataaaaccggaccgtgttaactcctttctgatctttctcgttctcccgaacttccgcgagataagtgaaaacaatcggtttcctgttgtggggttcgatccgacttaaataccaggaagaaacatacgatttattacggataccgttaaaactgatcgcatcttccttgacaatattagcagaccactctttttgcctgtatataaatcggttcccgttctcatccgtgataatccagccgtttatctcacgaccggatgtagattcgcattcgattcgaacgttggttcgctcgagaggttcagcatatatccgggcgttatcgtccattttaataatgaaattcacggactgcccgttaaaaactgcagtaaagatatcactctcgccatctcgctctcgcttgttcactcgcttggtatcatcgaccaacggggttttattacttccccgttccgcccacaagtacccgtaaaatgaagtttcatcggcaattcctccgcgtatcgttcgagtaaccacacctcctgtatttagtaaccaattataaccgattaatccgcatgcatcctcgtactttacccccttggacgaataattcaagctgatcggtaactggaaatctcccgacccgagagtaaataacggaattttatagtgaaatatgccggtagcgtaatccaccatcatacttttagagtccaagtatccctgcgcttgctgccccggttcaagatcttgagcgtttaacattccctgtaaaaaaaagatacaggataacaacaacagtattctatgtttcataattatttgtcattagtaattagacttcacggttataaacaatcattttccttattaaatacattctaccttccccataggcatttcattttaaagttcaacactaattaccgtcagccgatgacacctccaagcctaaacatcggcaagtacatcgatattaatactatcgcaacaagcccgcctacccccatgataagaacgggctccagcagatttcccagttgtttcagtttatgttccagttcacgggtgagatcttccccttgtttttgcagcatctcttccagtcgattggtctcttcccccacccgtaccaacgtgtagagtttacggtcatagatatgagggaattcgcccaatttatccgcaaaaaattcgcctcttttcaatccctcgcaaataatatcgaaagaacgttgatacgggtaaaaagtaataatatccttcaacatcccgattccctgcagtagaggaacttcggaactacacagcaagtagagtaacttacagaaacgtgcctgataatttttccgtatcaactctcccgcaagaggaatcttcaaaaccagacgagacagaaaagagcgagtagaatccgatttcccgttcaaccaaaagtatcccaccagaacgataacgatggatatcacgatcaacaaataagtcgggaaattcttcgagaaatcgataatccaacgggtgatacccggaagttccccacccatacgggcatacacctgttcgaacatgggcacgatgaccgtgatcatgaacacaagtaccacaattgccgttaccagaataatcaaggggtaactgataactcccgtcaccaggcgacgctgttccacccgtttatgataataatcagccaggaaacgcaatgattcgtcaacacgtcccgtctcttctccaatccgcaaaaccccataatccaacgccgtgaatcgttcaccggcagcaaaactctcccacaaggtttgccccttgacgaccgacgcataaatactttccagcactcgtttcaatcgcttatcgttttccccctcgatcaacagacgaaacgaacgcccgaaatcgagtcccgatgaaagcaacgagtgcaattcggagaaaagagactcttttttcccgtccttgatatctctcgtttcattattccatgtcatcatattcttcctttttaaattgattctcaacactcaacgcctcctgcctccactcgttttggggatcccgagcccttccgaactcgaaatagtaaagtttcccccgagctctaaaacgcaccccaagactatccaccagcacgggaatattccacacgggtacaatccggatctcttccacctcccggaacaacgtatccacaccgattgaccgggtacaaaccagcaaagaatcccggtgctccactaaagccaaacgctccccacccttgtaaaaacagaaaatcccagtactcgcggttacgctatcacatgacaggaaaaggtgatccagttgctggtaactatccaataacgaatttccggcagcaagcatcttgttcaaacgattcgtgtaacgtctgacgaggttcaccccgtcaaacaaggcgataaacaagatgcccgacacgatgatcactatcaaaatctcgaccagcgtagaagcggcaaacgtgtatgaaaatctcctcttcatggttctacttttatcaggtaatcatacttcatcgactttctcccccgtacaggtaaagccgtcacggttaactgccggatcccgaacgagtaatccgtaatcacgatctctacagtcccccaatcatactctctcgtgtattttcccggaagatgaaggccgtccccgtattctcgacgacactgccgggccgtcagttccatggaaacattctccgccggatcatctcccgtcagggtaacccgggttaaggtctccatcgtgatcatgaaactcgccagtaaaatcacggccgccacgatacattccaacaatgacgaagcttgtaactctcggttcaatccagccatttcacttccctcctttcataaggtccccgcatccacaagggataaacgccccccgggttacccggcaacacggcgttatacaatactcccgagtaatatccctccggggcaaaataataacactcccgggcatacaaactacccgtcacgaacccgtgaacctccgctataccgtccacgtacaacaatccccgcacccgggaagactccggttgatagtacaagagctgtttctgttccccctcgctcactttcgctcccgcgatcacgtatccgtttacctcgcactcctcccccaagcgaataaatcccttttcttccccttggcggacataaagccccgacccggctttcaaacatacttgattccctaaaaggatggtgtctctggcaaacacttgaacacatcccgagaaaccatcggcaaactcaactcgatctccgacaataatcacgttttccaaacgattattctcctccacgaataacatcgacgaggcataaagtattaccgggccactcacccgcacgccggaaagatattcccccacttccactcgaacaaccggttcccggaaccctcgttgtaacacggaaccattttccagccattctctctccccggcataatccaataacccgttgaccacatcccgcgactcctcgtccaacggtggcaaccgctcctcgctcgtttttatttgttttttatctaacgcccttcctttgaagaattccgaccgcaattgcgtgtaagaaatcccgttacgaggaagataaacatcaccttccgcgaacgtccttcccgtcaccgaaaacgcccggttattctccggcacgtataacgttgcccgccaaaaactctcggcctttttacccagaaggcgaacagaacgatgtctcccgttttgcacttccacgacttcatacattccccaacgttgtcgggaatagcgcactctcgaatcttcccgttgtccgaacaacagcacggaactatctccttcccaccggtaggacaaggtactatcccgcgagtaaagcaggaagccggattccacgttcgcccgggcttgttcgccctgatgataaagattatatctcacgagatcaaaattccacagttcgatcaccatcaacacccccaacaacaggagcgtactcaccaccaacacggtagccagtaccgaagcagaaaaatcatgtttgagaagtttgaccatgatcactccattttaagcgtatacactctccttccttttcgcaaacagacggaatcccggtaaactccttccacccggtacccgtcaacgtttttttctttcacggataccagccgcgtattgtctcccgacttcatcaaccaaaaatcccgtttcccctttcgtattctcccggcaaattgaaacccgggaggagaatccggttcttccacggtagcttttgcccgcacccggggagacggttgtttcacgccccggggaaccgtccccaaaaacggatcccggtaattcaggaacaacgtgtcggactcctcgttcgtgatcgcgtgtcttttctccgccatttttgtcatcacccttcccccgccactatacaccgccacccggtagatgatcaaaccccacacgccaactgccacgacaagcaatacgggtatcaactttttatttttcaacgctttcatggcaattcctccggttgttgttcttccatattctcaagcacggtcaacacccgccatcggtaaattccctcgtatgccgagttctccggcctcacgccccactcgtatctccccggttccaacgtatacgcgtactgatttccctctactaaggtgtcaagcacgtacaactcgattctatcaaaagaaggcgacacaaccaccaagcgatagcccgttgcaccatcccgctcctcccacgcaaaagtcaacgtggcacgagttgtttccacgctatccgccggggcgacaagtaccacctctttttccgatatatctttctcgaacacatccctgcaacccatgacaaaaaataaagtcaataaagacattcccgtgataattcttactactctcatattcatgatatatttaattttccattgttaattgttgaacaaccagcgtcatccttaactgtcgttccttcttggcccgatcatcaaacaaacggaacccggcagaaacgatttttcccggatgcccttccttttccatgtaatgcatcaccttcaacagggaagtaaatcccccggaaagcacgagttcccccgtgtgtacctgtagtttcccctcttcccgcgtaagataaggcgtgtatttcaccatcttcaccccgttatcccgaatcggtcgttccaattgtccgagcaacaccccgttattcagaatctgtttcccggacacgctccccggcaattcgtttcccaccccggaacgactttccgctaaacgactgaccatttcctgacgggcgttacacgctctccaaagtttcacggtttgccggaatccgaacccccaagccactaacggcacgataattatcagcccgaccagttgtaaaactccttgatgttgtttccactttttcataacccgatccatattttaaaatgatacaaccccgtttcccggttcctatccaaagagaccaatttcacctggcgtgcaaaagcacttgatgacaagctacccgtgaacaaagtaacttgccccggatcggccgtcaccccggataattcaaggcatccctctctcgtcacgacagacttcccctcttccaaccctttcaacaacggattcacgaccagcatatccagattcactgccgggggaacaagagccgccacacgatccaacacgacactcactcgccccgtcccgcttccctcgaattcccgaaccactcgttccatttccctcgacaattcttcccggttcgagacatcccgttccaaagaagcaatttccaattgcagacccgcatatttctcccggacagaggtattccacatataattcacgaccagcaatcccaacagacaaagcaaagcaaccaatttgattttccccgctatcaacgccgctaacgagtcgccccgtttccctcctttcagtaaatctctccacgttattccccgatgataaaatctttctgccaacccgatagccgattcgcaaaccctttcccgattcgcgggtaaaatctcttcaccgggccggactccccataaacaagtttctatcacggaaacttgatacccacgcaactccacctccaagagggtaattttatcccgtcgggtaaaacagatcacacgttccccgtcatcccggtcaaaacgttcccatattatatcctcattttccgtcacccttcttatcccgtcttcatcctcttcgtgaaaaaccttacgaataatcccgtgcccggccaccactaacaatgtcggctcctttaacttcatctccccgatatctcccgcgatcacctcttgcacctcctctacccgcacgccactcttcccccggacaagtctgacgacatccagtttcatcgccccgtcctgttgcaaaaaagcaaagatcaccgagatccggtctaacattttttccaatcttcctatcctgttcattgggcttctaattcaataaatcacacttggctttataaacacgttcaatttctgatcgactttattattcttcgtcttcccgaacaaccaatttaacaccggtatccgggcaataaaaggaattccactggatgacttctcccgtgtattattatcaatacctcccaacaaaaccatctccccgtcacgaacctgcacctgcgactcgaaactacgggtcaccgctcccggaggggcttcctcgtctatttttccctcccgttccgtgaattgactctgttcgattttcacttgaagcgtgattttcccatccctactcacgaaaggagtaatatcgagtttcaggttagcctctaccggtttccacgtgtaggattccgagggaacaggtgtttgcgacccgtagtaattagtctgtacctccttgtaatactttgtttctccactcttcaacgtggcactatgcccgttcaaggttgataacttcggggttgaacgcaattctatattcccggtcgcttccaacgcttgcaaactcatgtaaaaattaggtgtaaccttccccaagttgatcgacccgaaaccgttaaaactattaatcaacctattgattgaagttgccgataaagacatattcacccccggactcaacgtcccggcagttgtagcgggtccgtctttcccgattccggcctcgatacccacctcgtgaatcacgcttttcttactatcgacgatcaacacctcgatcgtcacgagcgggacactttgatctatcgactccagaaaacgctccaccagctcaacctgccgactcgtaccgctaacaataatactgttctgctcggcaaacatctgaacttgcgtcccggcagacttcaatgccgcgggaattaattcaactaccttatccaccgtccggtaacgcaaaggaacgacccgcgtggtgacaagagtcttatctttcgttgtcgaaccgaaaatatatataccaccttccacctgatacgtgaaaggtgtccccgcgaacaaaacatttaacagggtcggcacgtccacgtccttcacgaacaccgaagtctgttgatccagagaggtaagaaagaggcggctcattcccagacgttcgaatatttccagcaccacgtcatgaatatttccccgattcaaagatacgctcaccctacccgcactatccacgttcacttgatccggcgtgaaatttctccttttgacataagaagatgccaatgccagatttcctcccgccgggggaagtggagcctcgaacctccacacgccatttttatcccgctctatctccaacccgttcaccgaggccagcgttcgtatggcttcaagcaccggtaatcccgcggaatagccggatacccgattcccgtacaatgacttcggtatcaccacatgctccccggtcaacgccgtcacccgtttcatgacagccaccaacccgtcatccagcaaatcataatacaaccgctttttcgtactatccgtctcgattttaggttcccgcggggcaacaaccaaggggaccggctcgcttaaagaaattatattccccacgacatccaattccaaattatactcccggcacaggaaatataacaaatcaatcaatctcgcccggttaaaattacaagtcaccatacgcccctcatccaccttcacacacaaattaaccccatgtacccgagcaatattccgcaacaactccccgatagacaaatgccctattgacaaatctatttccgaaaaatacgtgctatccaaacgagccgcccgctctaacctcacacgaacagaatcaagacacaccttgggtgctcccgcctgtcccctcacgacaaaacaacaaaacaagagcatgcatgccatcccaatgctcctaatatttatcaccatccttatcatacaactttagtttttagcttttaacttttaacttacaaacggtaccacctcctccaacgacgtcattcccgctttcaacaacccgatcgccgattgttgtaatgtctgtatatgacgttcttccagtaaatgccccacctcattctcggccatccggattgccccggctaactcatcgtctatcgggatcacttcataaatagctttacgtccactatatcccgtgtagtaacaatgttcgcaccccacggcccgatataatttacccgattgaaaatccgcacccagtaatctcttcgcgtgttcatccggttcgatctctcttttacactccgggcaaagcaagcgcaccagacgttgcgccatacataaaatcaacgtatcggaaatcagataaggatgtacccccatatctatcaaacgggaaacacttccccaagcactattcgtgtgaatcgtcgagaaaatcaaatgcccggtcaaagaactgcgtatcgccatctgtgccgtatcggcatcccggatctcccccagcataatcacatccggatcctgccgcaaaaaagtacgcaaagcactcgtgaaggtcaacccgatctcctctttcaactgaacttggttcaccccctccaaggtatattccaccgggtcctcgatcgtcagtatattactcacgacatcattcaacaaccggagcgtggcatacagcgtggtactctttcccgatcccgtgggaccgctaatcaaaaccaacccgtgcggatgacgtatcgccgacaaataagcctccaattgtcccggactaaatcccaggtttttcaaatcaagcaactctatttgccgagttaacaaccgcatcacgatcttctctccatgaatcgtgggcaaggaagacactcgcacgtcgaatcggcaccctcccgaatcatgcagaatacgcccatcctgcggtaaacgcttttccgatatatccagattcgccaatatcttcacctgattcaccaaagccgcgtaatttcccttctcgatcacgtgccgttccaacaacttaccgtcaatccggaaacgcacccgacaccgatcctcgtacgcctccaagtgaatatcactcgcgtgttcccggtaagcctcctcgattaaatcatgcaaaaaaccttttcctccggcgagcgacaccgccacccgatttcgtcgctcttggcgataatgacgtcccaacaacctagcaaactcctcttctgctaaaaactccaccttcaaacgcttgcccgtcaaaacctccacttccatcacgatattctcataatcatatcctttctcgccataacacccaagctgatctccctttatctcaaaaggaatcaaacggtactccctagcctccctggacgtcagtaattccaaggcctccgtggctacagcaaattctttcataacacgatcaattacagataaaacaatacacaagataacaagcgtaacaaactcccaccgttgacactaacgggattcctcgcttggacttgtttttatacaggcctaaaatccaagtcattaaagttagtgcaaaggcaataatcaaaaaccgaacgaactccatcaattgaaaagaaggggtcagacaaagcaaaaacaccccgtcccccgtcccgatatactcacgaaacggatttatccttcttcggtatttcagtaacaaataaagtaatacccctcccatcagaaatgccaatacccccacaccgcccacgacacgtaccacactctcctcccatccccatcgccacacactaccagtcacggtcaaaatcccgaaaaacaataatggatatatgcgaatcacccgctctttataatccgaacggatcataaaggccagcgggacaaaagccagcaattccatacttttttcggttagtccttcgttatctccttcaactccttgtcttggttaatttcccacacgttatactccccgtcaccatcaaaatcaacgacggcagtggccctcgcccgaaatcctttctcgttcgcctcgataatttcgattttgtaattcgcatttcccccatctgtcaccaacttggcctgctcgaaatccaagtcgctcaacgaggtggaataacgggaattcgtgtaaaaatgactcttctgcaacgtgtgaagaaacacaagttgctgttgcgcttccgtactcttggccttcgagatcaaaggcatcaggttaggcaacgcgattaacaccaaaatgccgataatcaccaacaccaccagtaattccggcaaagaaaaagcagcaaaagatttacttttcagatcacgccttttccgtttcaataatttttgaattgttttcatattgcaatcagaagttaaaaaaatacaattctaaaaaatatattcctcggctgatctttataaacacaccccacactttctcgttataaagtcagggtctaaatctatacaataattttaggagaatttgtagcaaatttgtacctcttttttgttaaaatatataaaaacaatggatttaaagtcgctttgcattattcatgacttactccctaccaattcttacatctattcgttatcccttcgatatcctatcgataaagtgacgctctataagaacgaagaaataacgaacagataagcctagcataataaaaggatgtaaacccataataaagtaaagtatggagaatcgattgactaactttcattagagtctttcttaaccatcaacccgaacccccttccccatgacgtgacgatctcaacggctccacctttgggtaaatattttcttaaacgggctattaccttgtccagataacgataagactctttaaaatcatttccccatccctctttgaccagttcctccttatccacatattgatttttcttcaagcataatattttcaacactcttgtttccatcggggtaagctgattcgtctccccttttataattaggtaacgacgaatcgggttaaacgaaatattatcggaaattctcacgaaatcggtctccactttcaacattcccacgttcttcaaacaccggttcacccgtgcaacaacttcatccagcagaacctctttacggatgtagtcattcgcccctaggtcaaaaccatcaatagcgtgttgagaatgcgtcaaagaactgataaacaggatcggggtcgagaaatcctcttcccgaatctttttagcgacctcaaacccgctcatcttgggcataatcacgtccatcaaaattaaatcgggcgtttccctgcggtacaaccacaaggcttgttctccatcggcagcatgaactactttatacccggctcttttcaaataatcaatgcaagtccttgcctgcatggcatcgtcctccgcatacaaaattttaaccatttccccgtttgtcaaccgttaatcgttttcatctttcaccaaaggaatcatcacggtaaaagtcgtacctacaccgacttcactttccactcgaataactccttcatgcgcttcgatcacttgtttcacgtaacttaaaccgattccaaaaccatgcacgtcagtcgaacgaccgtggtgaatcctgtaataccgttcgaaaatcttttccctgaacttttccgggataccaattccgttatctttaacgtctatcgcaatcatcccatctacctcccgacacacgacttcgacttttgcaggatcacccgaatatttgatagcattctctatcaaattgtttatggcattcgggaaatgaatatcatccgcctcaatcacatcaacgctcaactgatagtcaaccttgatagagacattctttcccattaacatcggatcaaacaacgcaaccagtgaatcaatagtttctcgcaaatttaatctattccacgatattttaaacccttgtttccaaacaattaataatttatacacgaaattattcaattgatccacccgtttatgtgccgcatttaacaaaattcgttgtttatccttcaaattatcaacaccatatgagataatcccggaaaaagcattttgaacagcagacaacggaagtttcaactcatgaaccatactactcataaattcttcccgaatcttagatatctgatattgaacgaggatcgttttgatctggtaaataaaacacacaatcaataacacgaacaagacgaaagaactaatcaacactcccgtcatttgtgtaaaaaacgttttatagggcatatcaaaataaacaatcacaccatgatgactttttaaacctagttctaccatgttggaaacgagatgtctctctattcttgaagaaccattatccgttgatgcaataatatcaccagtttgtgtatttacaagttccagaacatatttttctttaatccctttactcacaaaaatagatttacacacgctatctaacatatgaacattctcttctgactgttcctttatcaaatcgtagcaaaccttacgcaatacactcagataaccattatcttgattataattcaatacagtcgtgtcccccttcaatattagttttataaaattttcatttgattttacactaacacttatcggttcctccaaccttgattgattacgaacaacatattcttcaaatccagattcaacagctccagacaatgttgtattaattaaattcaaatactctgcttttttaaattcaataacccgatttagccaaaaaccttgaaatatcaacaaacaaagtatagcaaatatcgaaacaccccaagtaacatgaatctttctattcataaggtactattttacaaattcacacaaaagtactgaaaaatattctctctcatacgcataatacattccaaaaccatttagataaattaacaaaaaataggtacaaattagatacaatttaaatcattttcatcttctatttttgccttgtattaaatactaaaacaaatgaaaagagtaatattaataatatgctttatatctataaccttagctcttacattgctaaatgtaaatctaaggaaagattctacgaatatagatataaaaattcaaaatatcgaagcatttggaaataacgaggatggaggagacgatccatgcaaagctccgggtggagtatgtatgacatatgacaaagatggtgatccaatttttcacataggtttatctatcccataaacaattcactatgaaaaagacagcatttataattatagctttattgctcgccttcggttgttccgacgagaaacacgaagtgccaaaagaagataatccattattcagtacaagtcgtgccatctccttgaatcaactaggtgaaacgattaacttggaaaaaattggaatttacaacccgacaaaagtcatcaaaaaagactccttacttatcgtattggatctaaacggatttaataaaatttctatataccaagaaaacggaaaattactaggcagttatctgccaacgggaatgggagcggatcggggactctatatcctcaccatgaacctcgacaacaaaggaatcctttccgcctacgacttcggaaacgacaggttagttgaattcgatttaaatcacttcggacaacctgaattcggacctaaatttattgatatgcccaaggataaaaaacacctttgtgtggcaaaatcaggtacgacaattatctctaccggaatgtttgacgacggtagatacggtttaatgaacaacaataacgaagaatactttttaagttacccggaaataccgagttatcgcaccataaacgatactttaagaagtgctttatttgccagtaatatcatcaagataaaacccgacgggacgaaatttgtctgtgcgaatatgcagagtggcatcatcgatttctgctctctcataccttgcaccaatatcactcgcgttgccgagctgaatctttattctccgaaagccacagttaaaaatatgcggagaacgcccgttgcctattccacagacaatctcttcgggttctgtgatattgaagttactgacgagtatatatatgccttatattccggcagaagttaccgcaaatataaagatcagatagtatacggtgaacggattgttgtgttcgactgggagggcaatcacgtccacacttatttattaagaaatccgttcacctctatttctttcaacaaagaagagaatgcaatttacggtttgacaaacaacccgaattcagtgttaatcaaatatacattggattaatttccgcgtgagaccggtccttggaatgatgtctcagacaggtttccttccaagggcctttacccggaaacggcaaataataccacggagaaacgaatcgttagattaaaccatggcaagagaaacacgagacatagcatacccgatcgctttcatcggattcatattactggttatgaccatactggtaattgatcctgacagaatgaacgggttgacgcttgccaaatatttctggttctactccacgttattactcacgggagttataacattcggtcttgctttttactctatgtcgatcgcgagtatcgacataaccaagtcaataatgatagggattttgactgtagtgattattgacatatcccgctactctaacatggaaatgatgaacacgaaaatatttttgctagtaatcatttcctttttcttcttcgacatctttttccaccactataaaaaagccaccaagatattccaattcgtgctgattgctttcgcactactggaagtgatctggggatattgccaattgtacgcccatatccccgatatgcaaaaagacttcacgctctcaggctctctactccacacgaactcctatgccatgtttctggccatcactctacccatagctctctactggaccatcacgttattacagaaattaaaatacggttacactcgtctccttaccggaactgatgaagaacacgtgagactggaaattgttgacgatattcttttattccttctttctgccctcggactaatcgggattctatccatactaccgtttacgggaatcccatccgcatggtttatcgcaggatgtagcgggctatttgttctgtactttaaactggaccttcactcctttataaaggcctctatactccgaagtcacaaaagaactgccatatccgggctcactctcttactcgtgataggcttgcttaccaccgttttttatcgattacggaaagatgaaataaacgaacatctgttaacctggaaaatatccctgcaagtgctgaaggaaaaaccgatcactggtgtcggaattgggaatttccggaaagcattcggggatactcaaacaacctattttgaacaaggagaaccaaccgaacaggaagtagcccttgccggaaatcccaactgcccggtgaacgacttcattcaactggcaaccggcacgggaatcatcgggacattattgtttatcggcctcatcgtttccgtcctgttctccggattcaggaacatggacaaacacccggagaaactggcaatcacgggcgccttaattgcttttatccttgcgggattcatcaattcccctattcaatcattatccctctcgattttgttggtactgctaatcgctctcgggacctcagacattcagccctcaagaaaaagaatacccaaagttataccgatcatgacctcgctacttttgatcggggtcacgaccaccatcgtttacccccagttctcgatgttcaaagcatacaaacaatgggcccacggacgtctttactataaaatgaaaatatatgccacggcagctaaaatatacgccccgctaacaaacacgctacgtcacccctattttttcatggaatacggatacgccttatcacaaaccgggcaacatgaagagagtatcgccatccttcaacgagtggcacaaattctccctgacccgcaaatttacaatcgtatcggcaagagctaccaagcactgggggaatatcaactggcagaacagtattttcaaaaagcacatcacatggttcccaaccttgtgtattccaatttcctactggcccaattgtaccttgaaatgggcctgcgggacaaaacactggagtgtgcccgccagatactcacgctgaaacctaaaaaagaatcagaagaaacactacatataaaagcacaaatggaacaattaatccaatcgttggattaatcccgccgagggatcgaccggatcccattcacaccatagtacatctaaatccatcactttggggagacatcatagtctccctttcttttattctgacaaataactatattcgcgacattataaatcaaaaggcatgaaacatatccggttactcactctattcctgatcctaggcataactaccttatcggcacaaaagccccccaagcgagaattccgcggggcatggattcaaaccgttttccaaagcgaatacgcgaacatgacatcgaaagagatgaaagccgatttcatccgtaaacttgacctgctacaaacctgcgggatcaacgccatcattttccaagtacgcccggaagccgatgcctggtacttgtcggaaatagaaccttggagccgtttttgcacgggaaaacaaggcgttgccccctatccgctattcgatcccatggctttcttgatcaaggagtgccatcgccgcaacatggagtttcacgcttggctgaatcctttccgtgccggaacttccggaacctccacgctggcagaaacccacgtgtaccatgaacatcccgaatggttcgtaacctacaacaagcagctactcttcgatccgggaatccccgcttgccggaagtatatttgccgggtcgtggaagacatcgtgagccgttatgacgtggacgctattcacatggacgattacttctacccctatcccgtgaacgggatgcccttcccggacgacaacagtttccgtacctacgggaaaggctacaaacccgaagaacgggacgactggcgacgggaaaatgtcaataaacttatccgggaactgaaacacaccatcgcaaaaacgaaagaatgggtacgtttcgggatcagtcccttcggcatttaccggaataaaaaaagcacgcccgacggtagcggcagtaataccaacgggttgcagaactatgacaacctgtatgccgacgtaaccctatgggtcaaaaaaaaatggatcgattacaacatcccccagatatactgggaaatcggccacccggccgcagactatatcacgttgaccgaatggtgggacaaaaatgctcatgacgtccacttgtatatcggtcaagacgtggcccgcacgatgaaagcttccgatcttacccggaaaatggaactcgcccgttccttacgccacgtaaaaggcaattgcttctggcccgcgaatgaaatcttatggaacacccaaggcatcgccgacagccttcgggaacactatcaccggaccccggcacttatccccgcctatacccacatgtacaacggccgtccaaagaaaatagcctctccccaagccgaacgcaaggagaaaggctacacggtaaaatggtttgcccgcggtgaccgagaagatccccgtaatcctcagtattttgtcatctaccgtttcttacccggccagaaaatcaacctgaacgacccgactcatatcgtcgctgtcacccgctacacggaatgttacatccctaacaaaaaatttaaataccgttacgttatcacggctgtcgaccgtttccacaatgaatcgaaagggaaaaaaataaagttgaaataaaaaatgcaagcatgcataatttcgagaagccgtttgtaatttaactgtctgcatgcttgcgatattaataaactcagattatctctatttcttcaacacctcttccaccactgccgacagctcctttttctccatgtgggctcgtaacacgatctttccctctttgtcgacaaccacgaacatcggcacggccaacacgtggtacaattcttccactcgataggagcctttcaccgtttcgtcaattacctgtggccacggtaactgctcctcatccaaagctttctcccatgaagcccggttcgaatcgatactcataccgataatctcaatacctttgtccttgtattccttgtaaaactcccgcacccaagggaaagaagcacggcacggcttacaccagcttgcccagaaatcaagcaccaccactttgccccggaaatcggacaaactcaacaaagaaccgtcccgccgggctaacgtgaactcgggcgccgggcgtcccggttctattcgttgcctcaactcgatacaagctcgcacttcactcgccaattcgctctcccccaccttctcgtcaaacagcccgaatatctgctccaactgctccaatggcatctcgttcatcataaaatacaactggtaagcagctgtttccacggacgggttagctactataattttcaattgctcttccttcacccgcgccatgtacgcatcaaactcttttctatacacccaataaaaagtcgtatcttccaatatctccgggttatcctgcactttttttgccaattccgcatatttcgtaaaccccggcaacgtctccaccactttccactgtttgccgatctcctcatttacatcattgtttttagaaccggtaactgtcattcccttgacaaccaactctccctcctcgtccatccccacatttttccaatcccccttcatctcaatcttactattctctaatgccaatctcatctgaactgactccttcccctccggtaccaccgtaaccaaggcaaatcccacacacggggtctccccctcgaacacgaattttcctctcttcatcttcaccgtatcacaaatcactagctttcctttagagcgcatcctcaaaatcgcactaccgtctcccgctcctttaaacactcctttcaacacgtatcccgcttggctgttacaagcgaacaacacactcatcatcaataatatcaaatactttttcatctcttttatattttaaaattaactactttcctgttttcttatccattaataatttatccaccaactcctccaattcgtgctcaaaatagccacatctaactaacttcccctcacggtctatcaacacgaagtgcggaatacccgtcacgtcatataaatcacttaccatatgctttccacccggaactttcgcatcccgtacatgcaaccatggtaatttttccgcatccaatgctttttcccatgctttcaagtccttatccacgctgaccccgagaatttccacccctttatcgtgatacttcttgtaaaactctctcatccaagggaaagacacacgacacgaaccacaccagcttgcccaaaagtccaccaacaccactttactgcgtaaatcggcaagcgacagcatctgcccgtcacgctgtgccaacgagaacacgggagctatccgtcccggagccagacgctggcgagtttccaattcctcacgtatgtcggtcaacatctcgctattcctcactgcctcatcaaacagcccgaatacccgctcgaactcgtccaacgtcatcccgtctatcatgggggtcaagtacagcgctgccgcttccgatgacggatgtgccgccatgatttccagttgtttcccgaataccaactcccgaaaacgatcctctatctcctgcaacgtatccgccttccgcatcacctcgtccgtcaactccgcattttcatccagcgaagcgaaccacttttccaatcgttcataatccttgaactccggcaatctccgggtggaaaaatacacttcatccagaagattacacacctccgtgtttttgccgcccgtgactttcatatcccggataaagaaactccccccggtactccgttccagatttgcccaatcaccttgcagcttgatcggactattctccaacacgataagcatatccaacacttctttcccttccggtaccactcgcaaagaacacgccgccacgaaaggcgtcttaccctcgaaacgaaactttcccccgctcatctcggctgtatctgctatcaccgatgcgcccgtatggtcggccacggagatcaccgcatacccgtctcccgcatttttcaggcttccttttaccacgtacccgtccttaggtgtgccgcaagccataaacaaacttgcaagcacaacaaacatatttattttcatccgataaattcaattcattattattcccaacctccattctgttcccaacccatggtcgccgcttcaaacgtgtagaaaggcaatgcccaacgagggtcatccggggctatttctaattgtatgcgtgtactcaaatcggtcgggtctgtcaaaatctcgcgacggacgtaaataccggcattctccgccccgttcaaacgtttgacatcatagaaccgccagaaagcccccatctcgcgcaaacgctcatccaacacttcctgcacgctaccagtaacacccgcctcggctgacgcatcatccataaaacgggtgcgacgcaacgttttcaatgtctctgccgccattccagtctctccgctccgagcctcgcactccgccttgatcaaatacatctctgctgtcgtcataccgacaagcgaattaccggcgaaacgcgaataactgtataaattccaaggtttcaatcgttgccatttttcatgactgatatagtcttcataagtattcgtatctgtctcgacaagactcccggaggccatcagaagaggcgtgcaagaactgtaaaaatgtatccagcgagcatcattctcctggtcccaaagcttataaaaagactctgaaatcggacaagtaccccccatcccttcccaagatatattgggcaaatacaactcctcgtacttcgctaccgcctctgtatccatgtcgtccaatgcaaatatcgaactgatttcaatgacatccacaacctccccctcttcatccaacacattaatgaaccaccacggttccagttcatagtcgggatcatccttaaaatccactaacgtactatgtgctttcaacgcttccgttgcattcgacaatgccaactcataatccccccgatacagggcaacccgcgcccgaaacgcttgcagcgtcggcacagtcggacgaaaattatgtgtccggtcaaacgtcgtgcgtcccgctttaatcaacgtttcttccgccagtctcaaatcctcatagatgtgttccagcgtgtaagctaccgtttcccgtccgggaacctctcccgtcgtggtattgtcccggtaaccgatacccggcttatcgtccccccacaagcaatactgcgtcaacagcataaagtgatagtacgccctaccgaaacgggcttcaccttccacttgattacgggtggcttctgtcgtctgaatcaccttgtccagatactccaacaccgtattaaaacgataaattcgttcccaaaccggtgtccaagtccacatcatattcatcgatgctgtcaacgattctcctttccaacaatacgtgtcataggtagtcggctctcctgccaacaatccgtacacgtaaaactccggtgtcagttccaccgcatccgataacggaaaagcttccgtcaaataggctgtaccagaaatcccttccccatcactgacattagaaaacaaataaagatcggtacttccggtcagcccatagagctgatccatatggtatatgtaggcactacccgacttatccgtcgtctcatccagaaaatcactgcacgaacctaatacaatagctcccagcaagacaataatagtatatatttttttcatacttcttactttttatccattcatactcattttaccaactcttgaaaccgagtttcaaaccaaacgtaaaaaccggcatcggcttcaaactcccaagcggataattaggatccattttcccgtttgcactccaaatcaatcccaagttgctcgcctgcgcgtaaacattaatacggctgaataccccttgttttgacaacaagctttgcggcaagtcatatcccaaaaacacctcgttcaaacggatatgatccccttttataaaactgttcctgaaatacatggcaacacctatcgtactcgaatatccccgaccactctcgaaattagttttattatcatcgttatagagcggcaactcggaataagacatttggttaacatacccctcgtcatacacctcaaaagccttgtccagacgatcggaataagctgcaagatttctgctatcaggcgaaaaactatcactataactcgtcatgacataataaccgaactgtcccgtgagcataaaagagaaagtcaaccctttccagctaaacatattactgaaactcaacgtgcttttcggttctgctgcccccagatagtaagcccaattattgtcatcaagcgtttgcccttcccgaggggtcacaaaatccatcatatgcgaagattcttcatccagaatgggttctcgcgaaccatcttttcctcccaacaacacgtaaccttccggcgaataccccaccggtttcaaaaccgagtaagaaccaatcggacgccctaccacgtaggaattgccaaccgccatgtaaggcccactataaccgaattttttcaattcattgtggttgtatgaataattcagtaccccgctccaactcaaatctcccgcgacaggcaagtcagaaccgattgaaaactccacgccccggttcacgatctccgcgttgttcaacaacatagactccacgccctgcgaaatcaccggtaccgtcgtgttcgccaacacatcataagaatacttattataaaactccgcactaccgctcagtttatgcccgaaaaacgccatgtccaccccgatattcagcgtccgcgacttctcccacgtcagtgtattattaccgcgttccgcaatcgtgttaaaagattctcccccggaataaataaggctacccgaatgcaccgccacagtcgtcacgctggaggtccccgacttaccagccgccacacccgcaataccgtacgatgcgcgcagtttcaactggtctatccaagacgcccgctccatgaaccgctcgtttgaaatcagccaactggcaccgaacgaccaaaatggggaaaacttgtcacgcacatcttccgcctgaaaattggaagcatccgttcggaaactgactgtcaccgaataacggtcatcataggtataagccgcattcgcgtacaccgaaaagaaacggtcttccagcgtcgacaggcttcccaacttttcgaaaggcatatacgaagataccccgaaaatattgtttttcttcgtcacgtaatccagctccgtcaacacggaattggtatatttgttatatccgtaacgtgtcactttcggatccgcctccgtcgtggcagaaataacctccgtacctaccaatacgttaaatgcgtgtttatctttcatcaggcgataatccgcctgcccgcgcaagttataagcttcgtacgtgtgtccctcgttcgagaacacgccccccgtcgggaaataagaaacataccgtcccgcttcgcccaacgtggaatacgtattatacaaatctctcacaaaaaacgattccggctcgtaagacacgtgcttgcgatatcgccgttgttcatactgccccttggcactcacattcagtcctcactccgtccggtattcaaaaccaccttgcaccctgtaattcatcgtcttggaatagttatccgtgtaatcccgatcggcaacagggttataagtccaatccgtcggagtcttgcccgcataatattcctccgacatcaacagaggctcgtacaccgtctgcgaggtcggtacatgcacgaaattcccttcttcatccttcaaacgagtccacggactaagccatccccgcacgctttcaatactcgtaccattgctttcctccctactgaacatcgtgttcaccgccaactcgaatgtcaggtttttcgtcaaccgggcgttactcgccagattcagcaatacacgccgcttgccattctcttgcaggtaactgtcctcatcatcataagaagccgaaaaagcgtaatccaacttctccgcagcaccccgtaacgacacattgtactgctgacgcatcatacgctgaaaaatatactcgttcaaatcatctttccataccccgcggttccccaattcgataagctcctgttttttagcctcgtactcccctgcggtaagattctttttattatcccgctcgtacagcataccgtatggagccgacatataccgtctcctagcggaagtcctcgtgtaaggatcattacttgtaagattaatcggatcgtatttgtgcatcaattcttcgaaacgaaactggttctctgccgatgccatgttaaacaaataatccaaatctgcccgagagctcaccgaccagtaagcatccgctgaaatctccaacttgcttttcgccttgccttttttcgtggtaatcacgatcaccccgtttgccgcacgcgccccgtaaatagaagttgccgccgcatccttcaacacggtcaccgattctacatcattcgggttaatggatgaaaacggatcactctcaagcatataaccactgatggggaaaccatccaccacgatcagcggatcgttatccgccttccaattagctcctcccatactaacttgtgatatagtaccttgtccccggatagcgaaacgtatctgcccgtcgaccggtgcgctcaccaccgacaatcccggcaccagcccgaccaatgcttgtgcgagattggatgtcggtttccgccccaatgtttccgcatccacgatcgagtaagcacctgttgcccgttccttggaaatcgtctggtaaccggtcaccaccacatcatccagattctcgttatcctcctccaacacaacttcaataaattccttaccggacaccggaatctcctgctttttcattcccacaaacgagaaaactaacacgtgtacccctttttccggcaatttaatctcaaaacgtccaacagaatccgacacgacaccggaagtcgtacccttcaacacgatagtagctccaggcaagggtattccttggccatcgatcaccacgcctttaacaattctctcctctacttttttctgctgcaaaattatctccttccatatcacgatagtcttctcttcaatcgaaaacttcaatcccgtacctttcaaacaactacttaaaatactctcgatcgtggcatctttaaacaaaacatccctgtcttgaattccagacaaatcggcatcactatacacgaaactatattccgtgtgtaatttgatctcgttaataatttgtttaatcgatgccctctccaactccatactcatccgtacctgttgagaataaaccccggcatgtacttgcagtgcgaataaaaccgataaaataaacgtcgccttcatcattaaaataagcttcattacttttctatgcctgtctatgcaggcataaagattttttttcataactttgtaattaagattcgacaataattcaattcctgtttgcagcaggattgaaagagtttgacaaggggcagtgtttgcagcactgctctttgttttttatttcactataatcgtattcttattaatttcaaattttactttcccggtt

SEQ ID NO: 10851 - DNA, 6773 bp, Unknown
  gut microbiota DNA sequence
cttcatctacggcccggtgatgcttatcggggtgcaggcgcttgacctggctcccaagaacgcggccgggacatcggccgggttgaccgggttcttcgggtacttcttcgggacggctatcctggcgaacgtggtgatgggatacgtggcggaaagttcattcgggtgggacgggacgttcgtgctgttgctcgtcgcctgcgccttgtccatcgttttcgtcagctttacttacaaggaggaacaatacctggtgcaaaatagaaaataatgatgccttattgaggtgaagaaatagaatcattctgaccaataataaaaaaataaattgtatgaatacaaaacatttgacgaaaggaatagtggttatattgttgctattcattacgtcctcgatttacgcacagacttaccgggagatcaaggggtggtcaaaggaaattaatgagagaattgaaacattcttgaatacgactttaaccatgaatattcgtaaagtagcggtgtttgacggggatggaacagtgattgggcaagcaccacactatttggcggatgaagctttatatcgttatgccgataaatattataagggcaaaaatgataaagtttccaaggagaaaatggctattttgaatcggatggtaaaagacggtaataacgtggggaaagtttatgtcgaagatcgtgctcactttttggcgggaatgactccggaggaagtggcaaagttggggtatgattgctatgtggagtcataccaaggaaagttttacccggaaatgaaacagcttatagctaatttgaaagagtatggatttgagatttggatattgacagcttctcccgagtttttatatcaaaaatttttatcagaggaattgggaatccccgaagtaaatattctcgggatgaagtctgtcgtggtagatggggtgttgacaaatgagattgtgttaccgatcccgcaagatgatgggaaagcgaatgttatcccgactttcattaaaactcgtccacttgtagtgggaggaaatagccggggagacatggatatgctaaaccagtcttgtggtttgaaaattgtggtaaacccggatgatacaactgtccgtggggcagaagatggtcctatgcatggtctaacggtgaaagggtactgggaaaaagaaggagccgttattgttcgatgtaatgatgtccgagatccgaaagtgcgtttccatacttcggagtggggaatcagagaaaatgtgattaatcctaaagaataattctgagaagaattatcccgcatagttacaataaacttaatttatgtcattatgaaaaaaaactatttgttaaatgtattggtgttatgttgtggcctttttgtatgtacaattgcccgggccgagtctgataaagacgaaccttctaacacgaaaagcgaggtcgcacaagtcaataacgatgaccttacaaaacaagtaaataaacttctttcgatattgcctaaattctctggttatattcaaaccggttataactggggggacaagaatggagataacagatcgtcattccaattgaagcgtatgcgtttgatcattgataaaaaagtttcaaaaacctttgatttccgcgcccagttggaatgtttctctggatcagtcgataactctgcctataagaaaaaagtaattacggtaatggatgcttttgttaacgctcatattactgatgctttgcatttccgtgctggtcaatactatttgccgcttggtttcgagaattatgatatttctccgtctactttagagaccgtggatttctcgaatatttgttaccgtatggtgtgtcgtaatgcgatctcttctgcagatcttattgattatggtcgtgatcttggagtgatggcttatggagacctttttaaaagcaaagatcaaaaatttagctatttaagttatcagttgtcattgacgaacggctaccttccgacgttgaatgatgacaataaatcgaaagattttgtgggtcgtataacaatccgtccggtagagaaattgcgtatcatcggttgttacaattggggagaatacaaaggtttgaacgaaaatggagatacgaaggattatcttccgatgaatcgttttatcactggtgcttggtattatgatccaaatggtcttgacgttcgtgcagaatacggtcatattcaaagtgatgatgctaacgtgaaggaagatggtttttatgtgcttgcggcgtataaaattggtaagttcttaccggttgtacgttatgatatgtaccgtgataaagcagccaagacttctgcaaacaacaaggataacttccttttaggttgtacttatgaaataatcaaggatgttaagttccaggtaaattataccatttcggcttatcctgacaaggtaaaagatgcaggaacaagaaccggtacgggtaatagcttacaaatcatgtgtcttcttaaattctaataatactcaatctttttaccaacaaattaaattattggattatgaataaattattttttgctctggcattactttttgtaggaatgtctgcaagtgcccaacatctgggaactgagtatcgattgaaaagagttattcccgtggcagggcgtcaaggaattgctattgacagtaactattattatgtttccgacaccaaagttctttataagtatgataagcaaggtaaccttgtcatgaagaatgatcagccattccaggatcctaaaattgctaaccattttggtgatattgacgtgtacaatggggagatctattgtggtatcgagaaattcgaatatggacgtggttacaatattgccgtgtcaatttatgacgcagagactttaaaatggaaacgtgatcttccttggtctcctgaatcaggacaggtagaggtgtctggtcttgctgttgaccgagaaaaaaatatggtttggatgtctgactgggtggatagccgttatgtgtattgctatagtcttgaaacaggacaatactacacgaaaatgcaatgtcgtccgacaccctactggtgccagggaatcttcattgctgacggaaaaatgcttttcacttcagatgatggagaatctttgtataatattcctgataatatttatgtcgctgatattacggaagtgcatttcaccggtttacaggaaggaacagaagtggttaaagatactccgttcagtgtgaaacttgacaaaaacggaaagcctgtaatgcgtaaaggtaaaattgctgcaggggcaaaagcaggaagagtggagttgtttcgtgagatgagcgattttcgtcgctctggagagattgaaggtctttcaattgacccggtaaatgatgatttggttgttttaaataatcgtggaacattaattgttcttggtatgtcacaaggtccgttcaaggaagaagggtataccggagaaattcacgaactttatatctacgagaaagtaaaataattcttagcgaaggaatttgagttaaagtagataatcccccagaggttttataaagagcttttgggggatcgttcttttattggtgttcgattttagaaatcacgagtaattattttggcggataagtgttgacgagattggttggagttactgcatggagtagggatggttttgtattgcttgttttgaagatggggaacaatgggtgtcaggccccttcttttatttttatgatagtcagattatcccctttaaatatggatagaaaataaagcgacataatgtgctcaacacaccacttgagtctaactatttaaatataaatgatataaaacaaaaaagcagtcaatttattgactgctacctctgagctgatatcgggatttgaacccgagacctcttccttaccaaggaagtgctctacccctgagctacatcagcaacttaaaaaagaactcactcgcttttcttcccttcttttgagcctcttgtcggattcgaaccaacgaccccgagattacaaatcacgtgctctggccagctgagctaaagaggcatttcctaaaagggtaagcttactatgtcgcaccgctcaaccatctacccttgctgccttccgaccctgggggagttcgacaggagctggtcgcataggacttacccgggcacaaaagtacaaaaatcttctcagttaccaaatgttttcgtagatttttatagactaaatttagggtgtatatttaatatattggattatagaaagttgtttgtagatgaattttaatcttgttatataaaaatgtagaatcatgtaacctgaagtgtgaaattcgtgtataaatactagaaaaagaaacaaatattgaggactaaacgatcccaacaagcatatgcagacagaaaataacataacaggagcagagtttttatctgatttaaacgttttattatccacgagcgtgggtttgaatagaaacgtgaagttggcattaaagaaactgggcgaacatgagcgggccgatcaggtttatatcgtgagtattaatcacgatatgacatttaccatatcggaagaatggacccgtaccggggagtctgttttcccggagtcaggggagaaacgcagtttctattatgatcggaagttggaacaggatttagagagggacaattatatatatattcgggatataaatgacgtgacgaacgagagtctgaagaatatcatgcgggcgcttggggtcaattgtgctatatttttacccttgtatatatctagtcatcttttttcctttttgtgcttaagccgttgtcaccacgaggaaccgtggtcgggggaagagattgctttcttggtacaggttgcctccgtactatctggtgcgctcgagaaagagttgattttaagaaaattggtgaaacatcatgccttgtatcaggactttatcgaaaaccgggtgggttacattcttcgtctgaaccggcatttacatatcagtttctcgaacaagacgttttattccttatttggggatagtccggatgagattatcggaactcggatcggggagctaatgactgaaatggatatttcaccaaagaaattggaggaagtggtgaagtcccctgaggatttgttgatgtttaatgccaaggtaatgcgtgatgatgaggtggtatttatcgagtggtatgcttatccggtcaggttagatcgggatcacaccgaaattcacttgatcgggcatgacgtgactcgtttcaaggagatggaacgtgaattaacattgctgaaaactgaattgcaaactttctccgaaaccatgtacccgatgtggaaatcaatcaaagataatttatcgggagaaaacgaaattggtaataatgaatcatttgataatttaagtcaaaaagctatggcatttaataggctctacgaggaacttttatcaaaaattggttataaatttgtagcgaatgcatatagatcatagcgaatatacaatccttttggctgacgattctatttcgaatttggaaaagatgaaaagcctgctggctggagagaattttaaattattacctactctggaagcggacgaggtatttttacttgcgaaattgaggctaccggatatgattattattcgcctggcgctagaagaggggaagggggttacggttgtccgccagttgaaacagagcgccctgaccaagcagattccgatactctacatgacgatccccaaccgttatgacgattttcggaaggtggctgattacgagggggtggagttcgtttcccggccgttgagtaaaagggagctgattcttcgcataaataatcaattgcttttactggaatcacagcgtatcatagagaggcagaatgaacgtatccaaagcgtatcccgttctaaagacaagctatattccgttatcgctcatgatttgcgtgccccgattggtacgcttaaaatgattcttgaagcgcttgatcaccagaaagagaaaattccggatgataatataaagaatcttatcaagatgttgcaggagactacggatgaggctttcttgttgctggaaaacctgttgttatggagcaatagccggaatggattattacagccgtacaggcaggcattttctttcacggaggcggcgaaagaagtgatcgtgttacaggagaatatcgcagaggcgaagggaataaagatttacaatcatattgatcgaccttttaccgggtatgcggatgtaaatatgatgaagaccgtgttgcgtaatttattatccaatgcgattaaattcagctacacggggggaaggattgatgtggattgtagggaagaaaacgggttcctgacggtaattgtgaaggatagagggcaggggatcggtgaggagcatcagcaggggttgctggatgacggattacattttatttcttacggaacacagaaagagaaggggagtgggttggggttacagctctgcaaggattttgtgaaaatgaatcacggaaaattatggtttgaatcgaaagaggggaaaggtaccacgttttatttttccgtgcccgtagaagagagtttataaagtattactttacaaactctaggacacttgttgtagctggctgttgccggattttaacgtcttgtacatttttagcgccccccatgcgtcggttgctgcgtaatgtaattgtgcaggggtcaatcgtggtgcttcccagtttgacgtccgttgccgtttggatattttc

SEQ ID NO: 10852 - DNA, 381 bp, Unknown
  gut microbiota DNA sequence
aaattcggcatcgacctactctcccacctgaaggcagtaccatcggcgctgacgggcttaacttctctgttcgggatgggaagaggtggatctccgtcgctatagacaccttttaatgttttccagtcacttcacccggccctccggccgatcgtgacaattcctttaaagctcgtttattcatgcctttatatcaaccgtcaatcaccttgattgacaatcgaccggaacgttaatcgaatcatatcacccaccgaacgtcaactttcgggtgattagtaccactcggctttgccgtcaccggctttacacctgtggcctatcaacgtcgtcgtctacgacgaccctgtaaggagatctcatctcgaggcaggcttcgcg

SEQ ID NO: 10853 - DNA, 906 bp, Unknown
  gut microbiota DNA sequence
gagtacgagaaataaattatttaaacctctatatacacgctcggggaaaaccggttcgacatctcgttaccaaagaacaaataaagatgtaaacgtgtcccgtcaggttgccctgcggatggaatatcgacagtcaccgtgccatctccccggcaagccccaaagcaagacaacatttgcggggcacgaggttgcgtgtcgtaaaaatagcccacgtacacccgatccgaatttcccgctttcgggcgatcaatatcattttcccaatttaacgtcacggaccatccctcacgcactgcactagtaatcacgggggcatccaatgttcctactgaaaaccgaaaggtcgggaaagcccaaactcccattcccggtcgaaaacatcccccgttttgagaatgaaacagagaatcacttttattaacccctgtttctttggccataaccctccatatcggtaagtccccgatagcacgacgataaatccgccacatcttccgaacctcggtgaagcgatttgaggattcttcctccccttcccgtctcacttttctcggcccccgttgagatttacaggctcgaactttattaccgtggcgataatacgtaactccgtctatccgcaaaggcccctgtgccaagagagcaacaggaatcgacaatgtattctccatatcaataaacatttaagaattaataccttattaattccggagtaaaagtagataaaaaacttttactatgcaattaaaatcttattaaaacgctattctaagtatagcgttttaatagggttttaatagcgttttacacggtagtgatacggaagtaatcatgtcttatcctaaaaaagttgacttgttcaacaagtaaacttatgtcagtagcaacaaaatccagtggttt

SEQ ID NO: 10854 - DNA, 5769 bp, Unknown
  gut microbiota DNA sequence
gggaaatttagagaaaggaactcccgattcgatgatttcttttgataaggcaattcggtctgcggagttcatctggtctgtttgggcatatgtccttctaggagtcatggaaatatctgtccggaaattgacgttaattcttccgtccgtgttagaacctcttttggtcgtgatcacaataactccattggctgccttaactccgtagatagcggttgtcgatgcatcttttaagaaagtgatactttcaatgtcatcaggattgagcccggaaatactgctaccagaaatacttgccatggcgctatttaagtctccggaactaagaatatcatttaattgtgctccagcaaaaggaaggggatcttcttggatgataccgtcaataacccaaactggggatgcgtttccaataacagtcgaagtccctcgaactctgacttgaggagcagaaccgataagtccggaaggaatcgtgatgctgaccccgggaatcataccttggagggctgcatctatccggttgattccggcaatacggacatcatctccttttacggtgtatgtggaaccgacaacctcatgtttttttaaggtctgatatccagtaacaacgacttcttccaaggatttggaatcttcttgcaatatgactttgtaaggaatttgttttgcgtttacaattacttcttgtgatttcatgccaacaaatgaaaatacgagagtcgcaccttccggtacagagattgtaaattttccatcgttgtcagaaagtaccccgactcctttttgccctttcactgtgatggtcactgaaggtaaggtaatccctgattcatcataaacagttcctgttacttttagtgttttattttgtgcatatagagaactcgatatgctgtgtattaggaaaattaatatccaagtgattgtaaattttatatatagaggtttcatttgaattcatattaagattaataaagatattcgggggaggctttcacttctaatgtgatgtaaccagcttttccgggaactaattcctttacacggaatactgcaaaattggaattataaatatctctattaggccactcggtaaacttttgtaaggttatgatgtaaataccttctaatgtgggatgtgttgcttccgtgagacttactccccgttttaagtctgtagagtacttatagtcttctatatatttaggggatgcagtaattgttgcttgaatgaatccgaatttgttttgggcgtaacctcctgcagtgatagcttcatctaaagtattgattttatatggagttaatgctgcgaattcatttgaaagataaccccagctaacagaagagttatgtgttcccaagagaggatataactgttgttcccgataataacttgtaacttcgtcatcttctccataaaagtaacataactcgatttcctgaagttcttccatactcatttgtcgagcctgttctaaagtgaaaacttctcctgtgctgaattttaggaagtgcccgtgttccgtgttggcttgtgcgcctagagttacagtataggattttaattcatcagcgattagaattgtaattgttttgttaatcaattgtttcggttgattattatccttacatactacttgaaagttgtatgtctgatagtgagatcctccttccggtagataatcgtttgcacggaatgaataagaatattgactcttattttgtaattcggtagaatccatcgtcaacgggaaaccttttaggtataccccggcattatccttaatgtacaactcttgaatcgtaccttggtttgcgataaaatcaatgtcaattttaatctcttctcccggggctacgataatggaatctttttcaatcccgtttagcttcaccactagactcggacggggaggtagctcgtggagttctttgatgcatccttggcagaatgtcaagaagaggcaaataattaacagatagtttcttgttctcataaaattggttttaaggtttaatgaatgatctaataatttctctgtcattaaattgattttggtttatattattgtttaaaaaataaattccgcactgattgaatagttcttttggcgtttcatcgttggggtatacgaatctgcattcatggtcatgacttctgggtcttgatctcctaaacggtgatctttaataatgaatggattggtgactgttatgcctaagtttatttctgcaacacgaggaattttcgtttgataatttaatgaaattcggttgcatcgcaaatgattggccgacacggttcgttccgtactttggttgtataatgaataacgatacacggcattgtagttcccctggctcaaagagttgtccggtaaatattgagatacgtcttcatcttggacagacagggcggggatatttgtgcgtctttcgtctcctggttgttgccagcgggataatagttccgtggatgcatttacgtctgcattcgggatagataacattccattgttagaacttgttataaatggattaagtcgtttataatggcctaattggtaattaaacatagtgtttagcgagaatcgtttgtatcttattgttgtactgatccctccagaaatacgaggttcactatctccgttgtataccaaataatcaagcaatgaaccggataccttttgcatttcacccccgatttggtccataatggcgaataacggggccccgtttttgggagataatccgataaaaggaatagaccagaaaccggatacggagaaaccatctaatgcggcgtttccatttgtgaaatgttcaatggaaggttcatccgtgtaacttcttttcaaaatatctttcatgtaagctgccgtgaaattgatattccaactccagttacgggtggaaaagggagtgaatttaatttgtaattcgtatccctcgctattaatggcaccactgttaatgtacatttttcggaaaccattttcaattggaatctctttttcaaccacgatatctgaagtttcctttttgtagtaatcgaatgatatttccaggttattttcgagtaaagaaagatctagtccaatattccatgataatgttttctcccattttagatcaggattggggagttgttccaattgtagataattctcattcgtgatcggatcgcttggtacatgactgacgagagcttgcggggatacattagcaaccacgttaccttgtttcccgtgagaaatacgtaggatcgttgcgttgagccaagatttgttagggaaccatttttcttggtgaatatcccagcgaattccggtggaccaaaccggataaaaacgattattcgtgtgttttccgaagcgattggaggcatcgtttcggacattaatacagatcgtgtaccgaccgtcatacgtgtagccgatggtgccatactccgaaaaagtgttctcaatccggtctaccagcgtcatatcatgcttgctatagggtctatcagatgattcaacaagtgtaattccgggaaattgttcctgcatctgttgaaatttatctgcgggagaacgataatcgtgtaataacgagtttctttctccttttacatatccccattctactccttgtttcccatcgtatttatttttgcgggtttcgataccgagtgttgcggttacagaatggaagatttcttctccccatgttttccggaagttgatctgtcccttcaccgtaagagaacggcgggtatttcgtgtgtagtcaaggataccgcctgtcgggagcggactgatgtattccatgagcctctgcacttcttcgggaagagtggcgttatagtcacttccccggagttgggcaacgttccatgattgtgcatcagcccatagctgactgtcgtttgtcccttgtgagtatgcgggagtaaatgttatatttaagtaaggcaggagattccaagttaattgtgcatttaaattgacctccgatgttttgttgtcatttcccgtgtgctgtaactcgtgcagcatattaaagtggacacgatttctaatagatttatacgttccgtttttccggtacgataatgtcgttgctttacccttcgtgtaaaactggtcgctggtgatcgtgcggctagttgttagggcatattgttccgggttaattcccgtgtaataaccggaggtcgtgatgtggtacccggagaggttcacgacgattttgaatttaggggatgaattgtaattgaaattcaacattccggtgaacgtttcccggttatttccgacgtatgcgctgttttccttccgatacccgaaagaagagtagtaagccatcccgtcctttcccgaattgaaactgacatggtaattctggctgatggcggttctacctagtgctttgaaccagttggtgtttgttttctccagtcgggtgatttcctcgttaaattctgcgtaggaaatttctttattaatcattttcgaataggctgcctcgtagccaatttcttccgggaaacggggcaaaggtatgccagcctcgatcatttcttgtgataatttaacccgttgtgctgaattcatcaccttggcattacggtaggaaggaaccggactaaacgtgatgtcacttcggaatctcacgcttggttgatggggacggtcttgtttggtcgtgatgacgagtaccccgttggaggctcgaatcccgtagatggccgtggcggaaacatcctttaacaacgtgatactggcgatgtcgtccacgttgattcccgacaagttgttacccataatactggaacgggccgagttacttagatcgttttcgtttaacaggtcgtaaagcgtattccgatcaaaaggccaaatattttcccggatgatgccgtccaccacgatcaatggttccgggttgccgataatcgttgaagttcctctcactttcatgcgtcccgtggcaccgatattcccggaaggaatcatgatgtccaacccgttcaaagctccttggaatgcggcttcgagggaggtagctccgggtgtacgtatatcttgggcgttgaccgtggaggtggccccggtcatttcgttcttggcgataatctggtaaccgtttacgattacatcttctacttccgaaacatctgtcggtaaggtaatcgtgtatgaatcttcttgcgtgacagtggtgtggcaggtctttttccccacgtaactcgtgatgagtatcgtgttttccccttccggaatccggatagaaaattgtccgtttttatcggaaatggtaccccggttacttcctttcaccagaatcgtggctgaaggaagcgtgatcccgttttcatcctggatgactccttttatcgtgcgcatcgtggggattgggatcgtgttctttttcgtgataatgatggtttgattatagatgtagaaatccaggggaagtccttgtaggcagaaggccaagacttcctgtaactccgtttcgtcaaaatgaatggattggcggttatcgatttcttttacatctttcatctgatacatcatatcgtattttgtctttttcttaatctttttcaacacctcttccagcgtggcgttgttcatgtgaatgcttattttttgagccaatatttcccttgaagtccccaataggactacaaaaattatcaagagaatgaattttctagcatccatcaccatcgtttattaggaaaacactaaattatttcatagcttt

SEQ ID NO: 10855 - DNA, 7256 bp, Unknown
  gut microbiota DNA sequence
cggatattgttaccctcctttttgaagttaacacccgtggcaatgtgaataattttcaatatttcttcatatcctttgtctctttgaattgagataaaacattttatatcttgtagttccggggtgtcaaatgtgacgtttaaggcgaaacttctcccgatgattgtcatgatattaccaagtttgacatcctcgaatgcaaattcacctctacgccaagccgtttgttcttccacgtcaacggagtccacttgcaacacgccttcatgcggttggaaacgggcttgcaatccgggagttagtatggtggtttgtgttgtggagtccgtttgtgaatgacaggtaacggcaacttttccggtcaacagggtggtggtcaccatcagatcttcggggtaagcagtcatgttgaatgtggtgccaagtaccctaacatccattgacttatttttcacgataaaggggatattagaatgtgttacgtcgaaatacccctccccggaaagttcaacgacacgggcgtctttcccgaatatggacgggaaaataagcgtgctacctgcgttaagatgtacgtttgtcccgtcgcttagttggagtgaatattcggtaccttccggaacgactagtttgtttgaagaggcagagggtacttccttgtcgtgctggaaagaaacttttccttcattcgtgttgatgattcgtaatccgttataatccatttgcatttgctggtttaatttgatttgtttaccgtcattcaatacgaggtaggcactttgtgccggcaaatgggatggtgaaattgtagcctcggtggttgggtaaaagtaatacccgatacctagcattacaagacaagctacggcagctgcgtatttgtagaatatagacaattgtcgttttggacgggtggcagcgatgaatttgttcaatgctttttccgtatcaaaactatcatgtcgttttatattttcatgcagccgtacgggtattcccacttcttcgtggagccggggagaatcgggagctacttgttcccagtcaccattcgataatgcctgttctatttgttgggcaatacctcgggctttttttattttatcttcgacttctttcatttttgctgattttgttattaaaacaactcatgacgggaaagtgtctaaagaaaagtgatatttttttgctttttcatgtttttataagattttggcgtgtttcaagtaatagggaaagaatagggtagaacttgggatgtgtagccgtgtcgtgtgattgttggtctaccgttaaatcactgttagtcgacctagcccgcatctagccggcacctaaccggcacttagccgccattttggggggatttaagtaaatataacatatggtaggtttttgtttggtaatgcaattttattgctagtgataggcaattttgatgcatcaagagagtttatcccaataattgcatttagattagagggagtaaacgggaatgattaattgttttgttgcaagaaaagtaggagtagagtgtatagttccggagaaaccatttttttcaatagcgatatgcctcgttgtttttgtgacctaaccgtgctggatgatgctccggtcaagctggaaatttcggtgctgttgtatccttgcatcacaagttccatgattttggcgcattctcccggaagatggcggatgtagtctgatagtaagctgataatttcactctcgacaatcgtgtcccaagtttgctcgtcggcttcttcttgaataagattttgggcatgttcgaccacgatattgtgatgtttaatgtagtttagacaacagttacgagcggagaggtaaaggtaggatttcagtgcgagataattttcaaaatggttttctttttcccataaccggataaaaacctcttgagcgatgtcttcggcaatatccgtgtctttcaggattttgctggaatagtaagcaatgtcctgaaagaattcccgaaatagctgtttgaaagcctcatgatcacgggcgttcagtttgtttaaaaatgttatgtctgtttcggatgatttcataccgttgcaaacttacagatttttagtctattttgaatggattgtcattgaaaaaatgtggttgggagtagatttattattttttgatcgttttagacacttttaccgggtgagttgtttctacgatatgattggataaatcaaccttaaaaccaaattgattttttatgaagaaagtattgttttgtattgtatgtctaaacatggccttgttgtgtttcgggcaaccggtgaaagtaaaactggtggcagagcgggaggcttttgttttgttcggtgacgaacgttatgatttgaaaaagggagaaatccgttggattactttggagggagaagctatgtatgggagaagattgtgggctaacgaagagtgtattttatttttagaggctggggatgttttggaagttgttttgcatgaaaataatgaattggagttaaaggatgacggtagtttgtgtgcgactcggaataattggttacgtaaagtgaatttgctgaaacagagattacagtatagccaacttataccccagttacttccaaaggagtatgagggattaaatctggaaagagcgtgtgattccttgaatgtttggttggctacttatttggaggaatatccggcagaccggaaaaatttcgagaaagtgatgcggacggagtttaagtactatcgtttgttggaagaaaatagcataaagttttcaagagcaacttttcaggaattttccaaggatgcactggccggttttgccgaactgatcccggatgcggaagatgatcgggtggttcattctccttcctactggcgaatggtggagatgtacgtggattatttgcgggtagaggatccccgtgggttacaagggaaaggagatcggatatatgaaaacgagctgaagttggcaaagtatttcccgaaaggtacggtgagagatgaaatagcgtacacgaatttggacaatattctttattgggtacgcccggatagccggaaagagttcgataaatgcgtaaaacgattgccccctcgttatgctgttattttgcaaaagaaattgaataagcaagatgccgaacgaaaggatcggaagttagtgccggagaatttgttcccctcgttatctggagaaaccgtggacggggagagggtagatttgtcttctttcaagggggtgtggatattactagacgtgtgggccacgtggtgtgggccgtgttgcaatgaaattcctttcttggtaaagatggaagagcgtttgcaaggtcgaaatatagagtttgtgtcattatccgtggacaaatcggctgatcgggaaaaatggataaagatggtgagggagaaagagatgaaaggggtgcagttgcgattgaccggtaagaaaagcgagttaaacgagatgttgtgtatcagtgggattccgcattttgctattattgatcctcaaggaaagttggtgtggaacgctttacccggggtttcttacgggctgatataccggatactgaaagaagtgcccatgagataaagtgtaaatgtattttttattgattattcatgaaacatattatattattatttgaatgtttgggatgtctattgatgggatgttccgatccatcttatcatttgaccgtttctatgtacgggaacggaagtttgccgggagacacggtgtatctataccgttttaacgagcagaccatgcaatttgaaaaaggagattctgccatgctaaatgatcggcaacaggtgtgttttactggtaagtacacggggccggagtacgtgagcgtgggagtaagaaaaaaggctacttcgaagttctttatgttggatactacggaagtatttgcctataatgttttattatacgaggagcctaatttctttaatccttccgggtataagttcacgaagaaatatatgatcgtggagggaggacgtgaatcggctattctggattattatcaagggatggaacgtttgactttaattcctcaccggcaagagaataatgaagcatttaagaggaacgtgatcatggatatgctggtaaaatttccgaattcgagagcgatgttgatgattttgaatggtgcgagaaatcgcttttcgatggatcggttggaggaagcattaggcttgtttaatgctccggaattagttgaacatcccttgtataaggatttggtcacttatcgtgagacgatgatgaagacggccgtgggacaggtagtacctgatttttcgttaccttccaagaatgggaaagaggttgcgattagttctttccggggaaaatacgtgttgttggatttttgggcttcgtggtgtgggccttgtatcggagagatgcccaacgtgcataaagcttatgatttgttacatgatgaagcgtttgaggttgtttcgatttctacggataggaaggaagccgattggcgaaatgccttgaaggagaaacagatggaacattttgtgaatttgagggacacgaaagatgtcttgcatgaggtatttaaccgggaagcgattcctttcattctgttgcttgatccacagggtcgaattgtggcgaaagaattgcggggagagaatatttacaaggtagctgttgaaagtatgaataagtaattgattaatgatgaatgttatgagtacattgaaatataatctgttgttgggattgttgatttggacgctggtggcgagaggacagcgggttgaaattttccaccagggagaagagcctatatggttatcggagcaacatctgtttgtctgggataaggtaattcctttacattttgaagagggaaagtccgtgtacgaggtgcagcatgccccgaaagtgtttcgtttggaaactgagaccggattttcgtcctgtttttttgttggaaataaggatcatgtctcggtgactgtgttaaatacagatcctttgaatattaaagtggagggagatgttgccagtacgtatttttacgagttggagaatgttagtcaggagtatacaagagggaaattggagatgacggataattatatgaaggcgtggcaggagagggatacaactttgtcgtgtcgagtgaatcagcagttggaacggttgagggcacagcgggattccgtgtatatggacgtggtggatcgtgcgatgaaaaaaggacgtttggaggaagtgctggtgaaggcaaatatgtcattagctttaaagagtaggatcgtacagaatttgaaaaatgaaggaaagatttccagccgattagtggaagagttggatttgtacacgaaaatgtatacgccggattacgtgtattatttttattattacccgtatgtgtggcaggagcagatgaattcatcgtgtccggatggagagaaaagaacacgattaatgaacgaggtgtatcgtgttatgaaacaggagttttataacacgttatgtaatcgcttgggagaggggatggcacgggaaaagttaatcgatcatgtgaagagtgtgtctgattttgactattgtatcggggtacatatggagctggatgagcaaacaaaacgggacacggcattaaataaatttgttgagcgcatagtgagaatgtatatgacgagatcgggaaagataatggggaatttttcttcgaaaacctcggagggaaatatcgtgttgagtgttagtgggacggataatacggatcaggtgatcaaaacgttagaaagtgtgttagggaagtagaaataacggagtgtcaaagcggcactccattatttattccacgtacagcaccaatcccttcaaatattccccctccgggtgatagatactgatcgggtgatcggcaggctgcgtgagctggtgtaaaattttaactttcctgcccgtgttggctgccgcggtgaagaccgtttggcggaagaggtcttttgtcatgacctgcgaacaggaaaaggtgaagattaacccaccgggttttacaacctcgattcccttacggttcagttttttgtatccttgaatggcattgtctagcacgttctggtgtttggcaaatgcgggaggatcaaggatgatcaagtcatatttgttgtgtgatttatcaaggaatttgaaagcgtcttccacgaatgcctcatgacgagtgtcgccggggaagtttagttccacattttggttggttaattcgatagctctggctgaggcatccactgaatgcacgagttttgccccacctcgcatggcgtagaatgagaaccctcccgtgtaacagaacatgttgagaacgtttttgtcgtgggcgtattgttctaataagcgtcggttttcccgttgatcgacaaagaatccggtcttttgaccttccagccagtccacgttgaattttaacccgttttcgatggccgtgaagttgtcggtgtgaccgtacaagtagtcattcttggggttaagtccagccttaaaaggaagggttccttccgacttgtcgtatatggcaatgagtttatcccccatgacttccaacagggctttcgtgatctcttcccgaactttatgcattcccacggaatggaattgcacgacggcaacacccgcataatagtcaatgacaagtccagaaagatcgtcaccttccccatgaacgagtcggtagacgttgttgttcgggttggtcgccaaaccgatagccacacgtgtcagataggcctgtcggatgcgttcaacccagaagttatagtcaatttcctcttccttgaatgtgagtacacgcacggcgatactcccgatctggtagtggcccgtggcgagatattcgtcgtcactgttatacacttgaacgacgtcaccttcctgtacgtcccccttgattttggctattgctcccgagaagacccacgggtgcagtctgtataaagatctttctttaccggcttttagaactattttgctcataattattcgtgtcgcaatgcaacgttactggttacaggttgacaagttacaagtttgtctgtgacttgacggggcaaaagtagataaaaaagcgataaaaaaataccgggaacgctattttgctgtttcccggtgttaaaatctttttgctacacgttcaagagttccctggctttgtccaagatggccgtgtcatccaaaacgacaagtccgccgtcag

SEQ ID NO: 10856 - DNA, 4224 bp, Unknown
  gut microbiota DNA sequence
tgtcataattgtcggctccgaagtagttacgtacggtgtctgtactgatacccaagtcttctgcaattctctgcatgcttccgtggggtagcatgtctttgatttttctcagctcgttaaaagtaatagtataagtcataacgtagtaattttagaggttttatgtgcaataaatttagaaatatattttgacaaaagcaaatagaatgtttatcattcttatttttgttataaaagtatttctatgtattgtattgattgttaggtgtttgatttgggtatttagatgcaatttattttataaataaatttatttcgtgcaagccactactttttgtacctttgtaaccgtatagtttaaaaacgtaacacgtatgggatttcaggatttaaatgtaagtaagcaaattttgatggcgttggaagaggctggtttcgagaacccgactcctattcaggaagaagtattttcagtcagtcgctccgggaaggatttgatcggtatcgcccagaccggtacgggaaagacgctggcttacctgatcccgatgttgatgaaattgcattatgcgcaagggctggtgccgcgggcgttggtgattgttcccacgcgggaattggtggtgcaggtgtgcgagagtgttgaattgttgacggagttcatggacattcgttgcgtgggtgtgtacgggggaacgaatatccggacacaacaagatcgggtgttcgaaggagtggacttgctcgtggctacaccggggcgtttcatggatatatattataatggtatcatccgtacgaaaatgatcaagactgtcgtggttgacgaggccgatcggttgatggatctgggtttccttccgcaattgaaagggattttcgaggtgttaccggagaaacatcagacgatgttgttttccgctactttttcggaggccgtggagagtctgtcgcgtgatttcctgaatgatccagtacgggtggaagtagctcgtcaggcaactcccgtggcgaacgtgaaacagtatcgttatgatgttccgaatatttcgaccaagatcaatttgttaaaattgttgcttaccgataaggaaaatttcaagaaagtgatgatttttaccgagacgaaaaaaaatgcggatcgtattgtggagcgtttggccgatcactggaaaggtgagttaagtgttattcactcgaataaggcccagaatactcgtctgaaagctttgagggcgttcaaggaaggggagacccgtatcatggtggcctctgacgtggctgcccgcggtattgacgtgcaggatgtgagtcacgtgatcaattttgatataccttctcttgcggaagagtacgtgcatcgaatcggacgtacggctcgtgcgggaaaagaaggagccgcgatcagtttcgtgtcggaagtcgaggaagatcgttttatggatattgaacgtttgattaaccaggaagttgaaatacttgatttacctgaaaagttggaaatttctcagttgctgctggaagaggaacaggtgcagaccaataatattgtttatcaacgaggaaaaccgcaaggaggcggggctttccacgttaagaaggcaaaaaatacatatactgccgaggataaccggagaaacgtgatgaagaaacgaatggcaaagaaaaagaagaagtaataaaaaaagatcaagaattccttggtctttttttttatttttcccaaatttgctacgatgaaagataaaagcgtcatattagtcagtaaacttttcttgaatattaagaagcgcgacacctttgtttgttaaaggtggcagtctttcgtaccccccatttatatgcttatgttattaatgaccttccggtcatttcttgagaattatattacaattaatttatatcattaactatttaaagtttaaagattatggaattaccttttgcagaatcgtggaagattaaaatggtagaacccattcgtaaaagtactcgtgaagagagagaacaatggattaaagaggcacactataacgtgttccaattacgtgcagaacacgtctatattgacttgttgaccgactcgggaaccggttctatgacagatcgccaatgggccggaatgatgctgggtgatgaaagttatgctggagcatcttctttctttaacctgaaaaacatgattactcgtttgaccgggttcgattacgtgatcccgactcaccaaggacgtgctgccgagaatgtacttttctcttatcttgtaaaagagggtgatattgtaccgggtaactctcattttgacacgacgaaaggtcacatcgaaggtcgtaaggctatcgcttgggatgtgacgatcgacgaggcaaaagatacccagttggaagttccttttaaaggaaatcttgacccgaagaaattggaaaaagtattggcagaacatgctgataagattccgtttatcattgtaactataacgaataacacggctggtggacaacctgtttcgatgaagaatatcaaggaagttcgtgctattgcggataaatatggcaaacgtgtattgttcgattctgctcgtttcgctgagaatgcttatttcattaaaactcgtgaggaaggttatcagaacaagacgattaaagagatcgtgaaagaaatgttcgataacgcagatggtatgaccatgagtgcgaagaaagatgcaatcgtgaacatgggtggattcatcgcaactcgtcatcaagactggtttgagggagctaaaggtttctgcgtacaatacgaaggttacttgacatacggaggtatgaatggtcgtgatatgaatgctttagctatcggtttggatgaaaataccgaatttgataacttggaaactcgtatcaaacaagttgagtatttggcaaaacgtttggatgaatttggaattccttaccaacgtcctgcaggtggtcatgcattgtttgttgatgcaccgaaagtgttgactcatgttccgaaagaagagttcccggctcaaacgttgaccgttgaattatacttggaggctggtattcgcggttgcgagatcggttatattttggctgaccgtgatccggtgactcgtgagaatcgtttcggtggtttggatcttcttcgtttggctatcccgagaagagtgtacacgaacaaccatatggacgtgattgccgttgcattgaagaatgtatttgatcgtcgtgagcagattactcgtggtttccaaattacttgggaagcaccgttaatgcgtcacttcactgttcagttggagcgtgctaaataaaaagaaaaggggcgaaagcccctttttgtttgtgaagtttgtaaactatttctttaagctagctagagctgcatcatagttcggttcgtgagtgatttccggaacgagttcttcgtaaataatctttccgttttcatcaataacgacaacggaacgagccaataatccggctaaaggtccatctatcatttctaccccatatttgtcaccgaaagcatgatctctgaatgcagaaagaggaattactttgtcaattccttctgtggtacaaaaacgagcgtgtgcaaaaggaagatctttagagattgccaatacaatcgtattatccatttcagccgcaagtttattgaacgtgcgtacggatgttgcgcatacgctagtgtcaagactggggaaaatatttagaacaatacgtttacctttttcgcttgccaaggttaattcagataaatccgtttttactaatgaaaaatcaggagcgattgaaccaactgaaggtagactaccttttgtatttatactattacctgctaatgttatttttgccatagtgtttcaaattttaatgtttgacttattatcgtttttcaaatatataattttaattttgtttcgcaaaaagaaaattcatagcttgttttacgagagtttaagaataaagttttacgaaagcgagtgaaattttgtctttgttaagtgtataacgggtaatgatgcgctaggagttcattttaatctaaaaaaatatgtgcgaatatttgtatttatacgagaaagcgctatctttgcaccgtcaaaattgaatgacactcggttcggtagctcagctggatagagcaacggccttctaagccgtaggtcttgggttcgaatcccaaccggatcacagaaacgctggacagaaatggacagtaaat

SEQ ID NO: 10857 - DNA, 3180 bp, Unknown
  gut microbiota DNA sequence
ataaaatgacttttgcctctccttgtttttatgttactttaataaatatgctacctcaaatcgataacatccacttctggatgggcatccttgtcaaaacggaagaagtttacatccagttcttgctctggtttctttaggcttttaatggttatcacgacgtcgttcccgtctttaccgaaggacgtgactttttctaccatgtttgtttttgtgttgatccataccccaatcttggagatctgtttgtgagattgtttcggggttaactcgatgtaggctttgccatccttgtcttccaccaacttctgggtgaacttctggttgtgaatatcgaacaggatagaaggattcaacatctcgtcttcgttctcgtccgggtttttgatgtttacctcttcttgatccggcatgtacgtgtagattacttccccgtcgaaatagttgatcacgtccatcacatcaatgcggtacatcttgtctttcatgtatgccttcccgtgatgtgtttcattaatatcttctgccttgttgatcatggaaaggtcaaaaacgatttccacggcagggtaggacttgatatgttcgactgttttatccagaattgcctttgcttttgcgtctgtctgggcgagagcgatagaactacataacgccaagatcatgaatgtcagaatgtacttcatacaatgtgttttttatattgtctttttcttaaaatcaaaagcaaatatagggattatcccgtagatgcaaaaacttatgggaaaatttgctactttcgcaccgttttttgaaaaaggaaatggacaagtttaaagggattctatttgcggcattgtcagcggctactttcggattgattccactgtatgcaaatcaggctatattggacggggttttcaatgaaacaatattagtgtaccgttacgggatagcgggaatcgtgtatgctatttatttattgctccgacgaatgaatatgagactgacccgacgagaggtgaaggaagtctcgcttgctggggttggagggtatggaatcacggcttttttcctgatgtggtcgtatcattatatgcccacgggtgtggcgactgcgattcacttcttttatcccgtggtcgtcgcattgctgatggctatcttctacaaagaacggctacccttggaggtgaaagcggggatcgtgctggcgatatgcggggtgtacctgttgtcgtggacacccggggaggtgaaatggctaggattattctttgtattaatgtcaacggtgacttatgggtgttatattaccgcactgaaccgtcccgtgttaaagcggatgaatccggacgtgctgacttgttacgtgttactatttaccgcattgttctacttgatcttggccgtggcacagggaaagatggaaatcatcacgagaccccggttcctgctggacatggtgcagttggctatattgagtacaatcgtttctgcccggttgctggtggcagccgtgaaattgatcggttctgtaccgagttccgtgttaggaacattggagccgataacggcaatcgtcgtgggagtactttatttcaatgaacaattgacttacgcgaattaccttgggttattgatcgtgatcgttgccgttcttgtcgtgatttgcaagatgaaaaaataagggggaaaacttccgttattatgatgtaacctatttatttttggctatttttgcgggtgaaattgacttttaagaatatcgtatgctgttgtttataactataaacttttacacaataactgatatattgctagccgcttttatattttatcaggtttataaactggtgaaagggacggttgcgataaatatatttgccgggatttttacattctacgtggcatggttgctggtgaaagccctgaatctggagttggtttctggtatcttgggacagtttatcggtatgggagtgattgctttgttgatcgtgttccagcaggaagttcgccgctttctattattattaggtagtaaatataacctgcaaaacatatttaacttggaaaggctttttaccaaaacttctataaaagatgaggttgctgccgctatcgtgcaggcctgtgattacttttctaaaacaaaaacgggggctttgatcgtgttgtcccagaattcggagttgtataattatgcgcaaacgggcgtgttgatccgttcgatcgtgtcggaggagttgcttgaaaatatcttctttaaaaattctcccttgcatgacggtgcggtaattattgcggataacaaaattctggcggcgcggtgtattttgccggtttccgataacacgaatattcccgggagtttgggattgagacatcgtgcggcgattggaatgagtgccgtgaccgatgctcacatcatcgtggtcagtgaagaaaccggaaatatttcttttgtgaaggatgggcatttcaaggtgcggatcaccccgcaagaattgaacagtttcttgcacaatgatttcacgggtttcgtcgtgaataagtaatcctgttttcgtttctcttttatcatattggtaaattattcgttcgtgtaccttggttcgcttgtggtctatggatagaaggggacatgaacattgcatcttcatagcatgaacactgatgggtgttgttgatgagttagaggagggtatctgtctagtttatttcctagtttatcccatgatattccatagaacaaacgctggtcacaggtggaagatagggtataaagacgtatcatttccgaatcaaagacgaatcaaagacgttcacgagcggctttataccggctttgtaccgaggttgatacctgtcttttaccttatttcaatagtattatcctgaaaaaagttcccattctaacgttttgccaatcatgcttttggcgtgtattgatgaaaataattgaaaaataattgtgaaaatatttggagaaggggaaaagtttgccttatctttgcacccgcaaaacaagaaacagtgcaagcatgaacgaggctagaaaggtggtttcttgtaaagttcttgaaatgttgaaatgaaaataagacaatccttcttttgcttgagtaattcaaaatatcgaattacgaggctcttaaaaaaaagtttgaaaaaactttgaaaaagatttggaag

SEQ ID NO: 10858 - DNA, 358 bp, Unknown
  gut microbiota DNA sequence
tgacgggcggtgtgtacaaggcccgggaacgtattcaccgcggcatgctgatccgcgattactagcaattccatcttcatgcaggcgggttgcagcctgcaatctgaactgagaatgtttttaggggtttgctccacatcgctgtcttgcttccctctgtttacatccattgtagtacgtgtgtagcccaggtcataaggggcatgatgatttgacgtcgtccccaccttcctccgttttgtcaacggcagtcctattagagtgctcttgcgtagcaactaatagcaagggttgcgctcgttgcgggacttaacccaacatctcacgacacgagctgacgacaaccatgcaccacctg

SEQ ID NO: 10859 - DNA, 979 bp, Unknown
  gut microbiota DNA sequence
ccggatcttccggctgaagtgcgtatgatgataccgtttggaggctcttttcaaagtgaccgttcaaagattgaggaattcaaggctttcgaagataatattatcgtgaagagtatgatgacttacacgacggataaagaaggtcctttgaccacgatagaggctcgtaatatcattatcttgccggagattccgatggttccccgttatgcggatgaacggattggcttttttgaagagtctcgtaaattatttgacgaacatcatgatcgtttgcaacaatacgggattatcaatcggtgggatttgcaaccgaaagatatggataagtacctggctggagagttagtagaacccgtgaaaccgattgtttggtacgtggaccccgcaattcccgagaagtggagaaaatacgtgaagttgggtattgccgattggaatatcgctttcgaggctatcggttttaagaacgccattgtcgtgaaagattacccgacagatgatccgaattttgatccggatgatattcattataattgttatcgttttgtggcatcgacaagagagaattcaatggggccgtcgtggattgatccccgttcgggagaaattttatgtggagacgtgatttcgtggtacggagtggtgactttgctgaacaagtggagaatgatccagaccggggcggtagatccttctgtgcgttgtcccgtgatgacggacgagaatatgggagaagccatgcgttacgtggcggctcacgagatcggtcatacgttagggttaatgcataattttggtgcatcagcggcttatccggtagagaagttgagagacccggagtttactcaaaaatacgggacgaccccttcgatcatggattacgcacggtttaactatgtggcacagcccggagatttggagaaaggtgtaaagttgacgcctcctctgattggcgagtatgataaatttgctatta

SEQ ID NO: 10860 - DNA, 2789 bp, Unknown
  gut microbiota DNA sequence
ttgcatattccggtggatacccgttcagcatttccggtgatatccgttcagtccccagttagtattcagtatcgttggcaaagttaatacttctttcttaggctctctcctttgaggtcaaattttattgccttatgcacaattctgtccagacaggcttctgcaatgagctcgctttggaacacatcataccagtctgcaacgggaagctggctggccaggatgagtgctttccggttgtaccggtcatctatgatctgttcaaagtcatgttgtacctgtccgtccagcttgaccatcccaaaatcatctatgatcagaagatcatgtgcgttaagctttcggaagaaatttgtctcccgtccttccagatgtacaagcttcaggttctcgatgagcatgttcatcgtgaagtacagtaccttccggccgttcctgcatgccctgtcacccaaggcacaggcgaagtaggactttccggtccctgccggtccggtaatgatgaccgtcattccgcccgtgatgtaatttccggttgcaaggtcggcagcagagcaggcctgtattccccttgccgtgtccgtttcaagttcttccatcgaggctctcagacggaagccggcattttttataagacgctgtatacggttgttacctcttgtgtcacgttcgtactggagcatgatctgcatgccttcacgcagggtaagcttgtccaactgatgtgtttcttccagggagctccagcagcttgccattcctggaagcttcagctcgtgcagtgttctttctgtttcgttgctcataatcatttattgttatttgttcatgtcatttcctgtaaaatagctttttccacgcatgtttccgtggtttgacggtgtaggcgcatggaagattaccgtctcgtctgcggatgcattcatgccgttacgtctgagtatggcttcaaacttgctgtaggagtaaataccgtactccatgcactggcggcaggtaaggtcaaacgtggcaaggtcatacttccttctgaggctgactatggagttgcacagcttgtaatacacctcttcaggctgtgtggtacgtttggggtcaaagattctttttacatactcatgacagtcaggtgatatatcttttgctttctccacataataggctgccgaacgctccataatcaccctgcagctggatgcgagatgttccctgactgtggtatagccgtatgtatggctgcggatatgtgaagctaccagtttctgctccacataggccttgacccatgaacgggtaaagactactcttgcctgttttcctacatggatataggggacggagtaaaaatgggtcaccttgtcctgtctcagctccacatggcagtttgcctgtactttcagatcggcatacaggcgcatttcatagggttccggtttcaagggtttcagcagctccttctccttggcatgaaaacgctcctcacggctgtagggacgcttctgcatacgggttcggttgtgcctttccatcagcttccatacggcacggttcagttccatgagtgaatgaaagatgcagttacgcaatctggcataaatacggttatatgtaattcttacggagtcttctaccagagccttctgtgtcggcgatgccgggtcacatggcagcactacaaaatggtagtagttgcccatgtcctcaagagccttgttcagcttcggctcatgccggtcattgctgattaccgctgatttgagattgtcaggagtcagtatgggtggtacaccgcccagatgttccaggcacatccttatggcatacaggaagtcctccgtcttctgcgaaggtacacatatcacataggtatagtcgctgtaaggcaggcaggcgacaaacacctccaccttgataatttctccggttgcggcatccacataactgagcttgtcaccggcaaagtccaccatgagtttctcacccggtctgtaggtgttggcaagtacggctgtaacatccttcttcgcaacgagattctgcttcagatgataatagaactgtgacttgccgtaaccgtcgggatgagtcgcacggtattcatcgaacaggacctgacggcttacatgggatttgggatccgccagcagttccttgtatctagggagcaggatcaggaactcttccattctcctgtccgtatatgccggagaaccggcatggaacatccgttccaactcgggatcgtcaatctcaaggaggtcgctgatgttccatccgttggcttttactgtattcacataaccgttgacggtttccttgtcaatcggtaacttgcggcttataccgcggttggattctccggcctgcttgagctggagtacttgttttatcagactcatatcctttgttgttcctgccatgactgtgctgttgcgtataaatttatcagcacaaaggaaactgaaaccggagaaagaatgaacggatatgctccggaaacgaagatatacgcagacaattctatgcacgattgaacggatatactccggaaaatctgaaggcatacgtctaaagtgaacgggtatgctccggaaaaaaggtgctacaacctgcaattctcggaggtggacggatatgctccggaaaaatcgagattttaatgtctggttatccattttttcatccttttaggggatgaacggatataaaattgtgcttttaaaggctattttatgctttataggctgccggaaagtgaacgggtatgctccggaatatgtagaataaat

SEQ ID NO: 10861 - DNA, 5058 bp, Unknown
  gut microbiota DNA sequence
atttacgacgacgaacgtgaaggtaaactgcccgaccacgtaacgggaaatcctggatagaagtcgggaccgcgaaacccttggataaaacaccctgaccgctatactcggctgggggaatatttttctcgtcaaggtatatatcaattcgagcactggtagtgcacaccttcactacctcgaaacaagcgaggatatcacggggtaaaattaaatctagaagttctttcatcacgtcataattattaaacacgcgaagataacacattgagctctgatccacctaatttttcacgtgagccagattacaccatcttgctttcgaggtggatagcattgacgaaaccagaaaggacctagaccagaaaagtggcactcacgaatctgtacagacggacgaatataccaagaaacggtttgttttcttaaacgctcccgacggattgcctatcatcaattcttttccccacataaacaccatcccctctcgcacgcctgcattcccaatctttattgcagccttgcaatctttcattttatatttcctaatcaccatcatttcaaaatataaaatcaatattttgctaatagactttatcttctattcagaagtaccaaattgatcttacttaacaaacaaaatgtcccgaaaagaagcaagcagaacccttgatataatatccaaataagtttcctttctcagtatactttaggtataagttcggtacatctccgctcatgagcgaagatgtaccgaacttacacccaaagtgaagcgaaagtgtctcccgtcctcattagaacgacaacgggtattgaccacatgatattataattctcccgaagcgaaataaaagttatcaatactaatctggtattttcactttttggggatcctcactctgaaaccgctcaaattctcgcaatactaataccatatcattaacaaactcatcactacatcccttttctatcgcagtctgcaagtaagttttcaatgtcgctatcgcacacacgtcttttcccgtcaaaacaaacgccggaacatcctccgttaagcatttatgcaaaacttgatgttgatctttcattctatttcaatttattatttactatatgcgaagatacgacatcttcaacttgttattaccatcctacatcataaaataacagtatctttataaaacatcatccctcttatccccgtaaaaaagtaataaaacataaagtattatgaaacatatcactacactcatcgcactagctctaacgctagggacactagtcccccttgccgctcaaactaaaatgacagcaaaggaaaaacgtacacaaacaagacaagagcggaaaatagctcaacaaaaagtaaaagaacaattataccaagacgctgttcgtgctttggaaaacaacacgtttgtattggaagcagatcgcctgattttcaaacgaggcagatcggtaagtgtcagttctgtcaaaaacttcatttccatggcaaacaaaaaagccacggtacaagtaagttttgacacccctcgcccacttcaaaacgggctgggaggttttaccgtagaaggcaatgtttcggatatccggatgaaaaaggataaaaaaggaagtatcatttatagctttctcgttcaaggtgtcagcatttccgctcaagtaagccttacccttcatcaaggctcaaataatgtatcggcaaacatctcgccttcattccactccaacacgctaaccatgactggagaattagtaacacaagaaaaagctcgtgtctttgaaggatttaaacgttaaacctttgagagggagaattagagggagaaaaaaaataatccccgtaaatgtctctatctcttttacaacaaaaaaggcagactattattaccagtccgccttttccttcaaataacaacaattttaaatattataaaacgtggtgaaagcttttatcacgtaagcatgatccaatgtcccgcccgtttcccgaacggaatgcattgcccacataggattaccgatatccactccacgcatttccatttgcgataataatatatttcccaaagttgaacctccagccatgtctgaatggtttacaaattcctgacaaggcaccccggccatcttacagatcgtcttaaacacggctgcagaatccccgtccgtgatatatttttggttcgcattaattttaatcacgggaccaccgtttatcaccgggtgattcgtgggatcatgtttctccacgtaattcgggtgaagcgcatgcgccatgtccgcagaaatcatgaaggaattatgaattgcacgatacaaatcttccggctttcctcccaacccgaaaacaatacgctcaataatcgttctcaaaatcggagaaccggcaccctgtttcgttccacttcccacttcttcattatcaaaaatagcaaggatttttgtcttacgacatttctcggaagccacgaaggcttttaacccggcatgagccatggctaaatcatccagcttaccacttgaaataaactcctcgttcaccccgaacaaacagcctttctcgtattcatatagagtcaagtcaaaatcaagtatatcttcttgccccacacccatctcttcagcaataagttttatcaggtaattatctttttcgaaagtttcatttatcatggcgatcacgggaagcatatctttctgtttgctcaacgggttaccttgatcgttcacggcacggttgaaatggatggcaatatgaggaataaccatcaacggacgcttgaaattcacgaactgagtcgcaggtttcaacgggttcaagctacgcaacataacccgtccggccatggacaatggtctgtcgaaccacgtgtacataatcggccccccatacacttccgtgttcaatttcaaatacttcccggcaacaggcatcgcggcattcggtttaattttaaacgtcggagaatcgctatgggcacaaacgatcttgaacccttcttcagcgatctccccgctaccaatctcgaaagcaaaaagcgaagaatgatttttcgtcacgaaatacttacctcctctttctatttgccatgcctctcccgagaaaagttgtttataaccattacctagcaattcttttttggcatttgccacggcatgaaagtttgtcggactctcatgtataaactctactaattctttagcgtattgtttttccattatatcttgtttttttatttcatttcttcgagccccaagataatcattttttactacactttttgctttgaaatctaaaaaagtcttgtttccttctttaatttcgtcgtaaacacgtttaccaaacatgacaaaaggaggacttatcatattctctttattataacgaatctcacctcccgtctccgcatttaccacatgaccacccgcggcttccactagcacttgccctgccgcaacatcccattccgagcatttcccgaattttggacatatatccacctctcctttagcaagcatacaatgttttgatgacgctcctaacgggacgagttcgacctcatgccccaaagattttaaataatcgacatatcgtaactcccattccgttatatgaaagcgactgacagccaccctcaactttgaacttttttccccggcattcgggaagatttcttccctcccgttttttatcatccccttctctccactagcaaaagcccataatatttcaccatcacacacgttatgaatcatcccaaatacaggttttcccttttccacaagagccatattgatacaaaaacgcccattccgatatataaattccttcgtgccatccagcggatcaataatccaagcgtatgtccatttctctcgttcttcataaaccggtaatgacgcctcttcgctaatcaccggaatccccggatataactttttcaaagcacttgtaatatactcactcgaaattttatccgcttctgtcacgggggtattatctccctttaactctacattaaaatttctcttatcatacacctcttttatcaactccccagctcgctcaataatacactgaatatctgttacttttatccaacttaccatattaattaattcatctaaaacgatttgttaaacttacaaataaaattcatttcatagatcatattctaataagaaaattaacaaaaatacacctgcattcacacgggcaagacataattaaacctattaattaatcagttacaatgacatacacatacaacgattcaaaacatagctccacaggcacaaaatattaaccaacattaacccaattgatagcttttattaacaattaaaattagtctagatgcaacagacactttatctttgcaccgtctttaagagattgaagatttttcataagtttgtatggtttaggttagtagttagtaatgtaatcttaagagtcgacattccccgtcggctcttttgtatttaaagacgaaaggtactaaatttttacagaaacaaaaattaacaattatgaatggaatcatcgaaattgaaggaatggaattttttgccttccacggatgttatgaaacagaacgtgtcgtgggaaacaaattcatggtttacgcccgtatcgaaacagattgcagcaaagctgcccaaacagataacatcgaagacgcattaagttatctcaccgcctacgagattatcgccaaagaaatgatgattacctcacatttgttggaacacgtggcccaaagaatgattgatgcactctataacgctttcccgcaaatttctcatgtaactatcaaggtttcaaaactaaacccaccactaggaggaaaaatcgcagccacgagtgtcactttatccaaataaattgcagtaaggtattgcaaaatccaaaatatcgccttatctttgccacgcaaaatcgcaaaagggtcggttggccgagcggttaggcagcggtctgcaaaaccgtgtacagcagttcaaatctgctaccgacctcagaaaatcagtcacttacaaggt

SEQ ID NO: 10862 - DNA, 3446 bp, Unknown
  gut microbiota DNA sequence
aaagactattttcaagtgtcttttgcagttttgaaaatatatattactttcgtgccatcatagttctaatacaatataatacttatattgaggatgaaaagggaatccggtgtgaatccggaacaatacccgttgctgtgtttccccctctttggaggatattgtttattgtactcttgccactggttttaaccgggaaggcgcaataaacgggataagtcagaagacctgctatgattataccaagatatacatccgcgggggtcggatgatttatcagaatacaattttatcaatcaagatatgaaacaaatattatttacaattacttgtcttttagccctactcggttgtcaatcgaaatctacgatcacttttaccaagaatgtctacacgccgcagtacgccaaaggattcgacatcatgggtgcggataatacggaaagtacgatcattcacgtacgaaatccttggcagggggcaaaagacgtggagatgtcctacttcgtatcccgaaacggggagcaagccccgaaagattttgacggagttgtcatccccgcaggagcaaaacggatcgtgtgcatgtcatcatcttatatcgccatgctggatgccataaaccaagtgggacgagtggtgggagtttccggcattcattttatcacaaacccgtatatcaacgagcataaaaagacgattaaagatatgggggcagaaattaactacgagttactcgtgggattaaacccggaccttgtacttctttacgggattggagacgcacaaaccacggttaccgataaactgaaagaattgaacattccttacatgtacgtggccgaatacctggaagaatcgccattagggaaagccgaatggctggttgccatttccgaactgactgacaaccggacggacgggatcaaagtattccaagcaatccccgaacgctataacaagttgaaacaattaacggcaaacgcaaccgaacgcccgaccgtcatgttgaatacgccttggaacgacagctggtcaatgccttccgtgaaaagttacgcggcacaattaatttcggatgcggggggagaatatatttacaagaaaaacacctctcacggggccgagccgattggcctggagactgcctacgggctgatccgggaagcagatatttggttgaatgtcggcatggctaccacgatggatgaactgaaaaacatgaatccgaaattcaaggatgcaaaagcaattcggcaaaagaaagtctataataacaatttacgcctaaaccccggaggaggaaatgattactgggagtcgggatcggttcatccggacatcgtactccgggatttaataaagattttacatccgaaattaatttcggaagaactatattattatagacacttggaatagcttagaatttaaagtttaagagataaaagaacttgtaacctaacctgtaattctatacatgagccgtaacacaatcatattcacgcttctgatccccctagtcgtcatcttgttcgtatttgacttactatcgggagacacaacactttccgcaggacaagtatggaatgtgttcacgggcaacgaaaccgacgaaacaacccgtaatatcgtgctgtccatccgactggtaagggtgatcgtggcaatcttgatcggcgtggctctctcgataagcggcttacagatgcagaccgttttccgaaatcctttggcagatccctatttactgggagtgagttccggctcgggactgggcgttgccttttttattctaggcgcacccctactcgggttggcacattccggattttggcagtccgtgggaattgtcggggcaggatggggtggcgctgttatggtgttgctactgatagcaatcatcagtcgttacgtgaaaaatattctcggtgtgttgatcatgggagtaatgatcggctacatcgcgggagccatcatacagattttacaatacttaagttcagcggaacaactgaaaatgtttttcctatggtcgatgggctccctaggacacgttacaaccacgaaacttcttatcatgattcctgtgatttgcgtgggaatcatactcgcaatctattgtatcaaagcattgaatcttttgttgttgggagaaaattatgctcaaaccatgggattaaatattcgacgagcccggacactcattttcatatcgacgacattactcaccggaactgtaaccgccttttgcggtccggtaggttttcttgggcttgccattcctcacgtggctcgaatgttgttcaatgatgccgaccaccggacgcttttaccaggaagtatattactaggtatcatggccatgctgctatgtgatattattgctaaaacactcgtactacctatcaactgtatcaccgccttactaggaattccggtgatcatatgggtagtatataaaaaccttcgaccagcatgatacaattagaagcattaaccttaggatacgggcaacaaattctgctggaccacgtgtctgctaatttggacgggggcgggctaatcgccctgctgggacgtaacggtagcggaaaaagtactttactacgggccacggccgggctaggaacaatcaagtctgggcgaatattactggcagggaaagacctcgccgagttgcgaccagaggaactggctcgtaccgtcagtttcgtcacgaccgaaaaagtacggattcctaacctgaaatgccgggatgtggttgccctcgggcgggcaccctacacgaactgggtaggacgtttgcaaccgcaagatcgagaaatcgttgctaaatccctagcattactcgatatgtccgcctacgctgaacgaacgatggaccagatgtcagacggggaatgccagcgaatcatgatcgcccgagccctcgcacaagatactcccatcatcctgcttgatgaacctacctctttcctggacctaccgaaccgttacgaactggggattttattgcaaaagttggctcacaaacaaaacaaatgtatccttttttcaacccacgaactcgacatcgctctcacgctctgtgattccatcgccttgattgaccatccgcatttacattacctgcccacacgacagatgatcaacagcggtcatatcgaacgcctgttccataacgaaaccatcacgttcgacccgaaagaattgcgtatccgtatccggtgaaagggctacttaacagcaggcgttcaacttgtcgctcattttcgataatcatagaaaattgaaaaaaccggaaccaatcagatgaacgcaagatatttaaaatcggtgtaaatttcagttcgaaaacaaggaatatcgaaaaatggatcgtggaatcataacactcgaatttattccgacaagagacaatccgaaaatagattctattccat

SEQ ID NO: 10863 - DNA, 157 bp, Unknown
  gut microbiota DNA sequence
ccacttgtcagcgtgggaacgtggggcccaggacgggtaatcgcttagatgtttcttgtattgctgtaccagcaaatccccgttaacgtgatagaacttctccaggctcttgccgctgatcgggtaattatccaagtataccttttaaaaaagacgc

SEQ ID NO: 10864 - DNA, 6329 bp, Unknown
  gut microbiota DNA sequence
ctattggcgggaacatccgggagagcatttgcgaacgtatgctgcgggaagtgaggggccggatttgagtgatgtgtgggatgtggctccacctgtttcgaaagaagataaaaatgtttgttggttatgatattagattcacacacgggattagtgcttgaaggtggcgggatgagaggcgtctttactgccggagcgttggattttttgatggataaaaaggtttatttcccttacacgatcggtgtttctgctggggcgtgtaacggactttcctatgcttctcgtcagcggggacgggccaagaggtgtaatattgatttgttggataagtatcattatatcgggtttcgctattttttcacgaagcggagtatcatggattttgaccttatttttgacgatttcccgacccggattatcccgtacgattatgatacttactttacttctccggagcgtttcgtgatggtgacgagtaattgcaggacgggcgaggcgaattatttcgaggaaaagcatgatccggtacgtttgctgaatatttgtcgggcctcttgcagtctgccttttgtttgtccgatctcttacgtggacggggaacccatgttggacgggggaatctgtgatgccatcccgatccggaaggcaatagctgacgggttcgatcgtaacgtggtgatcctgactcgtaataaaggttaccggaaagatgaaaaagagaaatcattgccttggtttatgtatcgtaagtatccggcgttacgggagagcttgaggataaagaataaacgttataacgagacgctggattttttggaacagttggaacgggagaaaaaagtaatcttgattcgtccggagaagccgttggaggtggatcggattgagcaagacgtgacgaaattaacggacttgtataatcagggatacgaatgtgcccgtaaagtatttagtatttaatattgcggttatggaagagcttacattgacaacaccttctattttattctcggctatatcgttgatcatgctggcttatacgaatcgttttctggcgtatgcccaagtgattcggaatttgaagggagaacatgagaatcggccgagtgcgatgaccaaattgcaactggataatttacggaagcggctctacatggctcgatcgatgcaaatttacggggtgatcagtttattactttgcgtggtttgtaccttttttatctatatcggtctacaaactttggccgtttacacgttcggtgtggctttgttgctgttggtgatttcattgggaatttccgtgaaagagatattgatttcggtgaaggcgttggaatttaggttagataacgtgaccccggaggaagagaagaaataaaagtagcaatctattattgtatgcatgacggatttgtgatgatattgcattattgtggtaaattgattgaaaaataaattcaaaatattgcaagattggaataaatgttttaactttgtcaagaagacaaattagaactttagaaaacagtcggctcccggcagagatcatcacaccaaaacagaaatactgccttcttttcgataccatatcattcccgactgttttcttcttcttataaattttgatttaggtcaatgagaattgttgtgtaaatctgtattttcgcgttgaaattaggatgatatgataaaagctgtattttttgatattgacgggacgttggttagttttaagacacatcgggttccggattctacgaagagagcgattgcaattttgcgtgccaaaggtattcgggtattcattgcgagtgggaggcaattgttggctattaataatttagaagacctgcaatttgacggttatgttactttaaacgggggctattgtattgtgggggagaaagtgatttataagcatagtatgccatcggaagatatggtttctttagtgcgatacatggaagaacaagagagttttccctgtatttttgtgcatgaaaatgcattttatattaattacacgaacgaacggacgaacgaggtttttcgtttactgaacttcccgcaaccacctagtctgcctttacgggaggctgtcgaaggagaggttttccagttggtggcatttttcacgaaagaacaggagaatgcgattatggctgccatgcctcattgtgaggcaacccggtggaatccattgttctcggatattattccgaaaggaagtagtaagcaagtgggggtagatagaatgttggattattttggaatatcattggaggaatcgatggctttcggggatgggggaaatgatgtcctcatgttgaaacatgtcgggatcggggtggctatgggaaatgcggaagatgaagtaaagctggcagcggattatgttaccgattccgtggatgaggatggaattgaaaaggctttacggcatttcggggtgatttagctgttggggaatttattgttgagatatttgaaagtccgaacttataaaagttcggacttttgctctaaaaaagggggtgtccacttttttagttgctggttgctacatattaacctaaaacttagtcttgttttttatctatgatttcccgaatctcattcgtgatctgcgtgtctgtcaaatgattttcttttaacagttcttccagaacaaaacgatcggcaaattctttcttcagaccgtagttcttgaccttcatctcggaatccccgtaatagcgggcaatcttttccccgaaaccaccatccagtacaccgtcttccagcgtgatcaccagctggtgattggcctttaaattttccagcatctgtttatcaagtcccgtgatataacggggattgatcagtgtggcccggatgccggttgcctcttgcaacttttgacacacggattctcccaaagggtagaaatttccaagtgcgatgatggccacccgttctccttgacaggtaattttataacggtttaattcgctataatccgtgtcaaaggtctctccgctttcgataacaaccggtcccggaacacgaacggctacgggatgtgtcgtttgtttgataccccattccaacatggcgaagtattcctctttgcaagtcggggccaagtacactatattcggaatattgctgataagtggaatatcaaagaatccgagatgagtttcatcattcattccggcagaacctccaagaaataccgaaatgactgccgggttccggttgatacacaaatcttgtgacaattggtcatagcaccgctggataaacgtgctgtaaacaccgtacacgggtctcccgccattagcagcgataccggatgcgagagccacggcatgttcctcggcgatccccacgtcaacgaattgttttccggcttgttgtctgcgttcgggattaaaaccgattaccgcgggtgttcccgaggaaatcgccaccacggtagggtctttttgcatttgctccagcaggaattttcctgtcaaattgcaataatcttccgtgttcccctcgtcagataacggttgtccggtctctaagttgaacggcataccccagtggaatctttccttgtaggtttctgcgagagtgtatccctttccttttagcgtgtggatatgtacaaccacgggacggggaatgtcttttacttgtgtgaaggcgtgtatcaaagcggtaatgtcgttaccgtcttttacgtagatgtaatcaagcccgagagacttgaagaaattgcaaggtgtttgcccgtcagagtctctcaaggctttcaggttctggtacaaaccaccatgattttcggcaatagacatttcattgtcattgaccaccacgatcaaattggtacctgtttctcccgcattacttaatccttcgtaggcctctccaccacttagagaaccgtcaccgattacggcgataatattttcacggcctctcttcaggtctctggctttggctaacccgcaggcaaggcttacggaggttgacgtgtgaccgatcgtgaagaaatcgtgtttactttcctgcggattggtataaccggttacctcatcgtactcttccgcatgaagaaaggcatccttacgtccggttaacatcttgtgggcataactttgatgcgatacgtcatacacgattttgtccactggcgagttgaacacgtagtgtagggctatagtggcctcaaccattcctagattaggaccgatatgtccaccatgagcgcttagtttggttagtaaagcgtgacgaatttcattcgctagtatatttaaattttcaatggaaagacgtttcacgtcttccggggagttaatgttttctagatacatagttttataaatttatactcgtttccctgtttcgtatgcctcctgcatggctgggttccctttgatttctccgacatgccatacgcctagcccgaagataacccctttgatggtaggattctccaggcaatcaagaaatccttggaacgtgtccacggtgcgcatcattttttctttatcatcttctgccgccgtgacaatgaaatagaattctttgtcgttcatttccgtgtagagaccacagcaccggtcaatcaaggttttcatctgggcactcatcgtgtagaaatagacaggtgttgccatgacgataacatctgctgccaccatcttatcaataatctctgtggcatcatctttttgcggacagggtttatgatgcaggctacacgtgctgcaccccgtgcagtaattaatctttttatctcgtaagaaaatcttttcagcttcatttcccgtttctttagctccccgcagaaattcgtcacacaaggtgtcagagtttccgccttttcggggactggaagaaaggattaaaattctttttgccataatatgattttttataatgattattctagtatgttgtgttcataattttatgttgcaaaattacatcgcctctgtcgtttcatttgtatataaattacagagatacataccaaaattacagattttggtatttgcggtagaaaaagagaggaggaatagaaagattttattcctcaagatttgctaatgtctcccgttctttctttgtcaggcttttgactacaatgtcataggattttttgaccagctctttgattttcttgtctggtacgtcttggttaaaatgaacgctgatccagtgttttttattcatatgccatccgggttttatgcccgtgtacgtggctcgtaattcttccatttcatctggattgcatttgatacagcaaaaatcaaatacttcgatatttacaaaacagaaccatttgcttgccacgtaaaaacatagaacgtcctgactgtatttatcgggaacattcgggaaaggcatcttctcgtgtactcctttcaaggacaagcaatattctctgaattcttcaatattcatgtttacaagattattctacaaatttcaaactataattcccgcgataatagatgtatgttgttttgaatcggataaaacaaatttcataccatggtgatatatggatcataagaattcttctaaaaatgggagtatagaagaatatgaaaaacaaaattgtattcttttttgatggttgtaaaattttatatctatatttaaaacgttgaaaagtaccaaagaataatgtttcaagcaaaagaaaatataatccaggattttattgacgggaaagagtcggcttttaaagaaatttacgaaaagtatgtttctactttgcgttattttggaaataaatttttatccgatgaacggctaatcgaggatattcttcaagatacctttgtgtctctttgggaaaataggaagaagtttaacaatgaacttgcgataaaaagctttttatatacaggtgttaaaaatcgttgtttgaataatcttcgtcatgaaaaaattaagcagaaatatgtagaaggattcgtggaagaaccctcggaaagttttcttgaaaatgtaattaaagctgagcttttcgaaatgttacatcgtattttcgatgaattacctcctgcttgtaaagaagtataccagctcagtttggaggggaaaaaacacgaagagatagctaaacaacttcatatatctattaatacggtgaaaaaatacaagaataatgctaatcactacatgcgtaaccggattaaggattttaatctttttcttttgttactgaaaaacagtagtttatagatcgaaatttaaaaaatattatttttttaatatattgctatacaccaaacgctagttcaagtgttttagatgtaaaaaaaaagcat

SEQ ID NO: 10865 - DNA, 11396 bp, Unknown
  gut microbiota DNA sequence
tctttgatacattgttagggtgtttgttaaaatttttgtttaatccgagtcaaccattttcaggaaagtacatagagtcctcgatatagtattcaaataagtagttttttccggcatatttgggggacaccgacgcttctctttcgctcacgagcggaagtgcaccgaagttgttccgaaagaataccgaaattattacctgttttcaccggaaccacaacggtttatcaccgaatgatattataaaaaacacttatttatcatgcaaaggcatcattccaaccctgtatatttcaacaataataatcatatcccctcctccttcggtttccgataaggaattctaaaataaaacgctgtccctttacctaaagttgactccacccaaatctgacctcccagaagttcaataatagcctcacaaatggaaagtcccaacccggttccctgcttaaactcattcactttataaaaacgatcaaaaatatgttccagattttctggagaaatacctattcccgtatccttaacccagcactccacccacacaccatccgaagtaatcttggcaccaatgacaatatgcccttgcgtggtaaatttcttggcattcccgattaaattcataaatacctttgtcaatttcacctcatccgtcatgaccaacaatttttcccggggtccttcattcaccaattcaacaccttgtgccatatttaaacgcccgatatccaacatagaatgaaccaaaaaatgtaaatcacaaacacgaagaaataccttatccatcccggcctccaaacgggacaaatcaagcacatcatccagtaaccccaacaaagcccggctattactcatgatcatatcactactcaattttctctcctcctcgggtaacccttcttccaccatcaaattagcaaaaccaacaatactgtttaaaggagtccggatctcgtgcgaaatattcgccacgaaagctgatttcaaccgatcggattcctctgccttgcgcattgctatcgccatttcttcctccacgaccttgtaacgattaatatctatccccatcccgtacacgtatttcgccttccgcccattactcatttccacggtttcaacaattccccggttctccaaccaacgatactccccggaacataagtaatccactcgaaaaataactacaaactctttcagttcatccttggttatcccttccagacaagccaacaactccccccggtcatccggatgaatatgagacatgtatttttcaatcgtactcaaatcccgacttaaagtctcatccttcgggaaactctccccgaccgtcatgatattattattcacatcataacaccaagagtaagctcgcaaggcatttatcgaaatacgcaagaaggtttgttgctgccactctcgggtaacatcacgcaacataatcaccgcaccgttcacctccccgctttcattcaacaaaggagaaacactccctgtcacttgctgcacgggagccccacacgggattaagaccgtgttcaacgccaagtcccgacgcattctctcccccatcaccttctgcacgaaatcttcaattccctcccctccccgattccgattgatctcgcaaacctccttcaagggtttaccaatcacatctccttcacatcccaaaccgaccacagaggcatggttcaactcaatcacccgcaattccttatccaccaccaaaataccttcactcattgaagacaatgtattagacaatatttcggtcttcttcttcaacatttcggccatccgttgtgctgctttctctaaaaatatacttcgatgtaacatcttccggtacctcaagtgagataacaccagaaacaggacaagtaacaataataatataaaggtaattcccgcaatcagaatataatttccataagtccgccaaaaagcatcccgttcattaacgatcaaacttttaaccggaaggttcttgcgttctactcgccagcgtttcaattgattttcatcaaaaaccggaataggatgaaccgtatctatcggtatggctttcgcctgttcgccattcaaaattctcaccccgatttttccggcttttgttcccatctgatcggcaaacgtcacgattcctccaaaaattccctttcccaaaccgttatccatcaccgtcaaaatcggaaccggacattcatgagcatacatggaataataaatatccggatcaagatacactccctgtttaccttgttgccaagtggtcaaaataacaaaagaaagaggataaacctcttgtaactcctttaaaaaactattcacgtccaagatcgaatcgcctgcaaaaacaaccgggaaacgatccttatatttggctaattgttgtcgagctaaagcctcatgcgcttgccccgctcccgattgatctgaaaacacgtaaacttttcgagcctccgggaataatttccgccccaacagaaacactttttcataatcaatatcacaaataactcccgtcacctgatcaaagtcaagtttcttcgaatatcgcataactccacaaaacacgataggcgtttcctttaccaaaggaatatccagagagaaaagggcgttattggcctcttcatccgaaacaataatcaaatctaactttcccttaacctcccgtaactgtacttccaataaggaattcctcacctccgtatttgtcagccgtttggaatccagataaatcaccctcagatctacattgtaacccgctcggtcaagctgttttttcaccccgttcaacaccttgcgtccccagatttgctccgaatgatacgagcaaacaaataaaacccgcctgagctcgggaggtacacccgtctccccttcagcatattggacacatcccaacaccccgctcaaaaaaaataatataaataataaaaagactttcatacgccaatatatttttccgggatcctacgcatattttcaaatgtaaaggtaacatttttatcacaaaacaagtataatctcaactattttgcgatgtttactacatataaaacacttccaatatccaaatataattcccggatcattcccctaaccccttactcccacgcgggaaagctccctatcgcatatatttctttaatccacaacaaaaatcattgttgttttttcaaatatttattatattgcaaatcaatctaaaaccaataaacattatggcaacactagaaattcaaggaaagacgttcgaagtggacggcgacggtttcctcatcaatccttctatctggaatgaagacgtggcaaaactctttgccgaggcagatggaatcacagaattaaatgacaaacattgggcaattatcaaaatcattcgtgataattttgaagaaaaggggaatgccccgatggttcgtaccatctgcaaggagaccggattaaaattgaaagacatttatgaattgttcccattaggaccagcccgaggagcgtgtcgggtggccgggttaccgaaacccgacgggtgcgtctaatacccacgaccatgtcttggtatatttggacctcgttagctgcacttcttttttgtgtagtactactgggggaatatttcgtacgacttttaaaacacggttctcccaaggacctttcgcaaaagtctgggaatattgcccaagcagtctgttactcttgtattggagctatgtcacctatgcaaaaagaatcagcatatttacacctgcccacttacacggcaggtatattttttcatataggaaacttcctggcaatagccgtgtatcttcttttcacgcttgcggttattttcaattttcagattcctattgaaagcgcaacaaaccttgtcgtcatgatcttggctgcaatcatctttattgctgccgtttgcggaatggctttattcatcaagcgactagccaaaaaagagttgagagatctatcgtgtgcagatgattatatttctaatcttctctgcaccatcacgctcttcctgacgacttattccctgctgaccttacaattcggggcagtgtattatgttataatggcacttcttttcgtgtggatgcccttgggcaaaatcaaacacgtgctttactttttctttgccaggtatcatttgggctttttctacggctggcgtggaacatggcctcctaaaaaagcgattcaatatgacaaataatatctcgaacgaacaaaaagccaaagccctcgccatcatttcgaacacgaatgacagcaagctggagacccatctaaacgcttgtgtacgttgtggtttatgtgcatcgagttgtatgtactacctcacgatgaaagaggggaaatacatcccggcacgaaaagtagacctcgtcagttccatttaccgacgctacaagacttggcagggagccatattcccgtcgctattccacgcccgggagttaaaccaagagacatgcgacgagatggttgactccctgttcggagcctgtaccatgtgcggacgctgcgtgaaacattgctcgatcggggtcgacattcccttccttgtgaaaaaaggacgtgaaatgcttgcagtcatgggactcgttcctaaaaccctccaagcaactgtcgatgcagcagtaaataccggaaacaacatgggtattcccacggaagaatttgttgacacgatccaatggatggaagaagaactccaagacgaactggaagacgagaaagccggtatctttcttgatcagcccgacaagaacgttttttacaccttgaacccccgggaaccaaaattcttcccgctttccatctctgccatggcaaaagtattctatgccgcaggagaagagtggaccctctcgtctaaatattacgacgtgacaaactacgggtatttcaacggtaataatgaagaggcgactcaaatcgcccggaatctttacaacgagattcaccgcctacacggcaagcgcctcgtactcggtgaatgtggccacggttcaagagccatgcgctgggaaggccccaattatctcaaaacgcagtatgattttgacactctcacggtagtggaactcatcggggaatatatccgaagtggaagaataaaacttgacaaaacgctgaatagcaaagtcgtcaccatccatgacccgtgcaacttggttcgaaacgggggacttctcaatgaaattcgtttcgtggtcaatgccgcagcagcaaacgtggtggaaatgacaccctacggcacggataacttctgttgtggtggcggtggcggagccctcgcaatgagcgaatacaacgaacgtcgtctcaaaatcggcaaaatcaaagccgatcaaatcaccgcaacgaaagccgagatcgtcgtgaccccatgccacaattgcgtggaccagctaactcaaattaatcacacgtacaaactgggtatcaccataaagacggtggcggaattagttgcagatgccctggtaattgaaagttgaaaatgaaaaacaattcacttactttttcaatttaaaatttaaaacctaaaatttatagagcttatgagcaaattaatctacctagacaattcagcaaccagcttcccgaagccggatgttgtttatgatttcatgaacgacttttatcgcaaacatggtgtaaatcccggacgttccggatttgatgcagccgtcgagacagaggaagtcgtgaactcgacccgcaaaatgttaaccaagttattcaacggtgggaatgatcataacagactaacgttcagttacaacgccacagattctttgaacctgatcattaacggattggtagaaaaaggaattcacgtagtatctaccatgctggaacacaattccgtgttacgtccgctcaacatgcatcatcaaaacggaaccatcgatttaacttacgtgccttttgatgaacacggctatgtacatcctgacgatataaagaacgccatccgcccgaacacgaaatttgttgtcgtaacccattgttccaacgtgctgggaacgattcagccgctgaccgaaatcgggaaaatctgtaaagaaaaaggcgtaattttcgtggttgacggcagtcagggagctggcgccgtagacttggatatgcaagcatccggaatcgacgtgtattgtttcactggccacaaatgtctcatgggcccgacaggaatcggtggctcatacgtgcgcgaaggaatcgaaatcaaacatacccgtgccgggggtaccggggtccgttctgcttatcccgtgcatctggatgaatatccttaccgcttggaatacgggaccctcaacttgttaggtgttgccggattaaacgccggggttaaatggattcaggaacaagggatcacgaacatccatcatcgagaaatcctactctgggataaacttcgtaaagctttacaagacatcgagggtgtaactacctattgcgccagcagcatagaaaaccagaatccggtattaagtttcaacatcaacggtttcgattccggagacgtgggaaccatgcttgacgtggattacaacatcgccgtacgtaccgggctacaatgcgccccaaaagtacacgaggtcatcggcacattcgatattcatggaaccgtccgtatgagcatcggcgctttcacaacggaagaagacgtgaatgccgctatcgaagccgtgaaagaaatcgcagccattagaaattagaggccatctaacaagtctaccccctccagctcccccttacacagggggagagctgattaccaagcggtttctccccttgtgcaagggggagttagtgggggtagtttttcaaaatagatttttcgaacagccccagtttataaaaaattctaagtttttatccccgaataataatacttcaaaacttatttaccaaataaaacacgatatattcattttcgagtacgccataatcaaaaattcattacttttgaggccattaaaacaaacaaaaaaattagttatatgtacggaaaatttcaagactttttaaagactgaattgcagtccataaaagacgccggcttatacaagagcgaaagaattatcgttaccccgcaagatgcagaaatcaaacttgccacgggagaaactgtattaaacttttgtgcaaacaactacttaggactttcttctaacccgacggtgatcgaaggagcaaagaaagcattggacagccgcggttacggaatgtcttcagtgcgtttcatctgcggaacccaagatattcacaaagaactggaaaataaaatctctcaattcttcggaacggaagataccattctttacgctgcttgtttcgatgccaacggtggtgtattcgaaccgctattcgggcaggaagatgctatcatttccgacgaattgaaccacgcttctatcattgacggtgttcgtctttgtaaagccgtacgctacagatacaaacacgccaacatggctgacctcgaagagcaattgaagatttctcaagctcaacgttaccggatcatcgttaccgatggagtgttctctatggacggagatattgccaagatgaacgaaatttgtgacctggcagaaaaatacaacgccttggttatggttgacgatagccacgctgccggatttatcggtaaaacaggacgtggttccgcagaacaccacaattgtatgaaccgcgtggatatcttcaccggaacccttggtaaagcattgggtggagccatgggtggttacacgaccggtaaaaaagaaattatcgatatgttgcgtcaacgttcaagaccttacttgttctctaactcattgtctccggcaatctgcggtgcttctatcgccgtctttgacatgttgtcaaagagcaccgaattaagagaccgtgtcatggataacgccaactatttccgtgcaaaattaaccgaggccggattcgatctgaaaccctcagaatctgcaatctgcgctttaatgctttacgatgcagttctttctcaacaattcgctgccgaattacagaaagaaaacatctatgttaccggattctactacccggttgtaccgaaaggacaagcccgtatccgtatccaattgtcggctgcccacacacgtgaacaactggatcgtgcattggctgccttcatcaagattggtaaaaaattgggcgttatcaaataaagaagataacaccaacaccatacaaaacagtttgagattactctcaaactgttttttttatttctccccctcaccacattttttgatcttccggcaacatggtaagcacttgtttcaaaccaagattatttgtctttatcaaataaaaaacgtaaatcagacacattagttgctaaatagtttgaattttgaaaaatataccatacttttacaccaacattatagcaatataatacaatatcggcgtctagttgcaataacaaaaaaatctaatcatgaaaacaaaggcttcaattttagccctatttttcttatccacaattataagtagttgtgccaagaaagatattgagcacaaggaaaaggaaacaacaggattcacagaattagtcgttcctgctgatttcgattggaaaatgtccgaaaacgtgacttgtaatttcacttcggaacacgtttctaaagtatacgtttccacgggagcaaacacaactccttttgcctcgttctatgtcggacaggaggtagaccaagtcaagttgaacataccaacttacattaacacgctttacgtcaaatacgaaacgaaggctggattatcaacagccaaagctcttgatataactaacaataccgtgacttatgcagttcctgctgacagcgaggaagtggaaacagttcttgcttactcggcaaaaacaaacttgagcagagggaatgatcaagctgttatattttaccccgcccgggaaaatggttggggaaccttgatgttcgaagacctttggcccgcctatggagattacgactttaatgacttagttgtaaactacaaaatgcagctttatcctaataacaaaaacatggtaaaggaaatgatcctcggaattcgagtcaaagctattggaggctcgctaccttatgacttatgccttgccataaaaggaataaaggcaggagaaatagacgagttcgaaaaacaagaatcgaacaatgctttagaaaatgccgatatggagttacttaacccaggtaatagcgagaaaaaacctcctatattcaggttcaacaacattagaaccaacacgaaggctcctaaaggtttcgctttccttaatacagatccggataaaaaagcacgaatacaagagggcgatatggtaaatattactttttacattatattccgcaactcaattcctcaagcagatcttaccctcgatgcattcgactttttcattgccaaacccgtaaaggaaaaagcctcccaatggcaagaaatccacacgagaggatacgctccgacagaagaattcggacaaaacgtttacgaacaaacaaaagaagggaattcctatatcgggaaaagtagtatttattacacctccaattccaacctaatatgggcgatcaatgttccgacagacattccccatgcttacgaaaaagcagactttttgaaggcttatcctcatttcaaagactgggctacttcaggcgggaatcaaaacaaagactggtacgagaacacaactggaaatcgcaacgatagctacctgatcaaacaatgactccaacaataaaagctaaagagacttttgggcatatcaaaagtctctttagttttattactgatctaatccctccctcgaactccctcgtcacgcctcattccttttttcaaacaagagtgtatcccaccagatagctaatatactagacgacacactcaacttgcaaatataatcgtatcaaaaatcaattttatcgaagataaatgcaagataaatgcttgttgaatactccttgatccaaatgaactatcaggaaaatatcaagagaataccaggttgacatagcctaaagccagggcaaagccagccttttaccagaataatcatctcccattaccctttcacctctcttttatcgccctttcatcgcccttcgccaatatacgaacaagaacgaaggaaacttgttacaaagatggctggagattattactccggctcttcggttacatcaccttgggataactcataatacttacaatgcttattcagaacacactccccacataacggattccgagttttacacaccaatgccgcataatccaaaattgcccagttcaattccttgcatcgacgcacctcgataatatcatttgccaactcctgaatctccttatcatgccgcacgtcaataaaatctcccggtttaaaataacgtttcagcaaccgggacatattcacatccaacagcggcttacgatttctcaagataaacaattcgaaagcattagtaacatacaacccgataaaaccggaatcccttaactcgttctcgtttcccggaatcttacctccccgtcggcgaatatcttcccccagcttatacaaccgtcgagcccggtgacgatataatcccaaaggtttcataatctcttccaactcttcaagcgaagcattagccaaagcgttccaatcgggaaatttagagaagaaagtatcgtagtactttgccaccgtctccgctttcgtacgctgtaacaagatttcagaaacaatttgctggtacttcgtcgcccgatcttcccgccacggaaatatcctttggttctcgtcaaaccatttcaacaaacgatgctgcaaatattgaaccatgacttcccgcataaatctcaatttattctgacttctttaccttttatcccgatatatccattatgacaaagttagcaaataatctcttcaccatctagtaattcaatgctaccctgtactcattaggagaacacccctccattttcttaaacaagcggctcaaatgatgagggtatttgaatcccatctcataggcaatttcactcacggacttggacgaatcggcaaaacgttccttaactttctcgataatggtgaattggatatactcctgagccgatttccccgtttccttctttatcagatccccaaaataattcgcagaaagattaagcttatccgcacaaaaagcaacagaaggtaaaccgtaagaaaccggagcatccgactcgaaataaccattcaacaaatcttcaaaccgggtaagaatatccttatttaacgtgagttcgaaataacttaaaacaacacaagttgcctgtccttgacaaaattgacatcaatg

SEQ ID NO: 10866 - DNA, 1094 bp, Unknown
  gut microbiota DNA sequence
gggatgtaccaggtaaagcaagttgttacccgagtatacaaggggaccgcgataataagtcaaagaactcccgacttgcgtcgccagcttctcaccggaagacgtgtaaatataagaaacttttccattacctatactcaccgtttccggtaagttcaagatattatagctgatactcgctcctcgaagaccgtcaaccgtcatgtttccaccggcatcatagatgtcggtaaatctcactatatttccattttaaacatgcatccaagataaaacacgaaatcgaggaaggtacttattgtttcctccctcgatcaaaacccaatccttacctaaaatacctctatttaataaacttttttagataagacattacttattcaatttatcccaattcaataaggttcgcttagctgaaaatgaatacaaaccttctccatcggtcattttttttacaatattaaaagcattctcatcatcaaacggagccattgcaattgctgctgctaaccgaacccacaaattagaatcatcatataattgcttcaataaatccagagcgttattttcaaataaatatttttctatttgtatcaaatcatcataagctctattcgattttctataattcccattatacgaacattcataattatcattcgctgctatcttgaatttttcgatagcatcgtctacattctttatttttctcataatgtcccatttaaagctttttgtactatctccagtccatattcatactgggcttcgaaactttgtgtctttaaccagtctctcactgttagtccaccaagttctagcggttttgaattataatatccattaatcttgtaatgcaattctttcggtatctcgacaagattattcgtgttatgaatactctctgcaccaaacttacgtatattatccgcatgttgtcccacgatatgatgccattgattaccttctgcggcgtttcccatcgctcgtttaaacgcggaaaaactatgaaaccctcgtccagccgcccccgcaccactctccaccgccatgctaagaatcttgaagtgattcttcatcctgaacatcttggc

SEQ ID NO: 10867 - DNA, 905 bp, Unknown
  gut microbiota DNA sequence
tccaaacttacgtatattatccgcagttgccccacgatatgatgccattaattaccttcttcgatttctcatccctcatttgaatccggaaaatataaccaaggagggaaattttccctccttgactgtcgtaacaatatacaatttattttgccaagattctatcgtacaccttgggatcagacaatttagaccattcttttaatgtatatttcgcgtcaaaagaagcccaaccttcatctgcatccatgatctctttaatgatcttgtaacaattttcactatcaagcggagctaaataaacagccgcacttaatctaaggtataaatcactagattcataaaatgttttcaaactttctatagcgttattttctaataaatattttacaatcgtctctacatgatcataagctctattacctttccgataattaccactcttgctacactcatgtattatatcaacattcgattcgaacaaaattaaagcgtcctctacattttttatttttctcataatgtcccatttaaagctttttgtaatacatccatcccatattcatactgggcttcaaaactttgcgtctttaaccaatctcttaccgtcagaccttgggttccaaatcgtgtcgaattataatgcccatttatcttgtggtgcaattctttcggtatctcaacaagattattcgtgttatgaatactctccgccccgaacttacgaacattatctgcatgttgccccacgatatgatgccattgattaccttccgcggcgtttcccatcgctcgtttaaacgcagaaaaactatgaaatcctcgtccagccccccccgcaccactctccaccgccatgctaagaatcttgaagtgattcttcatcctgaacatcttggcaaaat

SEQ ID NO: 10868 - DNA, 1038 bp, Unknown
  gut microbiota DNA sequence
taacgtgagttcgaaataacttaaaacaacacaagttgcctgtccttgacaaaattgacatcaatggcaggcttcttttcaaaaaaacaataggcagcaatggccgatagggcatttgcaataaagttattgaatgatctgtgtctggaatgttcaatttgcgcgatattcttcaattcgtcattcacggtctcgatcaacgcccgttttcgtaacaggattttgtcctctacactcatcaacgagtttctcatgttattcttcactcttgtcagcaattgtattccattcaagaacaggttttcgaacaaggcttgaccgatataccctttgtccgcacaaagttttcccttgatatctctctggaagttcccttgttttaacggttccctgtcatccacgttcgccggggagaacatgaaattcaggatctctcccttgtcgttgattaccaggtgcagcttgaacccgaagaaccatcccatggaacattttccacgagtggccaggccttcaaaggttttatgaaccagtattctttggttacggcaaactcgaagcggggtagaatccacgaaactgatgccggtacatgtccctaacaagacctgtttaatgaaaatggtcaacggcaacagtatatctttttccagttctacaaaacgattataagataccacgcggggaaaaagatgggttaaatgtttgcatacatattcgttataatagtgcttgaaacacctgaatccacccgaatggaataaaatcaaaataaccattatttctgcatcattcatacgattgggcttgtttcgatgattatgattactttcttttaccatgtatttttcttgttgtaacgcaaattctttacaaaaatcgtccgccatacaataaatctctgtaactttagcctctgagaacatagtgataatcgttttattttatttttgatactataaatttacaacttttatcgctatgttactaatattcaaataaataattttaatccttatatcgaactcacgttattta

SEQ ID NO: 10869 - DNA, 1355 bp, Unknown
  gut microbiota DNA sequence
aaacgtttgtaagcatagaaagcttgtccttcgccgtaaaattcccgattgtattctaaaatcaacgtttctgataattcttccgtgctgccaaaagttaccggagtaatatcgcgagcaatacacacttctttatataagtcgtttgcattttggatagatccacattccatcgcaatcagatacatttcagccaagcggaataaaggaatagagtttttagcccaaaccggcatattggtagcttgggtatatttggtcatatagtagtaataggtccaccaataattgtcatatacctctttccacattttcccacgacgaatgtctgtggtttccgaagcccagaaatattttagtgccgtgctattggtgtagaatgtattagcagcactaattttaaaatcactcagattgtacacgttcaaattgaagatgtgttcagaagagaagattaagtctccattggcacaatccgtggcagagcccaaacggaacatcacgttgccattgggatctttggcatcaattactttttgggcatatttcaatgcttcatttttgttccctaaccacaactgtacgcgagcttttaaggcacaaacagcataataattcatacgcatttgacggtcacacaagaaattatcgtcttgagccacttccaatgtacttaactctttgatagaagctgtaagaattgggtcattcccttccaaacatctttcggcttcatctaaatcagccaataatttggtagtaaaatcgttataggagactaaacgattagggacaatagagactgtagtgacgtaaggaagaatggttccttcgggcaaattagtcggtatgggaccgaataggcgcaatacatcgaagtgacaaaaagcccggatagccaatgcctctcctttgataatttcgaagttattgccctcgaacatctcttttcgagcatcgatgttatttaataggccattgacatcagcaattactttgtatagatttccatagaaactattgattttagtttccacaacactctgttcgtaattataagcttttaaatatttgcctaaatcgtcagtattagtccaatgttgtgctaacatttctatgcttccgtaagtcagatcttctccatacaggttattcgacttcatgcggatgtatgcgccaatcaaaacatttcggaatcctacttctttttcaaacatttcagcctcttctttttcagcttgtggagcaacctccaaccaatcgttacatgcagtgatacaacacagcagcaacattatgagtatgtaatttatctgtttcatagtatcaaatttagaatcgcatggataatgaaa

SEQ ID NO: 10870 - DNA, 670 bp, Unknown
  gut microbiota DNA sequence
caggtctccgcttaatgtcaaggtctgtatgcctaaatgtttctgtaaccaaggattattcaaaaactcgtagctaatgtacaggttttgaccaattaaagtgcgttcatcctgtacaaaacgagtggttgcataagtactagattcgttattcaatcctttaaatagggtctggtcacccgttttttgccaacggtcagtaaataccctttcgtctacattgtatcgtttgtctgcattttccactttggaagctaaagtggagttatacaattgccctcccaaacgataggcaaacgataagttgatagaaaggtcacgccaacggaacatggtactgaaattcccccggtatttcggttcactaactccacaatatacccgatcatttgcatcccaagtataagatatctcaccattttgttttaagaacatttcgcgtccggtgctgggatctatacccatggaacgaactgcataaatgctattttgggattctccttcccgaagcactttattcggtaggattcctccttccagcaaccgtttagagtattccgatttaagaacatccgatagtttaacgatcttatcttggttgtgtaccaacgaaccggtcaaagtccagattaatcttctttcggtgtcccgaatcaaaaatccggtggct

SEQ ID NO: 10871 - DNA, 2809 bp, Unknown
  gut microbiota DNA sequence
acacgaaaatactaagcctttcatcaatttagataaatcattgatgaaaggcttagtattccctattttacccctcgactatttcttgaatatcttttctaattctcgatcaagcccggccgagtcgccaacatatttcaccacaatctttccctccggatctatcaaaattttagtcggaattgctgaaatatcatacatctcgttgagttgtttttgctggtcccgtttttcgtaaatattcatttgcggccaatctattttatcttcttgggcagctttcttaatgacttcatctttacgatccgaagcaattcccagaagaacaaaattttcacccttgtatttttgattaatttgaatcagatggggatgacttttccggcaagggacacaccaagaggcccagaaatccaataacacgtatttccccctgtaatctgccaaatgaatatcttcgcccgtgtaaatattcttcaacgtgaaatcaggagccggagcgccgggagccaaagccgttctaacccgaattaattctgcgagtttctttccggcctcagattgttgcacctcgtttgaaaatcgatcatattgttgtttcaattcccccgcagtcttactggtcaaaccagaatttaagtataaccacatagcgtattcccggttcgggtgagaagtaatccactccgttgtacgttgagaaattcgttcccgcaaagcattttgttgctcgaaaacattcatcttggcaaccgaatcatcggccaacacggcatcattcaacgcatcgtgtagaacgtttatctctttcagctctttcagattcagatgttgtaattccatcattccttggttaaattcatcctcgcttaccacctccacgaaaggaaaatctttctggtcaccttgaatctcaatttgggccccgggactgacaaaaaaggtcaaatcaaatttcccggacaaaatcattcccctcttccctttccatttcgcccggcttacttcctgctctttttgagataaacgcataaatgtcagttgctgtcgttgatccgctttcccggagtacacgaactcaccgttctccactttcaaggtatcaaacttggaatccccgctctgcctgtcaaaaacgataatttttatatcttcactcatcccggataatttccctttcaccatgtaactatccgtctgccccatcatttgctgtattccacaaaataagcaaatgaattcgatcaatactattcttttcattatatttcaatttatgtcatgactaactattaattattatccacccatccgctgttaaagctcatcaccttgggcgggatccgataagtcaaccgatcttcggtcaacgtgtaggtttgttcacccactttatgagtataatttttcttatcatcttggaaaagcgggtcattccacaaacggcggatgtcgaaccagcgcattccactcatcatgaattcacgtgttctttcctccaacacgaaacggatcaatttttctttactattcacgctcgccgggatagcggcctctgctgccggcattctcttttctctcagtgtcagtaaatccgctctcgcccctgtttcgtcccccgtacgggccttacattccgccagcatcaagtacaaatccgggagatcgccacaaacggtaaacatgtagcgacacactctcttcgaataaggccattgagttaccccggtataatccttgtcactgaaaaacttcgcccgatggtcattcttcgagtacaaagccatgtattccggtttcacgtacacttgcgggggatacaggaataaagtaatcggcaggatgcttacctgtttgttgtatatcaattcattattatcttcactcaagttgatcggataagtacacgacattccccatgtattgggagctcccgtgtaaccccaattataaatctcttggttataatcaaacaattccaagataatggatgaattttgagttccctcgtaggcaatttccaaagccttcaaagctttaccgtattcacccattgccatatacactttacctaacatgaaataaccggcggcacgatacacccgctgacgatgttgagtctgtaacggtaaatcaggacaagcttcttccaattctttggtaacaaaatcatacacgtcttttaccgttccccgggagaaagaggtctcccctgaattagcctttgtcacgacaggcacaccgggatcagttgctgccgtcgcttcttgataaggtttacagaagaattgggtcagataaaaatgcatgaatgcacgtcccaccctagcctcggccaaaagttcctttttcttctgggtcgttccgtcctcggcatccatcacaccgttggcgataacattgtataaataaatctgctgataggccgcactccactcggcactgtaatcttcttctaagaatatatccggatcatacgtgtatgccgcccgggccgaacgtcccatattagcgtatgacgcctcatccgtgatcagttcatccgtcatgtaaataaaatatatctcggattgctgtgcggtaatggaaccgttttcatttacttttgaaaagatcaggtttgtcaggatcgtgttgttaaacaacccgtcataatgagcaatcttttccggaatatccttccctttaggtttcacatcgaggaaatcatcacacccgcaaagcaaaagaccccatagcaggaaaaatatattgtatctcgttttcatatcttttcgcattatattattacttaaaattaactgtcaat

SEQ ID NO: 10872 - DNA, 4037 bp, Unknown
  gut microbiota DNA sequence
cttgatggttggccgcccagtagaataaattggatacttgaaaacgtatcttgatattttctgccgacagacggtcgcagattccactaggcaaagcataggccaaggataaattacgcaattttatatacgacgcatccagcacctgttgatccgagaaacgatagagacttatatcccgacgagtagttgaagtcttcgagttcgcctcgtaagaaggaatatccgtaatgttttcatccccgggttgacgccatcgtttgtcgaaatccttgtgcaagttcgaggtgatacgcccggtataaaattgattgacatcattccgcattttatgtcccaagttatagacaaacatacatgacaattctatccccttgtagctaaacgtgtttgtcaaacctccataccagggagcctgcatggttcccatatagcgcatacatttcaaatcagtaaggtcctgtgtcagcttcaccttctccccgttttcatcatacacttgcgggtctcccatattatccaaacctgcccaacgataagcaaataaactaccggcagcatatccctctacatagttttcatagataatgctggaaggagataaggcatttgcaacggataacttttcaatcgtgtttttattgtaagtcaaggtaaaattcgttgaccagttaaacacgccactcgtattctgactattcagcgaaaattcaaatcccttattcgtcatcgttcccaagtttgccaaggcattcacccaacccgtaacaggattcaatggcacgttacccaacaaatcggttgtctttttgaaataagcatccaagcttccgttcaaacgtccttgtaacacggaaaaatctaccccgacattgattgtccgggtcttttcccaagtcaacttatcattagccggggtcaccacgttataccctttccccggatagacggcatcccgtgtcacgaccaatacatcatagggcccccccaaccccggatccggagaatttcctcccaaaccgtagctaaaacgaagcaccaagcgatcgagccaaccgatgtgctgcatgaaattttcttgtcccaaggtccatgctccaccaacagaccataccggtttgtattgaacactcggatcactcccgaatagatttgattggtccacacggatgctggcattcagcgtgtacttggaattataagtataagccccgttagcatagaaagagacaaaacgatactcggtctcgctatccgtgaaatgtttctttgtcaatttgttcacggcagacgttccttgttttaaaatcggattcttgatcccgttttttattaattcgccctcgtcataagaattatacgtcattgtctgcgggtcatatcccctagagaaggtgccatgactattggtcaaagtcccccgaacctccattccggcaagaccggtcacgtgagaggcactctcttcaaagtttcgatcatacattaactggttacgtacagtccaatccgtgttatacgtcgaggtattcgtgtaatgacctccggtttccggtaaatagaacgtgggtaccccgttctctgtcgtggcagcttgagcaaattccactaattcccgacgcacggagaaggattcttggtcattaaattgttcggctttacctccgctacgttggtattggaaacgaccgctataactcaagcccttccacagtttgatttcaattccggcattcacccgggcattcagaagtgtcgatttattgaatccatcccgattgtcttccaaaggaatataatccagactaactccacttaaattctcgtaattcaagcgatccggctcgtaaaaattcaacacggaatgagaaagcgcatttccattctcgtctttgaacatcatatagggtaatatactattattcaccgaatacatggatttatttttcttatctgtcatggccagattgaccgtcaaatcaattttcaaccaatcggtgaaattaaaatcctgtttcaggtttagcatatatttattcgtccgcactttatcgttggtctgatcattaccgaaacccaaggacccgtaataacgatgtaccccgcttcccccatgaaggaaaggctatgattggtgaaaaaagccggttgcatgaacaaatcttcaatttgcgaacgattattcagagaggccagtctcgcaagttcctcatccctttgtacctcggtatactccttattgatagctttgtacatcgggagttcgtgaggatacacgatcgggaggaatccgctaataccattgttggttgtcgttaccgcattccaagtataaaattccgaatcaaatatttccgtcgcacttttgattaacgtgccgcttgacatatactgcatataaccgaaatcaggcattcccttataagtaaaggaaccgtcataactgattttaatcttccgatcggtatctttaccttttttcgtcgtgatcacgacaacaccgttagccgcccgggctccccagatagatgcagccgttgcatctttcaaaaacgtaatgctttcaatgtcattgctatttaccatgttctcgaaattctctgaactcatggcaaccccgtcaaccacgaacaacggactccggttggatgaaatggaagttaatccccggatcaagtatttatcctgtccgtcggcatagttgatattcaaaccggaagtcaatccctccatactttccaacacgctaccggtcaatccaacacgctctttaatctcgctaccggaaacaataccgaaagaaccggcatttctctcttttgacagggtttggtatcccgtcacgaccacttcctccatctgctccacatcttcttccatcacgatgttcagttttttgccgggagtatatttcacctcttgttttttcattcccacgaaagagaagacaaaagtgaccgtgtctctcggaatcttaatcataaagtttccgtcaatgtcggttaccaccccgttatgagttcccttaatcaacaccgttactcccggaagtggctctccttttttatcctttaccgttccggaagcctgttttgtttcctgctttttcacctgaccactcttcgcaaggatataaataatatcttgctcgaagaaataacgcaacgaagtgttgtcaaaaacctgatccaacacttcccgcaccgttttcttgtccgccttcacatcaaaagctgtcagatttttcacgtgttcttcattataaatgaagcgtaacccagtctgtttccatatttcctgacacaacgtgttcacgtcgcattgatgcaaattaagggaaacaacttgctcctgcgagtaaccattcgccatggccccggaaacgaaaaagaaacaaaaaatcatcaacagtctcataattttaaaagtctttgattttttcacgctgaaaacagcgcttttccaattagatttcataactttgttattaaagattatacattctgaataggtatccgcttgccaatggacctattcattgatctttcaaaaggtggagatgggggaaacatcttcactttttttatttactacttactattactttatttccttgtactttaaaacgtgcatctgatattttttcaaaagaaacaaacaattcccgtacgtccttgtaacgtttcaagtttccggacaatcgtacattctgtaacctagcatcctggtaaagtacttccaacccgtaccaccgactcaatttatccataatcgaattcagagattcattccggaaaatgaaatccccgtttttccacgacacgtacgccaatacatccacatccgccaccgtgattttacccgacacttgatcaaacacgcctttctggttaggtttcaacaacacctcttttccaccttgattcatactcacacttcccgtcacgagaaccgtctcgatgttgttgtaggtattcacgttgaattccgttccgtacactttgactgacatatcatcaacctgtactaagaaaggc

SEQ ID NO: 10873 - DNA, 190 bp, Unknown
  gut microbiota DNA sequence
attgtagtacgtgtgtagcccaggtcataaggggcatgatgatttgacgtcatccccaccttcctccgttttgtcaacggcagtcccattagagtgctcttgcgtagcaactaatggtaagggttgcgctcgttgcgggacttaacccaacatctcacgacacgagctgacgacaaccatgcaccacctg

SEQ ID NO: 10874 - DNA, 25960 bp, Unknown
  gut microbiota DNA sequence
ctccttatcctctcgcccctttttcacccgtcctaaatcccagaaattaaaacactcgaatatctccgtccggtaagatgggctaaccggaaacacattcttgccgatacaaagcgctttcccgataaaaccatccacctcgtaaagattcacaatataacttcgatgaacccgcttaaaccgatcctccggcagaaaaggctccaacatcaaaagtggatgagcgatcaacaaccggggcttatcccgccgatagatataacaataacaccccgaagcttccacatacaatatctccgagtaaaaacatctttccctacgttccccctgacgcacaaaaaaacagtctagtatgagacatttcgtctgatcatttgtttttttcataacgattatttttaaatcccgcaagatgacctttcaacacctaatgcctttcacaattaaaaacaaaaagggcgtgacaaaagttctaacactctcgtcacgccctcattatcgagtatcttatttctatctaaaatctttttaatccctcaatccaaaatcgtaaatcacaaattattttcagttcttcaatctaaaatttaaaatctaaaattagaaagttgtctcacaactttcgtaactctctctatatcctcgtccgtcaacgttggccccgatggcaagcacaaaccgatctcgaacaaccgttcactcgtcccgttcccataaaacggagcatccttaaacaccggttgcaagtgcatcggtttccacaacgggcgactctctatattatccgcatcaagagctaacctcacgtcctccctcgtgaaacccgcctcttccgggtccaccgtgatacatgtcaaccagtaattcgagttaaaatctcctccttccggctgacacatcaccttcacccccttcactccggccagtaacttcacgtataaatcatgaatttcccgccgccgggcaatatgttcatccagcacgaacatctgccccctcccaatcccggcgcaaatattactcatccggtaattatacccgatcttctcgtgctggtaatgtggtgcctgctccctcgcctgcgtggcataaaacagagctcgttttgctcgttcctcgttcgggcagaccaatgccccaccaccggaggtcgtgataattttgttcccgttaaatgacaacgccgcatattccccgaaagtcccgcattttcgccccttgtactcggaacctaacgcctctgccgaatcttctaatacaggaattttataacgattagcaacctccaatatttcgtccaatttccccggcattccatacaaatgcacgggaataatcgccttcggcagccgtccaatcttctccactcgatccttaatcgcctcctccagcaacaccggatccatattccaagtatctacctcactatccacgaacacaggcgtcgcccctagataggcaatcgggtttgccgacgccgaaaacgtgaaactctggcaaatgacctcgtccccctcgccaacacctaaaagtatcaaccccaaatgcaacgccgccgttccagcgctcaacgccaccacttgttttccctcattttcaactttcaatttcccattttcaattaaaaagtcccgtagagccttttcaaaagcgttcacgttcggtcccagcggaacgacccaattcgtgtcgaacgcttcttgtataaactcctgttcccgtccgcccatatgagctaacgagagccaaattcgatctttcataaatatcgtgttattatcattatctttccattctcaacacactcttcattgccactctttaatctgttgctccatctcttttttacaaacaagtaaagtatcaccgtgctcggcaacaatatacccctccaaaccttgaacaaccacctttctctcccccggggtatgcaccacgcaattcttacaatcaaccagctttaccgcgttcccgataacggcgtttccctcgcgatctttatcgagaagggtgtataagcttccccatgtccccaaatcactccagccgaagctcgccgggtaaacgtaagtgttcgcgctcttttccatgatcgcgtaatcaatcgagatgttccggcaatcaaaaaattcccggtctataacttcttgctcccggcacgtgaaatacacgtcgctcaaaccgctaaatttagcggcgaggtctggagcgtgttgttcaaattccgagatcacggtattctcgttccagataaatatcccggaattccagtaataaccgccttcagccaggtaactcttggccactgccaattccggtttttctttaaaagcctgcactttcctgatcgccacgttccggttcccctccccttttatataaccgtaaccggtctcgggacgatcaggctccatgcccagcgtcacgatcgcgttcgacgaggccgtgaattccaaccctctcgtgattacctctcgaaatttcccggtatccagcacgaggtgatccgccggggaaaataccaaattcgctcccgggtatttctttttaatcttgcacgtcacgtaagcgatacacggggccgtgtttctcctgcaaggttccagtaacacttgctcgtcccgtattcccgggacttgagccttcacgagttccttgtagtcctttgaagtcaccacccagacatgatctgccggtatcaccccggaaaaacgttccaccgtcaactgcaacaagcttttaccgacacccagcacgtctataaattgcttggggacttccggggtactcatcggccagaaacggctaccgacaccccccgccattattatcaagtgattattgttcattttcataaagttttaacgttcgtttcccgtacatgataatcacgataaaactgatcaacgggacgataaaagagagattaactgtcgagtgcccgctattgattcccgcgtcaataattaacgcttgtaacgggggtaaaagcgatcccccgagaatggccatgattaaaccggcggaacctaatttcacctcttcccccaatcctccaagggctataccgtaaatcgtcgggaacatcaaggacatgcaagcggaaaccccgaccaggcaatacatgccaattctactttcaaatccaatcactcccagcattaaaattcctcccgaggttgccaatgacattaacagtttactcgggtgaatatactttaacaagaaagtgcatacaaacctgctcgcgcaaaacaacaccatggcgacaatattgtatttctgggacagtatttccgcgctcttttccgttaacccctcccgcgtgaatataccggtaccgtattgaataataaacgtccagcacgtgatctgcaaacccacgtaaaaaaattgtgccacgaccccctcccgatattttttattactatacaatcttcgtaaagcatctctcgtggaaagatgttcaccggttttcccctccaactctctctctccccgtggcattttacacgacaacatgaccagaaacacgaacaagataaaaacaccgatccaagcgtaaggagtgactagaatggacaaatcgctatcctttatcacgttaaacgtttcatcatccaacgaattcctttccgccgagctcatcgggtgcagtctcgcctggataaaattcatggcaacgaacattcccagcaaggaccctaccgggttaaaagcttgtgccaggttcaagcgacgtgttgaagtcttttcatctcccatcgacaaaatgtaagggttggcactcgtttccaagaatgacaaaccgcacgtcaaaacgaaataagcgcacagaaacgggtaatacgagcccgtcatcctggcgggaataaacgccaaggccccggtcgcgtacaacgccaatcccgttaagataccacttttataagagaaccttttgataaacaaggccgcgggcacggccatggcaaaataccccccgtagaacgccacttgcaccaacgtaccttccgtcacggtcatcctgaaaattttcgagaaggccttgaccatcgggttcgttatgtcattcgcgaatccccacaaggcaaaacatgaagtcacgatgataaaaggcacgatgtaatttgtaccggacgaggatctaaacaatgaatgtttcatttttcgagttcaaaaattttatccattaaaacccatttttctttagaagaggcgctctcctccacgtcttgaaatcttgccacgtgtttttcccattccgcctgccttggtaatcgtgccaggcgggacatatccttctcccagtcgaaatcatccaccgtgtccacgatcatgaacaacaagttctcgtgaatgtagatttgcatgtcgagaatcccgacctgtctcatcccttgtagcacttccggccatacattctcgtgcacggagatataagaagagatcaactcctcgttatcctttaacttcaacgtctggcaataccttttcattcccccctcctccttatttttacacgtatcgaatcctccaacggtttttcgcacaccatcgccaggtaacctccacccccggccccgggcattttccaggccaaaacccgatctttatacttggcgatctcttcctcgacaccatctgccaacattcccgggaacaacttgatttgagcctcgaaagaagctttaaaagccgccgcgaaaccgtccaggtcctttctcatgatggcatcccagcaacgggacgccgcgtccgccaacgctttcacgttctcttcattcaagttacaacccttcacgacagacgttcccggtcgccggggaaacattaacttcatgcaaatatgttcttccaaccagcaaaggatatcttcatccacgcaagtctctattttatccggccagtaattattatcgtaataatgacggctcaagccggggacacagattccgatagcgtcttgggctccggacacgtgttcttgcttgttcggttcgttctcgaaacaaaaaagcaacctggccagcatctcgctgttataattgggtaactggtacggccagattttcttggccgcgttacgcgtcgatgtcgacataccgcatcgctcctcgaactctatcgtgggctccagtgaaatcgtcaacgcccagcccgggtgaaatttcgaaacgtgaggttggtcgatccaggttcccgcgagatccaggcggaaaggtaaccgggactttaccgtggttcgaatggccgtcgtcgagcgagcttccaaaccggcatccggtacacgtttcaataccacgtattcaatccctcgttcctcgcaaaacgttctcttcacgtccgagtccccgtcttcattcaccacgaaaatatcgggcttgattcgttccacgcttttcacgaaatccatcatcccggaaccctcgttaatacaggcatccttcacgtgacgtatggcctttaccatgtagaggcgttccgcctccgaacaaaccgtttgcctcgctttcaacccgagtatcgtcgcgtctgaaccgatcccgacatacaagtccccgtagcgtgccgcgtccttaaaaaaagcgacatggccgctatgaagcatgtcataacacccggaaacgaatacttttttcgccatgtctacaacgtgtttttataccactcgaataaacgccttaccccctcgtcaacgttaactttatgcctccatcccagggcctgcaattttgaaggatccgttaacttccgcggcgtcccgtccggtttcgacgtgtcaaagagtattttcccttcatatccctcgactagagccacgagttctgaaagctcctttatggacacctccactcccgtgcccacgttaagatgacagttccggatttcctttgcacccgcctcgtgagtatccttgaaatccacgtgttccagcacgtgaacggaggcgtcagccatgtcctcgctccacaagaattcccgtaaaggtcgtcccgatccccagagctctatcctgccagcgtgaatgccgtacttccccagtacagcctctatttcctctctagttccctctccagtgacactttccacgggacgtctattcaaatcctggcgtgttaacgtccagttaccctccatcaggcacttgcccaggaatatctttcgaatcatagccggcaacacgtggctgttctccaggtggaaattatcgttcggcccgtaaaggtttgtcggcataacggccacgtaatttgtcccgtgttgcaggttaaaactctcgcacatcttcaaaccggcaattttcgccatggcgtaaggctcgttcgtgtattccagcgggcctgtcaacaggcaatcctcccgcatcggctgaggggcctcccgggggtagatacaggtgctgcccaggaacaacagcttcttcaccccgtgccggaagctctccccgatcacgttctgctgtatctgtaaattccggtagatgaaatccgccctgtaagtgttgttggcgacgattccccccacgtgagccgcggcgagaaccacgtactcgggccgctcgctgtcgaagaattcacgcacggcgacaccatccagcaagtccagctccgagtgcgttctcccgacaaggttcgtgtaccctttcgacttcaagttgttccagatggccgaccccaccagtccccggtgcccggccacgtatattttactctctttatccatcacatttgagcctttagatgaattttcttcacgaatttcatgtcgtgttccaccattatcttgaccagatcttcaaacgaggtcttgctgggattccatcccagtaacgtcctcgctttcgtgggatctcccagcaactgctccacctccgccgggcggaaatacttgggatcaacttccaccagcaccttgcccgtggcgacatcaacgcccttctcgtccaccccctcgccttcccagcgaagctctatccccacctccttgaaggccaacgtggtgaattcccgcacggtgtggtactcccccgtggcgatcacgaaatcttccggcgtgtcgtgttgcaggatcaaccacatgcactccacgtaatccctcgcgtacccccagtcccggagcgcgtcaaggttccccaggtacaacttgtcctggtatccctgcacgattcgagccgcagcgatggtgatcttccgggtcacgaacgtctctccccgtctctcgctctcgtgattgaacaagatcccgttcacggcgaacatcccgtaactctcccggtaatttttcgtgatccagaaaccgtattgcttggccaccccgtaaggggaacgggggtaaaaaggggtcgtttctttctggggaacttcctgcaccagcccgaacaattccgaggtggaagcctggtaaatccggcactccttctccatgcccaggatacgaacggcttccagcaggcgaagcgttcccaccgcgtcggcctccgccgtgtactcggggcaatcgaaagacactttcacgtgactctgtgccgccaggttatagatttccgtcggcctcacctgttgcaaaattcgcaccagcgagctcgagtccgtcatgtccccgtaatgaaggtctatcaacttcttgttcttcatgtcccgtacccactcgtccaggtaaagatgctcgatgcgagccgtgttaaaagacgaggaacgacggataatcccgtgtacctcgtaccccttttccagtaaaaattcggccaaaaaagaaccgtcctggccggttatgccagttattaaagctatattcgccataaaatttatcttattattactttatgaattttttaccgagcggtataccctccatcaatgaccaaattagtacctgtcacccaacgagaagcatccgataacaaatagatacaagcattcgcgacatcctccggtcttcccaaacctaacaaatgttgttcttcaagtatttttcttttttcggggtttgctatatgaggcaagtgttcgttaatcggagtgatcacaactcctggtgaaactgtgttcactcggatactttttttagccaattcacaagctaaagaacgcattcctgcaaccagagcccccttagtcattccgtacaaagatttcccaacttcaccaacacaccccataacagaagagaaaaaaacaatacttcccccatttttatcaaaatgtccgactttacaaacttcttgtgtcaaatggtaggcagcaaatacatttgttgtaaaatactcttccaatttctctttagataccaacttcatgggtaatgttgccgagattcctgcacaattcaataacccatgtaaacgtcctttctccctcacaacatattccactatttgagtcacccaatcaaaatcagtcaaattacccctacaaaccaaatgttttgacggctcatccatttgactcaacgtctcttctaaacgagcattatccctgcccatcaaaatcacagttgcccccattttactgcaactaatggcacattgtctcccaataccggaagaagcccccgatatcaaaatatttttaccagtcaaatcaaaaggagtcatacctctacaatatcactgatcttacaatcattaaaatctacgattgccgtagcccaagtcatccctacaccaaaagcactaagtaacaatctcttattcccatccagccgtcctttcaattcgcttacaatcgtcaaaggcaccgacacggaagaagtattcccgtactttgctatggtagaaggtattttacttgtatctaactttaactttttggcaagatacgagttaataaagttatttgcttgatgaaataccatataatcaaacgagtctttatccatgcccgtatactcaagcaacgctttaatatctcgggggatctccctgatcacaaaattaaatacatctcccccgtgcatatatccctgttcctcgctacggatattcccatactcgtccacgaccctttcccgaaccgtttccatggaactcattttacgatatccccctgcatcaaccttaatcaaaccttccctcgatccatccgaatttaatgagaaataacttttcccgaatcgttcgttcctctctaccaaagcagcaaccccaccatctccaaaaaggaatgccgtacgtcgatctttaggtgaatacactttagaacgagtttccccatctaatattagtgctttccttatccctttttgttgcatcaaggcaaacaccacactcataccatacatgaatgccgaacaccctaaattaatatcaaatgcaatcgttgaattccctaatttcaatcgctcttgtaatatcacagatgttgccggcatccgataatccggtgtttgagaaataaaaatcaacaaatctatttcggaacgatcaatatgattatcctcgatcaacttttctgccgcggcaaaacacaaatctgaagcacaagtattttcatcagcaaaccgccgctcgtaaattcccactttatccacgacctctttcacctcttctgcgggaaaatattgtgtgtactcgtaattcttgatcacggtacggggaacagctgccgccatagctgtaattccgactccttcatactccaaaaaagccatgcctattttttacttataacgttaaacaaatcactgaccgtgatcaattttttaaattcagcctcctcaatctgacaatcatactcttcatctagcatggcaataacagacaaataagccaacgaatcccattccggatattcccgaaatttatcatccatagccaattcacgatcttcaatctcaaaaacatcttttaaatttttcaaaaattgctctttcataatactctatatttattgttctttcatcaattttgccggatttccaaagtaaagcataccatcctttgttttccggataaccacacttccggccccgatacgcgtgttattcccaatccttattccttgcaatataatggaacgtaccccaaagaaattagaatcaccaattattgattctcccgacacgcgtacttccggctgtaacatattgtaactcccgatttgtacatcatgtcccaaagacacgcaaccgtttaaaagattaaaatcaccgaacttcaccccacaactgactctcccgccatacgtgatcacattcccctgccccatctccacggactcctgatcaaaaaataacacattcggagctataatattaggaaattcaatattcggattaaccatctcccttgtcaacttttgcaacacgcaaggagaagcaatagccatcaccactgacaacttctgcggataacgattcaccacgtctattcctcccaacacctttccatagcgattttcttctccctcaacatgcccatcatcaaaaaagccaatcaaattccaagtcggttcaatctcgttaatggcttgaataacacaagcgacttctcgaccgaagccaccaaatccatatatggcaatatctttcataacatacttgttttacttcctctaaatggttccatcgttgcagcggttcccgaattaattccctcccgaacaaagacctttttaattgtcaataacacgattttcaaatcaagccacaaagaaacatgatccacgtaccacacatcataatcaaatttctcttcccaagaaatagcatttcgcccgttaacttgtgcccaccccgtaatcccgggtctcacctcatgccgccgtgcctgtctttcattataaagtgacaaataacgcaccagtaaaggccgcggtccaatcaaagccatatctcctttcaacacattcaacaattgaggcaattcatcaattgaggttgaacgaacaaaccttcccacttttgtcaaacgtttcgcatccggtaataatttccccgaatcatccctttcatcagtcatggttttaaacttgatcactttaaatatcttaccatcttttccgggacgttcttgggtaaaaaacgcccccgctcctttattagcaaaatgcaaccatatgcagacaattaaaagaacgggccaaatcaagagtaaaccacatgtaaccaaacagaaatcaagtagacgtttgaaaaaagatttatacataataattaaggcaacttttaatcaataaactctataacaggggctttttcccaatcaaattcatcattagctctttctacatttataaaatcgaaatcacaaataaactttttaagtttatcaaatgcacctgaaataccataataacttttgaaatatcttaaagaaaggacttttttctgatgtgcatcaaaatcccgaatatgaaaataagacattacataatcagatttcttcattattttttgtattttccaataaggaatcaacctaaaatatccccctccggaataagcaatattcattccccacacatttgcaatattaataggaaattcttttattatagtatttccatattttataatcgtcggttcatgttttgtaaacgaagggaaaccgccaaaactacgagtagcaggaaatatggaacaatcatattctataccgacctctccaagaacctgcaaagcccatttattcttttctgttattgaaaaagcaggagccctatatcctcgtactttctgaccggtaatatcctctaatatatctatagcttcttttgaatctttcaaaaaacgagcataatccatctcatatacaaattgatgcttatgagaatgacatcctatctcatgacctttccgtgctattcttttaattatacccggatattctttccctaccattcctaaacaaaaaaaagtagccttcagctcttgtctatcaagcaattccaacaattcgtcaagataagactcaatgataggtaaataaaaatctctaggtcctttatcatattgctgataaacaaaccattcctctagatcaaatgttaaaatattcatctcgcatcgaaattcattaaaccaaattcccaagatttcaaatcttctacaactttctctaaaacttcatttgattccttatttaaaacattcacagtcattggtaagtgctttggttctaacctccaaggaacttttaacaaaaggggttgcttaaaccccaaagtaccaataaacatgacagcatcaacttttgaagtatgttttacaatatacttcaccaaatgaagtaatgatctgaaagtacgttctcctttttctcggaaatccattatgtaagctacttttacgccattttcatcgcaaattcgataataacccacatattgtctactctcatatttaatatactttctcgtgtcgataaatcgaaatcgataaaaatctttgtctgcacaaatttgcaattttctagatatagcttttacgtgaatgtatctcgaaaaaaaatctaacagccatatttttacaatacaatatatataggaaaagacattcaaaaaattcaactttttaacatgcaataacgtaaatgctcttacgggtaaaatgtaataaggcaaatatccaactaatttagatttaattatttttattgtatagcgaaatgaatttttattaggtactccaacttttaaaaccatcccttctgatttacaatactcaaacaaagcattcattaaatctttaaaaagaaaaatattatttcgaaattcttttagaacaaatgtacctccactcaccccgacgagtagtttctctccttgatactgataaattgtcggaataaatgaattatatcccattactttattgtcatctgtataagctattgcatgataagaataaccaaacaccgttgacacataataattcatcaaatgatctaccgagtgctgcgtatcaaaacagatattaaaaccattcgctatttgcttccaatcctcttccgaaatctcggatgttttatagacttttatattcatctttttataaattgatatgcattattaggagaaaatacgttctttgccacagagacattaactttatattgttctctcaattctacactatctttcaaatttttaataaaagagattatcccgtctaaatcacttggatcaaatacccttccattcttatatgtttgaattaatttagcaagttctgaatttgttttagccacacacaataatggtttagacaattttataaaattaaaagttttactcggcacacaaactgttgaagcccgcccctcaactgaaatataagctatatctgcggcagaaagagaatacgcaagcttatcaaacggctggaatggtaacagcaacacgttctttaaagatttttctataatcgaatcttgaatcattttcttttcccacccgtctccaataataacaaatcggacatcatcatcttctttcatccgctctgctattgacaccaataatttaacattatgtcctttacctatattccccgaatacataataataaacttatcctgtaaaccatgttcaagaataaatgtatttttaactttatctatcggatttagatctgcactataccataccggaataatttctattctttccctatcacaatattgagaaattctatccgccatcccttcggttatcgtataaatatactgagcattctgataaaattttttagttactttagcccaaatcctaaataataaatttcttcgtgttacaaaccctccagaaacaataccatcaggataaacatcataaatcaatgtagaatacaagtttttacaaaataacgttataaaagatattgttggaggattggaaaccaaaaacaattcataactacgatacttaaataagactctgaaaagtacttgaatcgtaccataaacccaagaaaaaaacctccttcgtaaggactttctattatacttacatatcttttctacacacacgtttttatccaatccgacaagagcctctggattacctgccatcaatacaacttgatcatattttccggaattgacaaacgcattcgcaatatccaccatcaaatacccggaactttgatttacaataagaatacttttcattcaaaattacttctacctattattaaatcccctaattccatggaagtcataaactctatatccggccaacgttttaacatttttcctaataattcctcgaattgttttaaagtacgctccctgttttccgggtataaaaaaccaatataattcaccctatgagaactgatcgttgcaggcttatgccacaaaaacgcaatttctatctcctttaaacaattatttacccaatccgtattggtaggaaattcaaaaccggaactacttggttcaaaaaaacaattccgagttaaataaatctgtcctaatgcatttttctgtcccaaaaaacgaacattctttttaaattgcccattccccaaaggctccatctgaatttttccagaattaacatatcttacgccattattccacaatatcgtctccaatgaattattaaaaggtccattcgtcggtacaaaatacgtggatcgataaccatacaaacgttcaaacagatctaacccggtatttagaacctcttgcatataggataggtcatccatggtatcaatgtcgaaagcagcttgcaaatttggaattctctctccattaataccttttcctattccggtcaagtgattttcaaaagcaaacaacacggaactatttccattcttcaatgcacgtaaccatcgctgcacgttcaaatgttcccgtccatgaaatataggtacaaacaaacgtcttttaatcccttctttccataattcatacacacgatcatgttgcggataacgctttaaagtctccgtgtaaggttcataaaaataactacgataattttctcgcttaatttcatcaaataacggatttgcaacaacattcactcctgtcattaccggatttcttccgcttttatcatgaaatttggaaagcacgtcaaacaaacactctaaatcttgattacattccaaagaatcatacaaatcataatgactgcgcccaacaaccacacctcccttctttaatgtttcaaaaacctttaatgaaggcatccgaatactcccccaatcatccgattcaataacaacaattttacgttttgttctccagcctggaatattactcgcatgaactgtcaacaatgacttcaaagtatctctatacatgattatatcaatgatttatacaattccacataatctctataccgatcttccttattaaagaatttctccgcacgttccctacactcaattctatacacgtccctttcacgaactaatatttccaagatcgcctctctcaacgcttccacatctccccgctcaaccactttccccgttacatccgtaatggcttccggacttccccctgtctgataggtaacgacaggagttccacaagccaaagcctctatattagttgtcggaaaattatcaacccatgttggatttacaaaaacatccgccatagcatacaatgctgcaagttcctctacattctccgtacgtcttatccctaatattcccttgggtaaattcgataattgtttttcatttaatcccactaatattatttgaacatcttctcccattctctcttttaattgaacaaaatcattcaatccctttcttcgatcccaaatactcgcaactcctaatacaattttcgtatcatactgaatatcatatttcgatctcacttcttccgaccttatcggcttaaaaacatccaaatcgacaccattatgaataactttcaccggataattttcaaagaatgattcttggacaacacttttcaaccaatgagatggagtaacaaacgtaatattggatacttctgtgaaaatcttcttcttcttttcaaaattttgtttcgagcgatctaaaaataaagataccgggtatcccttcaaattcggacaagcatagcatcccgttttccaacgatcacaacgaacaaaatcaaaatacgaacaatgtccggtcataggccaacaatcatgtaaggtccaaacgataggtttttgaacttttttcaaataatcgaacaaaacctccacattcaaataatatccatgcaaattatgcaaatgaataatatcaggatttattctctctaaccctttcacaaataatttcgttgctttcgtagaagcaaacccgtgattatcccacaaacgagacgttaatgcatgacgtcttacactagctacgtttccaatatgtatcaattgtgatttactttcacgtgccattcggccataagcaatataacttccaaagccagctttcatagccgtacttcctatttcttctgctatccgaccagtacttcctgtatttaccgaagtattaatttgaagaagtttcaacataaattccataattggacataaatcacttattattcaatataaaatcaagatatttttcacacactactgaagttgaatatttcaacacactaggaggtgcgttttgaaccatttggttacgctcttcatcgtgttgcattaaatatgctaatttcttcttaaacatctcttcgtcaaacaagggaatcaaatatccattcttaccatcctcaaccatatcagctggccctgcaatacaatcataagcaataacaggcaaaccggcagctaaagcttctccgataacattcggaaatccctcgctacttgaagtaaaagcaaaaatcttactccttaataaataactcacaacatctttctgcgaaccggcaagaataatcctatccgtcaagcctaaatcatctatttgcttttgcaaaagcacactattcttttgttttaatgcatctcctccaactataatcaacttccaatccccatatacaacttgtgaaaaaatacgaatcaattgatcaaaatttttcgttgtaatcaaacgcccgactgaaagcacaatattttccttatttaagaaattaccatcttcaatttttcgaataggatttcctatcacacgtatattaggatgtttaaattgcgtcaaataaatactcttagctttttctgtctgtgcaataatcccagtagccttaggatacaaccattttcttaaatgatcatgcaatcttccaaaagatttattcggacggcagcgatcagaaatataaatcggataatgcaacccccacaacgataacaatactaaattattaaatatttctccaaaactcaatatagaaacaggatgaattttcttgatttcttctctcaagtagtacatcgttttaatcgtataaaccactcgattataatcctcatatttcaaatgtggtttatgcataaacaccgtacttggaatcttataaaatggagtatgctcttttccatacaatacaagatgcaattcaaaatccgtatattccgcacaatacttaagtatctccgacataacacgttccattcctccctcaatcaaggttggaataagaaaagcaatctttctcatctgataaacatgaataaataaatcacaacactcttgattaaaaacgatgccacttgggacttaacaagacatattttaccctatatactgaattattcaaatacgacaccatctgtaacgaaaaaaactaattgttcaacaacatatcttcaaccatccaaccacaaaaatcaaaattctcaccagaataccaattaagctctcgatcccaataaccctcgcatttgtcatatgcttccaccgcatatccataagacatctctacaattagagggttcccgttgtggtcaaaaacgaaatcatatcccatactctgcgaatgtaacgtatcagatacatcaaaagctattttcacacagcgttcatctatctgcgacttttcatatataagattacctcccccggacgctctaaaatcattttccctacacaatcgtttgattccaaaagcatgattaccaactacaacaatacgcaaatcgtaagtattgttaggtataaaatcttgaaagtaaacataccccttttctggtgcatgcatctttgcaaattccggtttaaccaataagcgaacaactccctttagcacgtcttttatgtctgtcttccccaatctatatttacgaattcgctctttaagattcctccatccactatattgcgggaaaccacccctaaacgccttgtacactaatttctttgcctctctacgtgtatgcactagcataacattagccgcccccgcacctcccctcaacttaaatacctttggaaaagtagtcttatcaatccacttccgtgcttctttggaagtataaaacacataacttgggaccaatggagcatttattgactccaacaaatatttctgaccaactttatcatcaaaatgccatcctgaattataattaggaaaaacctttttaccggattgttgaagagaaaaaagtaactgctttgcgaacaagcagtccttataattcgcttgatgatgatgccacataaaagcatcacaatctgccatctgtttgattatatccgaatcgtaggcatttacaattttataatcaatattatttttttggcagtaatttatccagcgttcggaaaaaccaccagatttatgaattgctattttcattgttgtgacaatatctttaataatatatctctatgcgcttcacatctaatgatatttaaataaagacgttttttcgcccccttaataaatcgtgagaaaaatcctcgattcattgcagcaagcacgtatttattctttacgggctctaaataagctccatacatttttttttgagtttcaataaacaaattatattgctgattcaacatttcatctgacaatataatttcttttttcatcttttgtttttgaaaccattgttccttgtttttccctgccaataatgatactccaactttattattacactgctcaaatgggtaaaaatgaagtttcaaatgaccattattcaactctacaacaacagcagtcccgaaattccaataattatcacgattcgttggatgatcaaaaataaaatttcccaagctataaacaataggcttccctttataaacttcatcaccactaaaacaatgagtgtgatgaccaatcaccgcatctacaccaagatctataaaccaacgatataatcttttcattcttggactgggcaactcgtatgtttcatgtcctccatgaatgattaatatcacagaatcagaatttcgctttgcctccaaaatttgataataaacatctacttcatttagaggatttgctcccattttatcaccatctgtcgtactccattcattctcagcaacattaataaaagcgatctttgtatttttaatcaaaacatatttaacttcttgtgcttcttcaagctttttccccacaccgatataatcaatattatttttcttacacaagtccatcgttaacaacaagccttcttcaccataatccataatatgattatttgccaatgtcaccatactaattcccgcaaatttaagagcttcaatgctttttatcggagctttcaaattgggaccagttttagctatcggggttcctttttcaataagaggtgcctctagattagtaatagaataatccgcttctctgattattggcaaaatatctccataaagttgagcatactcttctttatcaatgacatcattcactcttagtcgaggggcaaaatcgcctgaaataaatatcttaataatcttatcattcattattcttcgttattaaatcgcccaattgatcagaactcataaactctacatcaggccattgtttttttattccaatcaataaatcctttaataaaaccagatttttatctctattatgtacatttattgttccaacaaaatttacccgatgagcagaaattatagctggatgatgataacgaaaagcgattgcgatatcagacaaacatgaatctatccaatctttatcttgattctctgatggttcaaaaaaggcattacgtgcaaggtcaatttgtccaaaatcatttctcttaccaatataacgcaatcgacatttattattctctccctcggcatttcgatatctgcaaatctgtgatccctggatatattttacgccataattggcaattgttctttctaatgattttccccaagtgtaattaggcgcaataaaagatttcgatttgaagccaaaaatattttcaaaattcttaagtccgtcagctactatattatttgcaatactttcttcttgattattttcaaaatcaaatgcgggtaaaaacgattttcttttttcattagtgatcgtagtacttataccataaaccccgtaatcaaaagcaagccgcgtctcgggaaaatcatttcgtaggtaatacatccaacgagaaatattcacatgttcccttccatgcgattgtattctaaaatacccctcattttgtccctgtttccacatacttaaaacattttcacacccttttatttctttcatcccctcatcaatacgtttaaagaaataagcagagaaatcagactctttaatcttttcaaaatcagggtttgcaactacagcattagcagtaatgaccacaggactattattcttgtcttttaccgagctcaaaacttcaaatagtaaagatatatcatcttcacttgctattgaatcattcatgcaataatggcatttatcgacacgaataccagctctaagtaatttgtcataaacttttttcgaaggcattcttatacttccccaatcatcactttcaataacaacaatatgcctttttgtacgccatccaagaatattaagaagattgtgagttattgtttgttttaaagacatagttataaaattactagaggaaaatatcttatttaatgacctatattttgattatctttcagaaatctcaccaatcgtttagcctgaacatcgatattaaaattattttcagcaactttccgcccactccgtccaacttgttttgctttctcgctatcggacaaagctcgatccatcgcatctgcaaaagaatcaacatctcctggtgttgccataaatgctgaaaaattatcttcaagataatcaggaatctctccaacttttgtcacacatacaggatttccagttgcaagatattctcccaattttgtaggaaaccctccttgtgcttgatgagagtcaggacgaggaaggacaagaagacttgcattacaaactaattccggaatttgttccttatccaatgttcccaaataagaaattttatcattaagtcccaattgtgcaatcaattctttttgtttagaaacatcgtaatgatagaatcccgccaataataaattataattaggatatttcgaagcgattttagcaaaagcttttatcaatatatcaacaccatctttagcattagaatatgttccagtaaaggcaatataaggctttctatacttatttgctatcgatatatgttgaaatcttgataaatctacagtcatcggaagatgtaaaaaatttgtatgagatttcgataaagatttataataatgttcaagccttttcgtcataaccaaaatacaatcaacactttttataacatcacaagttactctatactcttgctccaaacgttcaatcttaaaggttggcaaagttgcatcattcttatataattgctgaaattcactgaattcaataattgatttgggggccttaatccataattggtatttcaaaaatgattttctaatattatttcccccggcaatccaacaataatccgcaggtaattgaaatgcttttcttaacttataatcacaaattctagaaaccaaccgccctaaaatataattattcacacgtctgagaaataaagttgaattcaacgtatgtaccaaatatgtaatctttaaaaatggagaatttatatagcaatgcctcttcctaatttcttctatactattataaccacctaagataaaaagattaatcgttacattttcatgcattaatccctttaataacccttcatacctattggctaaggccgaagaggtaaaaaaagggttaaaatcacaaaaaaaattgacaaccatattattctttaacattattgattacatctttaaattttccagacctttcccttggtatgtcatcaacatattcaaaacaaacagatatattattaaataattctcgatataaattttcaagtcccgcacaatcagtattcctatctttcaaaacaatcctaacaatcacagaatctttttcattttgctctatttgaaatttgtcaacttttgtacgataatcagaatgtggtaaataatgagtacatacagcatgtggaactttaatactaccattgtaaataaaacaagaacttctaccatctaaatgactaagaagtttaaatggagaaccacattcacatttcgtttccgcaatctcaacaatatctccatttttatatctaataaatggaaaatctttggcaaacaaactcgtaatcaataactctcctttgccatacgcacgaatacttccatctggcaataagacttcatataacgccgtatcttcattaaggtgcatattatcgaccttacatgagcccgcaataaatccttctacagaattatattcatcaatcgtgatcgtgttgaatgcctttttaacaatcaagtccatatatggtgtgtgactttcaccagaatatataacagcttttatccttttattaataatcggataattattagataacgcataatttgcaatctcaaacaatgcagatggatatccccaaaccgattttatatcaagtttattaattgtatctattatttctcttatcattgcaaaagacaaacaagatacatcagtaatataacgatgatttatatacttgttgttcatatttattttcattttctgaaaaaaagaagaaactttgctatcataatttgttcctaaacacaattgataatcagaaatttttattccaaaacgatgatacaatctgtattttgaggcggttttataatctctagctaatgctgattgatagaacttaaagggtattccactagacccacttgttgaacacagttgaagattgtcatatgacaaatgatttgacaaccaatctgtataattatccttgattacttttttatcagtaacaggaaataatgcaagtatatcgtatacactttcaaaattcttttgcaaatctatctctctctctttgatgtaacgagagtaataagggttattacaggacagatacaaaagtaattctttcaaatgcttatattgccatgcatttaattgctcttttgtaaaccattcatttgatatcagttgctttaaacaacattccacatgttcacctttgcacaattctcgtaaacggaaaaataacatgataattttaattagtattttattatatttatattatactttcgataagaagttcaaaagataatccgttaatacatgaatcaatcatttatcccacaatccttttgccatgccattaattaatttattgtattgaattctagcaataaagagagaataaaaatttgaaattaattgagctaatggtatagagactagaccaaggttcaaaactttaataaataagaacactaacggaatataaataatagcaacaactaaaagacaatatacttgcaatttaattttaccaacaccattgataaaaatattaaatactcctccatatgtatgagatacaaaataggcaagtatagcaacagaaagaataaatggtatttgaattttgtctccaatccaaattttataaattattggagataaacacaacataacaactccaagactaactaccaaaaaccataatttaaatattcgccttaacgtgttcttaatccattccacatctccttttacccaagcatcagtataagctgtccagaaaggctgggaaattaaaccaaacaatatagagcagacagaaaataacttataagcaagattataaatcacaacatcttcattactaaatatatgtataatgatgaaattatttgcttgaaaaattattatcatgctaatattaataaagaaaaaattgactcctaagcctaaaatagatttaattaattcctttctaaaacatttaactgaaggttttatttctttatacttcccattgtataaaactatactcgtaataaaaaaaacgaatgcagaagaggcactaagtatagtagcaagtatcactaagtttccttgcatgaatcttgatagaatccaaataataacaattacaataaaatttgcaaaagtattcattgcttgactccaagcaggtttcagatatgaagttaatacagtaccaattaaaccaattattaaccgtaaaagaaaaaaggcaacaacaatgatcgtggtatatttcagtatattattcatgctattgtcttgattatacacgtttgcccaattgacaaatggagccacgaataaaaatgtcaaaagagcaatagagacaatgatcccaagaagtatatacgtggtacttacatattctttagctaatttcatgtcattctttgcgatagcttctgttaaacgatttttcataccagttcctaaacctatatcaagtaatgaaaaccaagcaaccatagaagaaattgtaagccaaataccgtattgagcaggagaaataaaatccattataataggaaccagcaaaaagctaatgagaacatttactacctgcaaaacacctaagccaataacatttttgcctatttttcttgtacgctcatccccaaagtatcgttctttaataactctaatatcaaacatatatatattttattatatcatcattgttaagctttagtaaatactttgaatgacaacacgatatagcaatatagaataatacagttttaatattgacaaattggacaccaaagcccgtcatatcgattatcatataaaaaataaatagccccaaagacttacacaataaattattagattttaaggcattaataattgcttcaatacacaaaattaaaatcaataaagcataaggtattccaccatgaagaatgagagttaaccaacctgattcgattccgaacctcgttccttgatctgttgtagccaacaccccccccataatctctcctacatatcctcttcctgtcaaccaatcttgtgctttattaaagtcgtataaaaactcctcaattggaccttcccggctctcaaaaccagtatcaaaacgttcaagaatataggtaatattctgactaaagacagcgcataaaataaagaatataataactattatgaaaataggcaataaattctttcttttttgacatagaagatatttatccctacttatcatattaaaatttaggacaaatgttcctacaaagaagaataaaatatataaagttgcagctctccgaccaaaagatatacaagacacaagaaaaaatagtaatataattaagtgaaagaatgtttttcttgtattcttttcatatggtgataataacacaagcatgccaattggtgttgcaaaagcataagataaatattccattgtgactccacttgagaacacaaatggacaagttacaaagactaaaataataaatattgaaattttagagaataaacgaatcattctcttaatataatgaatatcaaaattataatttaataaaaaagggaaaagactaattactagagaattggtaataaataatttcaatttatactgatttgataaaa

SEQ ID NO: 10875 - DNA, 1279 bp, Unknown
  gut microbiota DNA sequence
caagctgtagtcaacgctttaaaaaaatgtgattgtaaggtttgttccactcataaacatggttctgtatggcatcattgcggcactgcatcaaggaatgattattcatctataatctcatttttataagagatcagatggattgttcaagaattaaaaatgagactagcaatattgttggcctcattttcaatccttaatatctaatatataagttgtagatgaagaaatctgaagtcaacctgctttcaaatatcatttcaatgaaaatgaaataattatacgtattgtttctagtgtaataaatgaggcagatatgtcttaatttgtaattctgtaagccattctgaatgagcagaaagagcatctatttttctttttgacagtggcgtaagatttgtacccacagatagtgctatctcatgaagttcttttgaaggtgcgctatcaagcagtacctgccaacctatagatttcttaaaacactcttcaattcggaattttgcattttgatcattcttttctctaaaagcaataacatcatctaaagaaattctatgagccgataatactaactctgggacattttcctttttgatattatccataaaccgatctaccattgaattccattctgaccatagcaaagaaacataagcgtaatatgcggagtttttctttgtgcgattataaatattagttcgtatttgaatggtccggattctgttcattagaacttctatcgattgaaacattaaacagatagtattacgaactccctttatatcaggacgagcatttcccgcatcactaattaccacattctccacccgatataatttattggtactttctgttaatatataagccccctgattgtcatataaaccgccatcaacaagtaatgtatccttatattttccttcttcataatatcgtttgtctatttgagtaggtgagaatatggacggcacacaagtggaggatgcaacagcgaaggatataggaatttcttctcctttaatgatgcttcgaccattttctctataatcatatcctcccacatcttgttttgaaaatgtaaaaagacgtcctgtcgccacattagtagaattaataccggcaataggtgaatctggtaaatctttcagttttttctttctgaaaaacaacctgtcataatataaggcgatccacttactacttggaataagatagaatccccaatacagcaacaaatacaaaaacaaaaaccacccacttacaaaaatccccaaca

SEQ ID NO: 10876 - DNA, 4854 bp, Unknown
  gut microbiota DNA sequence
aaaaaattgaattattttatcatctattgaaaaataatcgtcgcattatttgaaataataaaaatatatatataaatttgcactcattaaaagattccgttacctacaaagtaacggatttttttctgactaattgtcagatatttacctccttgacatcacataattcctaacattattctcaatacgacactttcttggatagaacaaaagccacaagtgcattatttaattgattcacctcatcttcccggtaacgctggaaataagtctcggtcaccttaaccgacgaatgccccatcgcatcacagatcaggctggaattataattctgtcgtaatgccgtcgttgcccaagtatggcgagccacgtaagtacttaactgctccctgattttcaggaaatacccgacttgtcgcaaccggtagttatgcaagcgtaacatcttggaatactgccggtattcatcctgcttggagtcctgaataataggaagcaaatagggagaatcagggtacatatccttatatttctcgataatagccatcgcctcgggacaaaccacaacggtcagttttcgtcttgtcttgtgccgatgataaacaaccacgtttccctgcaaatcacatttacgcaagaatgccagatcgacaaagggcattccccgcaacaaaaacagcaggacaaacatatcccgagtaaaagaaagccgttcaggcagaggcttcttatctgtcatcaaccgacagatcacctccggggaaacagcccttttcacctgacaatcaatcccggtgtgtacccgactgaaaagacggggtatataagaggcaatccctcgttcaaccgcttgattataaacggatctcaacgtccgcatataggttgaaatggaattccacttcaattggtcggccaacagtttccgctcgaattgagataaccattctggggtcaattgcttaaaactaacttcgcgcccattcgcaaatttcttcaaccgtttcaaagtactctgataaacatgagcagtaccatctcgctgctctcgttccaactcgacaataagtcgctccataaactgtgttaaaaattctcgtttcatcttctatctgtttagatttcaatttatagtgttttataatttaccccaaccgacacataatcaaacatatgccaattagctatttatgcaaacatttcaacaaccgaccattcacttgtcgtaaaatcgtacatccaaaccaggagaaaattaaaagtttatttttaagagaatccagtccaaggctacttttcctccaccaccatgaccttttccactttggtgttcttgtccttcacggggacattcatcccggtggtattacaaacaccatcgaatccggcattcggctctatttccagcttacgcgtgtaaacatcaccttttaccatgcacccggatttcatgtacagttcattcattgcacgaatatctccttgcaacagaccatacaataccgcggtatcacagttcacatttcccttgacttttccttgtggaccaatcacaactttccctttacaaataatgtctccctctaacgttccctccagatgtaatcctccagcaatagtgattatccctttcactatcgtccctattgttatcattgtcaggttgtcagcactgactttcattaatttttcagagtcatcttcattctttttctttccaaacatatcaaatatgaattagtcattaaaaagatgaacactcttcgattttcaaatattagtatctgacaaatataaaataaataggtgaaataagagctaattagtgaacaaaaaaaagtaaacaaaaaaagttttacataagtaaaaatagcaataggaatccccaaattaacgagattaataccacacggcaagattctcgacacacaaaaaactgacaaaaagtcttatttatcccccattccatttcctgttgatcgtaacccgaaatatattacctttgtcacacgtaaaataatagaaaggaaaatcatgaagaaagcgcttgttttattatccggcgggctggactccacgacagctctatacgttgccagagagcaaggatttgatgaattatatgctatcaccttcgagtacggacaaaaacacgataaagagataaaagcggcaaaagccgtggcaaaagcagccggggtaaaagaacacaaattcgtgaaaatcatgctgaaccaatgggacggttgttctctcacggacgagaaaatggacattcacgacggggatataaaccggactaccatcccggacacgtacgttcctgcccgaaacatggtatttctttccgtggcagcctcctacgctgacgcccttgacatcaccgacatctttatcggggtcagcgaagtggattattccgggtacgtggattgccgggaagaattcatccgctccatggaacaaactataaacttgggaaccgttctcggcgccgagaaaaaacaaaagatcacccttcacgcccctttcatgcacatgaccaaggccgacgaagtacgtctggggaatcgtttaggagttgattacagcctcacctggacttgttaccgcggcggcaaaaaaccctgcggtacttgcgatagctgccttctccgggcaaaagcatttgaagaggcgggaataaaggacccgttgtcttattgaaaatggagaattgaaaatgaaaaaaacgatttaatttatgatttatgaattacgatttacggtagaaaaagcgtggacttcgtgggggaaaatctaaaatcaagaaattagtaggatctaaaatttaataattgatcaatgttaatcagaaagttattcaaattcgaaggggcacacatcgtgcggaattgttcttcacaccgttgtcgggagaacattcatggacattcgtatatcgtggaagtatttatcacgtccgacaagctggaccggggatatatggtgatagacttcgtgctgctggataaagtgaaggaacttgtggatagtttcgaccatacctactcgctgtggcaggaagaatccgacgagttgaagacttttatctacaaatacaaccgtcgggtggctgaaatccccgtctccccttctgcagaaggatacgctttgttgttcctttacctgatcgacaaaatcctacaaaacacggagcataaaaacggggaaggaaacgtacggctctcttccgttcgggtacatgaaacagcaaccgggtacgccgaagctttccgggaagacctgcaactcgtgaacttcaacattcatgacatccgtttttccgaagctatccgggaagaatggaaagatgatcagtggtgggaaggaataagataagagataaaagataaaaactaaaagataaaaattaaaaagctcatgtatgttacatttggcgaaggacggtattttcccgatcacgaaagacaaggacggtaaattgctaaaggaactgcccgcctctggattacacgtgccgggaacgattcagggcgagggaaaattaaacggtataccttccttgtttatccggctagccgggtgtaatctccattgcacgtggaaaacactggccgggaatacttgcgaatgtgacacggcatacgccgcttttaaagttgagaattcattctccctgcccataagagaaatcgtgcaaattatcgatcacaaccggggaaacatagatcatatcgtgatcacgggtggtgaacccttcttgcaagcggataaagtcagggaattgtgtatgcaattaaaaaaagagccccattttcacatgaccgtcgaaaccaacgccacgatttatgtagaagagtgtgccgggatgatcgacttttttagtctttcacccaaattatccggctctgttcctcccgctccttacgcggaccaccacaacaatacccgtattaacatcccggccatacaatcatttatcacgcacgcacgcgaaaacaaaaaagactttcaactaaaattcgtttactccggggaaaacgacgtgatcgaaatccaagcacttttgaggcaactagatggatggacaaacgaagacatcttgttaatgcccatgggtgccacacccgaagaattaaacctctcgattcctaaaactttggaacattgcatccggaatggatggcgcttctgcgatcgactgcacatatctctttttggaaacaaacagggtgtataaataaaaaagctatattctacctcatttaagcgcatgaacacttgccccaaaatacacatcaaggaaacccgtaacagcaaagacgattcaactcggctttaagtcagctgtaactcaactatgcgcaatatccagggaagaatatcgatggtaaatctttctgattacttctaattatccatctccactctttctcctacatatgtgttgttatgtcttcgttatgccctcgttatctacccgctcctaggaacgaagagataacgaaaggataacgacaaaatatgaaaaggatgtaaactgaagagtggagatagacaaactctaatataaaagaaggaaagtcttatttgatgtaatcagcgtactcttgatcacccatcaaattctctaattgatctcttttcaaatgacatttgtatacccaaacttgattcgcttgcatatcgtaaggagtttcaatcattggatttattcccttcaccactccggcacacggtgcatgtaattcagtcctaccactagcaccttcaatttctgctaacaattcaccctttacaaaagtttcatctaccgccttggccggaatgataaaaccaacagctccccct

SEQ ID NO: 10877 - DNA, 800 bp, Unknown
  gut microbiota DNA sequence
cctgctgcgccacaccctcaccgaagtttcgggttgagaatgcggtatcgccctccggtatcatccaggcagccaagtccggaacaaggttcaggcatttcaatgccacgatacttgctgccataaggtagcctgccgagaaaaaggagttttgcaggtaagctgccattgtctgctcacttaccgtgattgccgtcaggttctctacctgtatgcaaagcacgatgtcgaaaagcaacagcacataaaacccgacgaagtagagcatcgcaccataaaaatgtactgtcagataccttgtcagccactttgcccaggctccttcccacttgggcaatagcgagaacgcccactgtatcggaccgaatatcgtcagcattccgagcaggatttgctggcagtaaattgttgcccaccaaccgattctaaaaacaattaaggctatgagcatcacgattttatctattcctaccatgattcccgatgtgagagaggtgaaccatagtttggctgcatctttctccatattggtcacttcgtccacacctgtctgttccatggtggcttctatcaggttggggtcggaagtgccactgtgcgccacatctgcctgtgcttgcagactggtgtacatcgtgtctctcgcaaaaatgagttgttgcacctcctggaatttatcctcaatatgtgtggcttctgcctgatacaggtcgtgcgtataagaaccgatgcagttcgggatataggacagaaagtccaacacacaccagttgctgccgctgtttaccatgcctgtgtct

SEQ ID NO: 10878 - DNA, 899 bp, Unknown
  gut microbiota DNA sequence
gtgtagaaatcgggataagtacacaatgccgcagtagacatgaaacctccaccggaatgcccgaaaatacccaccttggatttatcgataaaagaaaaacgatcagccaactgctcgataccgcatttatcatccgccaacgggtaatccctcaaattattatacccgaacgtgtgataccacttatcacgcatcggactacctccccggtgaccgaaagttaccaccacgaaaccgatttgtgccaacccgacattataagctgccgtcacggaaaactccaacggaatcgcctcagtttgcggtccgggataaacatacgaaataatcgggtaacgccgggttgaatcgaagtcaaaaggtttccacataaaaccgtacaaatccgtatgcccatcggcagccttcaccgtgaaaggctccggcatcttccacccggtctcgtaaagccgggtcagatcgggtgacgccagttccatgatcactttccccttgttatcccgcaacacgctccggggttccaaatccgcccgggaataattatccacgaaataacgtcccgacttcgaaaaataagcctcatgagtggcctgttcgggagtcagcacctccacttgaccattcccgtcaatccgggctttattcacccgggcatagtagggacacgctcccttctcctgcccgtaagccccgaaataaatggtacgtcccacggtatcaatcttaaccatcttcccggccgtccagttcccggaagtaatcgcgttcttcagatttccctcgccatcgtaatgatagaaatgcccgtgtcccgttctctccgaccaccagataatatctttcccttcgttcaacaaggaaagatggaagaaatcattattgaaataaggtttactaat

SEQ ID NO: 10879 - DNA, 30950 bp, Unknown
  gut microbiota DNA sequence
gaaaacaaggtaaacaactgcatgagtaatgtattaacagccagaattacatctccttgacgggctcctgttgaagtaaagaatgttgtcaccccaatcaagcaaagtgtccgaagaaatatatcccggttcacggtaaagaaacgtcgcatggcaattaattgaagacttcctttaaatgtaatccgcccccgcaattctttgtaattataaaaccacaaccaccaagccattatcacccctgaatattgtgcgacaaccgtccccaaggccactccttccaccttcattccaaacaaaaagacaaaacaggaactacacacaatattaatcacgttcatcacaatggcaatatacatcgggtaacgggaattctgcattccgataaaccacccagtaaaaccgtattgtgccaacaccgccggagctccccaaatacaaattctaaaataagtgaccgcatattgttccacctccgcactcgtgtccaatagccgaaaagccagtcgttctatcgggtattgcagaatcagcatggccaaggctgaaaacaaaccgacactcaccgcctgtacaagtacccgtatttcagcctccttatccttccgaccgtatgcctgtgaagtcagcccactggtacccattcgtaggaaaccgaaattccagtaaagaatattaaataacaatccacccaccgcaatggcacctatataagctgtcgcccctaaatgtcccacaatcgtcacatctaccaatcccaacaaaggaacggtaatattagacacgatagaaggaatagcaagatgaagtattctgcgattcattgcttgtacccgattgtattcctttctgatatcatactatccaacatggcaggtgtgaacatttcaacgtcctgtttcgtgaccgaatgtttcatatccacgtcatcattcgctttcttgttctgagccaagcgctgtacccgattccgcatcatcatctctgcaaccagtttgattaaccgggcactggcatgactacgttttttattcgcaacaatataagagataaattgttccatatgttgttgagccgttctcgtcatccgggtattatccgtggcaagatcacgtttcaatatttccattaactgatcagccgtataatcttcaaaaacaagaacattaatcatatcagaaaccttttcaacctcgtcattgataatctgacggggtgggtcctgtttcgcatatatcacgttataagctcccggttgcattgccaactgattcacaagaatcgcccttacccgatcccggaaaccggaaacttcattcagactactggaatcttcatcgaagaaaaatagtccaccttttgattgcaacaaagccataccgatactttgtatagcatcttcctcggtcaacccaagtaaacgttctactttaaaactcgtcacctcactcttgtctataattcccatggctttataaatacgagcaataatccgagcgaccgttccttttcccattccggagttcccggtaaagcaccattgtaatgatacacgggtattcagcttcgtcccttgttgattataatgacgagccaaatccacaaaatcatgaatctgttttttgagtttcgtctgtcccaccatgtgatccagatccttcaaagctgaagcaatctctttctcgtcgaaagtatctttataagaattgggtagctcagaagttgccgttggaatatccacggccatcaatgtcgtaatctcctttcgggtaagttcccgctccttcctaatcttcatggttcgagcagataggttgtgaatggctttatctaccatcttctcgacaaataaagcatttccaaagaatttatcatgctcgttatatacttgggataccaagtttttaaatgtctctttcgctttcggatgcagggtataattcttctctgcaaccttctgaatcgctatctccaataactcttccggcgtgtaatcggaaaaatggaaatgatacgggaaaagagacttcactctcggatttccggctaaagctttatccatcgcttccgggtctccgctcaatataacaatggtatctccattatcggtaggtgacaattgcccgaaaatgacactcaatgccgcagcccccacattatcttgaaacaaggtgtgagcatcttccaagaaaagaataccccctcttgcctgttcgaaaatatacatggcaatctgttgtggaggaatggaaccatctccgataatttctcccctgctcctgacagtcaccatagaactttccagaatcccagccgactcgaatatctccccaagcattcgggccacagtcgttttcccagtccctcggttcccggtgaacagcatatgcaaaggaggaatcacatctgcgtaaccatgcttttgtctttcccgaataaaatagatataattaatatagctaatcaagctgttttttaactctttagatccaatcatatcattcaatgcatcaacggatttactaggatccggttgttccagcgtttcgatgtctcccacctgaatcaacatcatatcttcctttgtatgtgtacccttgtgatttgccatcaaccgcttggccatccgtgtcgaggcatcatccagtcgctcttctataaacctgccattggaaaaaccggattccctcacggaacaacaatccttcaacatatcggaaaacttatcctctgcctccagggtaaacttaaattgtcgtttctccaacatttgatgagtaatttccatcaattcctctgccgaataatcatcaaatacaaattggtaagggaaacatttcttcacaccgggaattccttctgtaatagcctgcaatgctattacatcgcccgccatgacaaccaacaaagaaggttgttcctgctctaaaattcccaacaacacgctaaaaatacgcatggccggatcattcgggtcatttgtcgggtacaattcatctgcatcctcaatcaacagaatacctccgatacttttcgtgatagcatcccgaatcaactgttcttctgcggccactcccggacgggtaaaatcctctctcttataccgatgcactttaccgtttgacagtactcccaaacggtaaaacatctctcccgtgatctcggtaaccaaatgtttacctgttcccggattccccataaggatcatatttaaaatcggaagtttatcgttaaaaccgttctcttgtcgcattttcacgaattccgccaactcatacatccgggtaatttcctctttcaccttacgcaatcccaccaactgatacagacgggataaagcctcttccttatcttgttgagtcgagggtacaccttctacctcgtgtacctgtccgttaacttccgcgatttcgtctgtgaaatcatagggaaaatcctgttccccgatcgaaaactccaagtgtatcaccggttgatcaaaacacaatacatcaacccgatatttcccttcttcccaaaaattactcaatccagcccctaaatccaacgcaaaacaaagcaaacgcttcccttcccgatttggaatgtaatagttccctttaaccactcggtttgcttttagtataccgttagtatcaaatacgttaatcaaaaattcatacgtccattcactcgacaaaaagttctctgccaccagatagaaccgaacatcttccaatcctgtggctgaaaaagcctgatacgagtgaggacgctgcatatcaggagcctcctccacgcatttgtcaaacccaatatccaacaattgaaaataatcccgaaacaaatcatgcggttccaacaaatgaatttcatccgacaccccggcttgcccgtttatcatcacttgtacccggtagattccctcttgaaaccgaaagtttgtaaaatcctcagccgaaaaagtagttgaaaattgaaaaatgaaatccgtttcagggattgtaacctttccacctttttgtgctaccagcacaggttgatcctcatgcatatatatcaaagcagccacgatctccgcatcccagggtttctcatcaaactgcttgtttatcacttccgtgtccacgaataaagtttcgatctcgttcaatcgaaaaaccgtacgataatgcttgtttccggtaaaatcaatcaccttgctacaactcgtacgaatacttttgaatttgaaatttatatctgtaacagtctgattttttgacgcttttaattttttagccttctccaccataactcgtttgtttttacattcgtttttcaatcccccatcccatctcacttgcattcaaaattagttttattttttataaaagactacttttgcaacgtaattatttaaaatcaaaaagtatgctaaaacatattgtcatgtggaaactcaaggagttcgccgaaggaaaaacaaaagcagagaatgcgttaatcatgaaagagagtctggaaagactagtcggtatcgttccagaaatcatatcattacaagtcggaattaatgaaaaagaatccgatatggcatacgatgcggtcttaatctccacttttgccaatgctgaagcgctcgcccgttataaagttcatccggaacacgtgaaagtaagtaattactgcaaaaaaattcgagaaagccgggctttcgtcgatttcacggaataaaaaacgtgtcaaatatattgacacgtttcaagttaaagagcgaaaaacggggctcgaacccgcgaccccgaccttgggaaggtcgtgctctaccaactgagctactttcgcattaaaagcgagcgaaaaacgggactcgaacccgcgaccctaaccttggcaaggttatgctctaccaactgagctattttcgcatttactattctaatcaagaactctagcgtgggttattcccaactgcgatgcaaaagtaacaccttttttctaaaagcaaaaaaaatcagagaaatttttcctggctccaaacggaaatctttaaaaagaccatcccctcttgttttctgccatatatttcgtaatttcgacacgttaaattagtttacaaaccgagaagttgaaaattgaatatcatgtttcattttcaactctcaattttcaattatattatggcaataatcagagaattaaatggacacacgccgaaattcggcaagaattgttttttagctgaaaatgccgctgttattggcgacgtagagatgggtgacgattgtagtatatggtacggggctgttctgagaggtgatgtacattatattaaaataggcaacaaagtaaacattcaagataacgcaacaatacacgcaacctatcaaaaatctccgaccaatatcggtaataacgtttctatcgcccacaatgccgtggttcatggatgcacgattcatgacaatgtactgatcggtatgggtgctatcgttcttgacaatgcaatcatcgaaagcaattccatcgtggccgccggtagtgtagtgaccaaaggtactgttgttgaatccggttgggtatatgccggggctcccgctaaaaaattgaaacaaatgggtccggaactcttacgtgacgaagtggaaagaatagtgaattcctattccatgtatgctagctggtacaaataatttaaattctaaattttaaactctttaaaatgagcgttattgtttctccctcgctattatctgcagattttctgcatctatcaaaagatattgaaatggtcaatcgcagccaagccgactggtttcacttggatattatggatggcgtattcgtccctaacatatcttacggacttccggtagtttcccagataaagaaaatggccacgaaaccactggatgtacatttaatgatcgtgcaaccggaacgttacgtggaggcttttcataaagccggagcagatatcttaaccgtacattacgaagcgtgtactcatctgcatcgcacaatccagcaaataaaagcacagggcatgaaagccggggtttcactaaacccacataccccggtctctctattggaagatgttatcgaggatattgatgttgttttattaatgagtgtaaatccggggttcggaggacagtctttcattgaacagacaatcaataaagttgacaaactgaagaaactgatcatggaatccaactcccatactcttattgagattgacggcggggttaatttcgaaaccggaaaacgcttggtaaatgccggagccgatgcccttgtagcaggtagtttcgttttcaactctcccgatccggaagcaaacatcaaaggactaaaggaactataaatgggaaattgaaaagattcagtgattacaaaaacggaggccttgtgcggttggaatctaaaatctaaaatcattaaatctaaaattaataaggtggaagcaattataaaactggaaaacgccgtcatccggcaacaaaaaaacacgattctcaaagatgtatccctagagatcaaagaaggtgaattcgtttacctgatcggtaaagtcgggagcgggaagacgtctttgctcaaaacattatacgccgaacttccccttatttacggtaaaggagaagttgccggttaccagttgaacaagatcaagaaatcacaaattgcttacttacgacgcaaatgcgggatcgtgttccaggattttaaattactgacagaccggaatgtttatgcgaacttggaattcgtgctgaaagccacaggctggaaagataagaaagcaatcaaggaaaggataaacgaagtgttggataaagtcgaacttccagacaaacgagataaattcccacaccaattgtctggcggagaacaacaacgtatcgtacttgcccgagcattactaaatgcccctcctatcattctagctgacgagcctaccggaaacatcgacccggaaacttcctatcgattagttgaactactgaaagacatctgtgatagtggcaaaacagtcgttatcgccacccaccaatatgacctaataaaacattttccaggaaaagtattccgatgtgaaaacggtgttcttcaagaagatttttcgtttgcagagaaccaagctgccatgacaacaatcatctcagaaaattccgttattgatattgagagtcttaccgaggagatagaggaaacaacagttgtacatgaagttatttctttaaatgaagatccggaaatcctctctcccactgaaccgactttacaagagatgcaagaaattacacttgtaacagaggattctgaaattacagactccacaacaatattaatagaagaaaagatgacggaagaaccacaggatgcctccgaagaaaatatctcatccgaaaatgataaaacaaagaaaaaagatgataacggtcctgattttgtgggatttgaattgatatgatacttaaaaggtcggcattagccgaccttttatttaatcttcatctcgtattttagttttgcttggaaatcaacagccatgcatctgcaaactccggatattgttcacgaacttttaataattcctcacgagcggatgcctcttcatcaaatccagcaatacttacccgactcatccctgcactattcttcatgataatgctgtgataacccatcccgttcaattttgcttgtaatttcaaagcattgtccacgtttgaaaaactgccgacaatcacgttataacgtttcaacacgtccccatgagtcatagttacattctcttcccgagaaacgacaggttttgtattttcagttttctttgtgggattttgtgccgtggtttgcacgttttctttcactacaacagtctctgtctcctcttcctcaaaaggtggtgcgtaaacacgtttgttagtaccgcaactgacagtgataaatgccaataaaattacagatacaataattctcatttttcccaatttttaatgttatcaatcttatattaaaaaggcaaatttagtgataatacatgagaattggattggaataaaaaagattttttcttacatgaatgtaaaaagaggaaaacacagataaatctaacacaccttacccttctaggctattattaattgttataacaatataccaaaacaaacataatcctcctatcaaaaaacgaacgattaataatagtaaaaagtactgatttcgttatgataagaccaaatactaactagagcctctttcacactgagaataaaaaaattaataaaaacataatttcatgtgaaaataaccattaataacctatatttgtatgattattaatcgttggtttaaagatacggcatttacatggaaagtcaaataacaacaaatttctggggacaagacagcgataaagctttccgctatttatatgacaaatacgcatcaacattgcgctatttctcagctaaatatgtagatgatgatgcgaccattgaagatgtagtacaagatgcctttctcaatttgtgggaaaaaaggaacgaatttaaaacggaaagcacgataaaagcttatttatacaaaatcgtacgtagtttctctgtcgataccatccgtcgcagaaatattgcgaatcgatatgccgaaaaaattgttctcgaaaaagaagatcaagaattttttctggaaaacatcgttgaatccgaagtctttcaaatgatccaaacagtctttaacgaactctctccagcctgtcgtgaagtgtaccaactcagcctccacggaaaatcacacgaagagatctcccaattactggacatctccgtgaacaccgtaaaaaagcacaaaaacaatgcaaaccattacatgcgggaaagactgaaacacgtgctttctttcttgttatatatataattcaaccctctacatacctatttctttattcgatcttcattctttatttgttatcgaataaatctataagaccacatgtcttttcccaaatatattcatcgggacaaaaagtaaaacgacctattgctcgttttacagcttcaataatttcaacacgttgttgtgacgaaagtccattttctatatcgacagcgaaataggcaagtttctcaactatttcagccgattcagaataagcctgcacattataggcattctctgcaattcggagataatctaatgcgtcttggtaagtcatataaattattctatattctatattctatattctatatttcaaatacaaagctacaccatattcctaattaacacaatttttagggattgaaattatggactatttttaaattggtatatcatcattaccttggtgtatttcaacaaaatagaattattagataacaccaattcttccagaatttttaaatatgtactagactctctcagttaactataaattgcaaaataaactttgtcacttttatactttgagttgattatcccccaccacatccacgaaagacttttattagcatttaaaagtttcatctttacaattggagatctatttaccatatcatttttccaagtgacacgaacttcctcgattggttcatacccttctttactattggagataatacgttccaaagttttgtatttctattttcttaatctgctcgttaacatcagttttattaacaacttcctcttttacaaaccaatgaagactatcatatacaattactttaggtttatcaataggattccctccagaatcaaacacgccaatctttattgcaggttcaacatactgtggttgagcttgcgtcagcaaactggttccagataagagccctaacaaacacacgaattttattgctagatgtatcatttcttcatttattattttttacaacatactcaatttcctcgattcccggattagtctccaaaaccatcccatctggagaaatcaagtatagagtaggcaaaaattctaccttataatcatcggcagtatcacttccgtttatctcctgatcaacacgtaattgttcccacataggttgatcctcttccacggcttttaaccaatcctcctttttcttgtcacaggaaatagcaatcacttcaatccctaattcttgcagacgatcgtattcttttttcaactccttaatcttcatgcgacatggtttacaccaagaagcccaaaagtcaattaataaatgtttccccttgtaatccgacaattttacgtttttcccctttagattcggcaaagtaaaatccggggctttacccgttaattgtttttgttttgccgcctcatatttttccatgatctccttttttatttccgaatcaggcctatcacccatcacttttacagcccgtgtgaataatttaaaatcataactgattatccacatattatcctgtaccaacatggccgccacggaactaccactgaaatcagttaccatatccaatagcagattgttcccttgtttccataatcgttcattttctcgtcccaatgactctaaatcccctttgtcacttgtttcagctattcgtttttgtaaatcgaatctttccatcgagttcttctcgatcttttcgagatgagcgtttaaccgggattgcattccttcccgcccagtctcgaccaaatagttattacctatctttttcaactggtattctccgggttctgaataaaaataaactcttccaccatagtttcccatatttaaataaagcaaacgattctccgccttaccttttaacgtaaaagtacgatcctctcgtaccatactttttgcaagggtatcagcacctttcccttcccccgagagtaaataaacttcagtggctttactattttcgggcaggataccctgaagggtataacaatccgaaggtgtacatgctaggcacgccacacccaagacaatacaatctataattttcatgttgtaagaggtatatatttcaaaagagacgcttaaagcgtctcctttgaaaaacgattcattaaaaagaattaggaaaataatcgtaactaaccatggacatggacgggtctacataatgcatctttaccactttaccctctccttccaacacacgcaccggcttgccataaggctttcccccaagaatctcgtataaatacactttatattttccatccttatgggtagcaaataccaaataatcaaagtttttatctgcattatcagaacctgaccagtaacgattactaatataagtaatctcttctcccgtagtcatatccgtcggacgaagtaactcttccgtattctgtatcagatcatacatgtacaattgattatcgtttacaaaatacatcactttagctgttagctcattcactgcaaacagattcgccccgttcaatttagacgaagttgcaacttccgttaccttttcaatcgggtttgaaggatctattcctaacaccaactggtaaatataatgtttaccagcgatattcccatcttcaaacaaagcataccccgtactctttttatccatataattctttccaaagaatttcagatggtgagttataccattaggtttgttcggcttttcttcattattctcgtctaaatcattataagtatgcaagctaccattataatccaaaaacaaaaaacgtcctttcaattcgtctaaataataaaaacaagaacttgcgaacacgccattccggttgggctttgtttcttcgtcatcatttaccatagcggggaatccaaattttcccgttcctaacaaatcccaaagagatgcttgtgtggaaaagtaaactcccttatcagaagtatatccgactccatacgcatttcgccacacataatacggtttttcttcgggagcctcgccaccaagaaacatagtactatgagtatagattgtactcatatcctcaatattagaaatccggacatccttctccgtgcaaacagttaaagccttcgtgatcacgtggtcagctgtagtttcatcaacgaaacaatatccgggatctaaccctaagctaaccggcgcatcaggcatatgttccccatccattttcaagaaaatattatccactaaactgttatcagaagcatgtaaatccacgtctgttgaatttcccatatctttcaacaagtagaaaccttctgaaaatttagttaccacgctcaacgacatcacttgatacatttctagcttattgctcttattcgttacccgaaatgtcaaatcataaaacccttgtttaatatttaccggaaaatctaatacctgattagttccgatcgtatccagtactatttctattttattagaagtcgtacccgaccctttcgtcaggttcaacgtccatagatattcaaaatcactctcccctcccgttgccgtaacggttggctccagatgaagaacatcctgaaaagatgttttcgtgtaactcttttccaatccttcagtattaatcgtactgatttcatgataatcatagtttcccttgtcatcataacatgcagaaacaagtaatacgaacaaacaaactgataatatattgtatattttctttttcataacttgtcattattacatttcatatcgggtaaatctaactaatgcaccttccgtttcccctggttccggtacctctcgaaggggttcttcacctctggcaactctagcctcattttcagcagccaacttccgagtgaaaaaatagaaccaataatcagtcattcccatgtcaacgctattcggatcaccaaccaacgaatagaaaaagtcatcattcatcttgatgcctaaatctgctgtagcatcaatcataaactgatgtttcactttaccatattttcctgcgaaataatacgatgcataaaaattccaatatttcggttgcatcaatatatctgccacccgaatgattttcttctgatatttctcgtatccgggaataaagttttcattgtgaccgatctgaacacatagcgtcacctcttgttgttttaatgaaggatcacgttttaatattatcggaaaacgtaaggtatttttccctgcaggaatcttataataatcggcaacaagcggatcatcaaaagctatataatgctttcctgccacggcttgttctccctctcctttcttcacttgttccaacgcaaacgaacgctcatgatcttcaacataccccatcgtttcaacttccaaccaaacggtatcgaacacccgggtttcaacatcgtaaacaaatgtacgagggattactgtatcggccatcgtgtacggctcatatataaaattcaaacgattctccggtgaattatacacctccatctcatcttcacatgcgaataatccgaaaaccggcaataaccataaaatatatttattcatctttttcatagcttcctacttttaatttgcggttaattctgtacttggtaatggcacgacatagtcttgttcgccaacttcccgatctgttttccataacatattctttattcccaaacgcttataagtataaaacatttgtccttcaccaaagaattctctacgatattcccggataatctcggtcatcaactgttcttgctgtaaaggagacgcatccacgtttctcgctttcatgtaaggaatataaagggcattagcctcattctgcgtgggagcagattcaatagcaatcaagtacatttcagacaaacgaatcaatgggatcacctgtttctgcgtggccaatacttccatatccatgttcgtggttgaggacggttgattgtatttttttagtaaaggttttacattcccttgattatccggagtacgatcccatacttgaactcggttatttacagctgtcgattgtccggcaaacaaatcgttattaaactgtttctctgtaagatatattttggtagaagtattatctgacttaaacaaatctctgatattatcctcgatctcgtaattacttaaagccaaaatacattctgaaggtaaagcaaaattactactattaatatcacctgctcccgccaattccaaaacttttttaccattcttatcgacggcatcaataatttcccttgctgcagtgtatgcctctgttttctttcccatatacatatataatcttgctcgaatagcttttacagcataataattaaaacgaaaacgcctaaatcccataaactcatccgccaattcaacatcataatttttcgtatcaaagaaattatccaattcttggaaagaataactaaataacggatcatgatctttaaatagggtttcggctgcatctaaatcagtaagaattaaattcgtgaaatcgttaaatgaataatacgggatcatcacggttgatatggtcttggcatacggtaaagacacctgctgactagcattttgcggcatttgtccaaacaaacgtaaaatttccatgtgacaaaatgcccgaatcgttaatgcctctgcctctacaattgcccgcatatcctcgttcgtgatcacctccttatgctcgggcatattctgtagtataatattggcttgggcaattgtattatacatctccccgtaaattgcggatattaatgtcttcggataatcgttttcatatttgaaagccttgagatcctctgccccccgataattactcttctggtaactccaatgttgagccataaattcaatatctgtaatcgtcaaacttagcccatataaatttggggaattcaatttaatatagcaggcagtcaaggcatttttaaatccagaaaccgtctcgaacatatctttttcatcggtttgagtctccggctttacatccagccaatcattacaagaggctagcgataaagttgcgaataacgtgatatatagtaaaacttttttcataataccattattaaaacattaatgaaagggttaaagccagtctgcgagcaaacggataagaagttcctctctcacgcttgatggaagaaatatagaatatatccgacatattagccccgatactgattgtctcaactttccacttgtcacgcaagaaatctgaatgtaaccgatactccacactggcgctttggaattggaacacgttatcatccatcacgaaacgggaagtcgcttttgtctccacggaaccgtatcccttgtaaggtttcacgtctccaatatactgccatctctttttcaacacacgactatcaacattattcttatcaatttcaccattggtcacttccaccttgttaagcaaggtctcgttatattgttggcctccccattgataagcaaatgacagattcacggaaagatctctccaagcaaaataagtactgatattacccctgtatttgggttcatcaacgccaaaataacgcttgtcggatggattccatttatccgtgatattcccattcttatccaagaaaatttcatatccagtactcggatcaattcccatggaaggaacagcccaaattgaattctgtgcatacccttcatacaataactgattaatctctacatcttttgatttgtaaagctcattctgccgtttgatcgcttctgagagcttggtaatttcattcttcgtgtaagctaattttgctgtcatcgaccaaatgatattccggtgcgtatcacgcattaaatacccgctaatcatggcctcgtagcccgtatttttcacctctcccacgttatccacgtaagaactgaatccgttcgccaaaggcaaatccatttgagacaacaaattagaagtctttttactataaatatcgaaagatgccgacaagcgtccgtcgaaaagtccaacttcaacaccaccatttaattgcttggtaacctgccatttcaacttttcatttcctaatcccatcaactcagccccgttccaaataatgtaacgttttcccgtgtaactctggaaggttgacaacgcctgataggaagcaaactgttgagatccggtttctccgtacgatcctctaatccgaagattattcacgatattctgactctgcatgaacttctcgttatgcacgttccacccgataccggcactccagaacggggcaaatttattttttgtcccgaacaacgatgaaccatccacacggaaagataaatccatgaaataacgattgttataaatgtaattgacattcccggtaaaaccaacccgacgagacaattcttccgtacctttcggtaccccatttttctcatactgcaaagcattaccaatgaaatccaatttaccatcaggaaatccttccacgataaacgtgtagaagtgattttttttctgggctatagaataatcgaatccggcatatagctggtgtttttcatgaaatatctttgaataactcaacgtcacgtttgcatcaatattaatatcctcacccgttccgtaagtatactttcctttgcgaaaataactatcactatctgtagcagtcgcaaaagtcgtgtgatcggcaggtaaataattatcagaagtactatttttcttttgtaagcctaattgagctcgtaaacgcaaatcatgattaatgctccattcaatagaaaaattattcgtgatcaaggtatatttatcctcgtcgattacccccaactgggcgttataaagcgggttatactgttttgtcccttttatcgtgtacaccttgatatattctccattctcatcttttatccggtaatacggattcattttggcataatcagagaatgttccatatttactttcttttcctttatttatatcaatactagtctgattcttaaagagcacattcttcacggaatatgacaaagttaccgtaccactgaaagtatttctctcggatcccttcatcgctcctataacagaattataagaaatatttgttccccaacgaaaagactcatttccaccctctagacgcaaattatatttctgaccaataccggtctgtactggttggctcaaccaatgcgtgttcacacctttcaatacctctgaatataattgaccatatttctcctttaacgcccgatcgttaacgacatcatcttcatcatcatagagtccgacaatccgctccaattctagcttgtcacgggcattcaataaatcgtatgaagaaaggtcaggcatttcaatattcattcctccttgcacgtaaattttcaatttaccggcttgaggagccttcgtggtaacaacaataacaccatttgcaccccgagaaccataaattgccgtggcagaagcatctttcagtatgttgatactttcaatctcctcgtcattaaaatccattaacttctgcaaagtaatctcgaatccatccatgattactaacggagcattcaattgtttggatgcttgttgatttaattcattcacgctcatgggtaaagaggaattaccccggatattaatctctggtatcacgttcgggttacttcccaaagcattgtccatcacgacattgattgaagggtcgatgttacgcaacgtggctaacagattttgacctttgtacatcttcaactctttggcagaaacggccgtaacagcccccgtgtaactttccttggatttcgtgaaaataccagttacaaccacgtcgtccaatgtttccgaatcttcgactaacttcacgtctagttgcgtcttcgaaccgacggcaatttcttgagtcttcatcccgacgaaagagaagatcaagacttgctcactatcaccgggtatttccaatttatactctccgtcagcaccagttgccgttcccaaggtcgtacctttaatgataaccgtaactcccggcaacacgtttccttgctcatccgaaaccttacctgtaattgttttcgattttttttcttcttggcttacagcctttttacgaataatgatcgtcttaccatttatctcgtaaccgagattagtccctttaagacaatccgttaaaatttgcccaaccgttgcatccttgaaagcgacatcctgccgggcaaatgattccagattcacgtcacgataaacgaaatcataatcagaattcttacggatctcactgataatctctttcaaagaggcatttttcagcgaaaacgtaatttttctttcctgcgaatacgcattcagactaatttgggtggtgaaaattaagaaaaggaggaataaaaaccgcctcttcccgacgacattagaatttttcttcataactttgttttttgaattcaacaattcctcacgccccgagtcaacagggtgtgaaatgtaaaaagtagtgttagcagcgctactttttatcttacaataaccgtattatcttttacttcaaattgtacttccccagttttaccaatcaattctaatacttggataaactcttcgtgttttttcatattcaaagaaaattggtatgaacgcaattcatcccgactgtaaaatacatcaatgttataccaccgccccaagtcggtcagaattttctccaatgggcaattatcatacaccaaacgtccgtctgcccatgccaaatataaatcaacatccacgtcccgaacttccatccccatcgttaatttattaaacaacacttgtttattcggaacaagtttcacacttttaccttccacccttaccgttacttgcccactttccaatgtggtttgtatatccttttcgtctttatatgcccgaacaccgaaagtagttccggtaaccagcacttccaattctccggctgtcacgacaaaaggatgttccgtatttttcgccactttgaaataggcttcaccggttaaatacaccttacgctccttaccctgaaatttcacgggaaagcttaacgttgattctgaatttaaatagatcatcgtaccatctgatagcgtaagtaaatattctccaccccgtggaatctccagcgtgtgaaaaacttccgtagtgtcaggagaatcaatatctctgtattttaaagatctggtgctaatcaataataaactgtcactctgggccagatcagaacgtaacacctcgttttccagatcaactttacgcccatcgggtaaaatcaaaacagcccgggaaccgggaagttgcacctcatacttggctaccggaagtatttcggcttgttttttatccccgaaaaaataaaaaacacctcccacgcttaatattaacacaatagcagctgcatacgggaaccattttatcttccgaacagatcgaccggatcgtgctttctgttggagttgccgccatcctctctccttctcttcttccgttttcacgaaacgggaaatacttttttccacgtattcgcttgacaacattcgttgaaaaagttcttcatgcctcggggaaaccgatctccattcgttcagttctttctcctgcgcattgtccgtcattccctgtatatgcaggaaaatcaaccgggctatatgttcttctttgcttaacatcttttttggcttttatactaaagcgatttggggtgcgtttggtgtaataaaaaaatcacttttttctcacttttttattatcatctctgtatttgcaagttagcgtcttcgttttctggcaatagatgtcgaacagatacaagagcatctatttagaaatcattgatttataataaagatatttataacggtccaaaagatacaatcaacggggttacaagttaaaatataatccatattttcgcgagagagaattcaaatgatcaaaacacaataaaatgagaaaactattatttttattcatgctgatctgtaccatgcagttacacgggcagacagtcagggaatggatgggattacctcccgtcccggtagagtttccggctttcggggacatgaaaaacgtggaaaacaaaacattttcccaagcagatttattaactctttccacgtttaatatcgagaacttaacccctgccgtgggcgaacaagaactacaatatcactctctaacttgggaaactgcaaccgtgaatgataacattgttatctctcaaaataaaagtgccgttccggcaattggattgtatgccgtttacgcggaaaacacgcaatggatgagcggaaaactgcaattttcattttacgggaatgccgaagtttacgtggatggagtgaaaaaaatcacttatacaagccataagggaaccgaagccgtaaaccaagaatgtaccctgcaatgggttccgggaaaacattccatcatcgtgaaaagcttgcaaacgaaagaaagcgacaaactattttcagctcaatttattgcagatcccgaattcaaggataccccggtggattttaccttatcccccaaacgcgggaaaaatatactggacgtgctgaacggtcccagaatcggaggaattcaagtttctcccagcggaaaatacctgatcatggcagaaggtgagattataaaaggtaaaagcagttccatgacgaacgtgtacagaattgccgacaaagagatcgtgtacacgttctacggcaacaatgtcagtaacttgacttggatacccggagaagacaagttatcttacctgataaaagaaggaacgggaaactccctatacacctacgacattgagcaacaaaaattggaacacctgtttcgggacgatcagacgatcagttccttctcatggtcaccggaccggagttatcttatctattacaaaaatgaaaattacaccccgaaagaatgggaactccgcaaactcgacgggatcgaagatcgacaagcttattatcgcaatcggtatttcctatgcaaatatgatttggcaacgggcatacatacccgcttaacttggggtaaccaaacgacttccatcatggacatcagtcatgatggtaaccaaattctgatcagtaccggacgaccggactataacgaatacccgtaccggaaacaatctgtctatctgttgaatgcccgcacgaaccaaattgacacgctttggaaaggccgtctggttgacattcaatgtgtcttttctcccgatgattcaaaattattaattgccggagctgctgacgctttcggacaaatcggggtaaagattgctaaaggacagatcgtgaacggatacgacacgcagctatacatttatgacttaaattccaaagaagtaactccgattacaaaagatttcaatcccgctgtctccaactacatctggcataccgacgggaatatctatatcgtggccggggataccgattacgtttacttattccggtatgggaaagacgggaaaatcacgagaatagaatgtccgggtgatctcgtacaaaagatcagtttggctcaaaacgggaataccgggatctacactgcctcagacgagagttacccgacgcgggtctataccttggacttagcaaccctcaatgctcaggaatgggccgatccgcaaggtgaacaatacaaaaatatagaattcggacaagtaaaagactgggactacaattacaagaaaggaaccacgatagacggacgctattatcttccggcaaatttcgatcccaagaaaaaatacccgatgatcgtgtattactacgggggaacaaccccggtagaaaggactttcggaggaagatggccattcaatctatatgctgcgaatggatatgttgtatacgtgatgcaaccctctggtgcgaccggattcggacaagaattttcagcccgtcatcaaaacaactggggtaaaatcacggcagacgaaatcattgcctgcacgaaagcattcttgaaagcacatcctttcgtggatgcacaacgtgtcggatgcatgggagcctcttacggtggattcacaaccatgtacctgcaaacccgcacggacatcttcgcttgtgccatttcacatgccggaatttcctccatttccagttactggggtgaaggctactggggatatagttacagcacgaacgcatcggctcatgctttcccgtggaatcgaaaggacatctacgtggatcaaagcccgctattcaacgcggacaaggtaaaaacccccatgcttttgttgcacggtacggccgatgtcaacgtacccacaggtgaaagtatccagttctacaccgcactgaaactcttgggcaaagacgtggaactcgtactgatcaagaatgctgatcatgccgtcgtggattacaaccaacgaatcatctggggcaacaccatcatggcttattttgccaaatacctgaaaggtgaacccgcctggtgggaaaatatgtacaaagacaaaaacttataaatagtttagagtttaaagtttagagtttaaggtggaatatagtattcactttaaactctaaactttaactctaaattctaaacttaaaaaaatggctcaggaaattgaacgcaaattcttagtgaaagggaatttcaagccggaagtatttaaatctacccgtatcatgcaggggtatctctcttccgtgccggaacgtaccgttcgggtacgaatcaatggagaacagggattcatcacgatcaagggaaaaggaaatcattccggcattaggcgttacgaatgggaaaaagaaatacctttaaacgaggcggaagagttattacaactctgcgaacccggtattatcaacaaaacccgttatcttgtaaaagccggggaacacaccttcgaagtggatgaatttcacggggaaaatgaaggtctgatcatggcagaaatcgaattaaagacagaaaacgagaatttcataaaacctgcatggcttgataaagaagtgaccggggatgaccggtattataacgccatgttgacaaaacacccttacacgaggtggtaaagtttttagatactttgatttcccgacagaaaagcatacctttgccgaaaatttaaaattttcatcaaaaaatataggcatggagaagatccttaatcgagcagcggataacatccgcatcctttcagcttctatggttgaaaaagcaaaatcaggtcatccaggaggtgcaatgggtggcgctgattacattaacgtgttgtattctcaattcttgaacttcgatccggatgatatgacatgggcaaaccgggaccgtttcttccttgacccgggacatatgtctccgatgttgtattctatgttgagcctgatcggcacgtatagcatggaagacctgaaaaacttccgtcaatggggaagtgtaaccccgggacacccggaagtggattttaaacgaggcgtggaaaacacctccggccctctcggtcaaggtcatgccatggcagtcggagccgctattgcagagcgttttctggtagctcgtttcggagaatggatggctcacaaaacgtacgcttttatctctgacggtggtatacaggaagagatttcacaaggagccggacgtattgcgggaacactgggattatccaacctgatcatgttttatgatgcaaacgaagtacagctatccacccgcgtgaatgaagtaacctgcgaggatactgctgccaaatatcaggcttgggggtggaacgtgatcacgatcaacgggaataacgctgacgagatcatcaaagcattacaagctgccaatgctgaaaaagaacgtccgactttgattatcggtaaaactttgatgggtaaaggagccatgggggctaacggggaagatttctccgacaaggtttccactcacggacaacctttaaccggagccggggcttctatcgaaaagacgatcgaaaacttgggtggagatccgcagaacccgttcacgatcttcccggaagtagccgagttctatgctaaagtccttgatgaaaaacgggcttacgccaaagctaaaaaagcagagcaggcagcttgggaaaaagcaaacccggaattagcagccaaactgcacaaattcttatccggtaaagctcctgaaattgactataaagcaatccaacataaagcaaacattgccacacgtgccgcttcggctgacgtgttagtagccttagctcaacaggtagagaacatgatcgtttcttctgccgacttgagtaattctgacaagaccgacggatttatcaaaggtggagcccgtaaccttgtgaaaggggatttcagcggggcattcttccaagccggagttgcagagttgactatggctgtaatctgtaacggtatcgctcttcacgggggtatcttcgtggcttgtggaactttcttcgtgttctctgactacatgaaacctgccgtacgtttggcagccttgatggaagttcccgtgaaatacgtttggtctcatgacgccttccgcgtgggagaagacggaccgactcaccaaccgatcgagcatgaagctcaattacgtttgatggaaaaattagagaatcattctggaaaaatgagcttgttagccctgcgtccggctgatgctgccgaaacttccgttgcttggaaaatggccatggaaaatacctccactcctaccgctttaatcctgtccagacaaaacatcacggatcttccgggaacagatcgttatgacgaagctttacaagctgcaaaaggtgcttacgtggtatgcaaaaccggagagaacccagatgtagtgctagttgcttccggctctgaagtctctactctagtagaaggtgctaaacttcttcaagaacggaaaggcatcacctcacagatcgtatccgtgatctctgaaggtttattccgtcaccaagcacaagcatatcaagaacaagttatcccggccaacaaaccgaaatatggactgacagcaggtttatccgttaccttagaaggtttggtgggatgtaatggtcgtattcacggtgtaaaccacttcggttactccgctcctgccaaagtattggacgagaaattcggattcaccggagaatgtgtattcaacgaagtatgtgaaatgctaggaaagtaattttctaatacgctaaatatcaaacgggagtaacgattgttgctcccgtttttctttcctttcataccaactaattttatttattctaaaaaaagaaggaaatacttgcatacacaacaaatatacactatctttgcaaacgcaaaacagaagatgttttgactgatattgcgggatggagcagttggtagctcgttgggctcataacccaaaggtcgtctgttcgagtcaggctcccgctacaaaaaggatcgagaaatcgatccttttctttttccactaaattgcaggaatcttacaaaatttatttacttttacagtattatcaaataaaacttatcttgtatttcaataaaaggtgtatgatgaaattaaaatcgtttttaaagaaacctcttttccttctgtatctcttatggatcgctacggcatgtaatgataaaaatgatcctaacatgatatgggatatttaccccactataatttatatctcggtagaagatacccaaggaaatagtttactagatccgaaagtcgagggaaatattctagaaaacgggataaaaattatctaccagggaaaaacttacgaaaaagattcactatatgatggattaagcagagcttatttggctcgtttttatggaataaaaacagactcattggttagtggattacatgtattatctatcggcgaatttgctggggataaaaattacaaaaatgaagaaattaccatagattggaatgacggaagtaaagacataattgcttttgattcagaattatcttggaaaaacaagaaaccttcagtaaaacgaaccttatatttaaacggaaagaaaacagagaataatcccattcttatcgtaaaataaatacacgaaaaattgcacatggtccacttaccactcaaggcaattgtttccattttggaaataactgagaggttctcctaaaattccaataatgtaaattcatgaatgatagaagttgtgaatctttaatcattcatgaatttttagtttatattcctaatgacttaaacattttagcgatacaacgttttttctgttccatattaggatgaacatacaagttcaaagttgtagtaatattggaatgtcctaacaatacactaaccgtcttatagtcacaattactttcaatgcaacgtgtagcaaaactatgacgtaatccgtgatatttgagtttaggaatttccagtttatccattaattgtttataataatttcgataagtacgtggctctgttggtttctcttcattagttaaaacataatattcattattcacaactttctttaaaggtttcactattgcaagcaattctttagttataggtatttctctataagaatttttggttttaggcgtgttgataactagttccgtatgtttctcttccccttctacaatataaatacgttcaatagttctgctcacggtgacaatagcattatccgtatcaatatcactccatttcaatgcacagatttcaccaatacgaagtccagtgctaagactaatataaacaccaagattacggcaagtaaaatttttccggatataattcaatatttttctatgattagtaattgtcaacacttctaatgactttatactttctgttgtcggatattttatatcccactcacaatagctcatccattcgtgttttacaccaaacttcatcatcatttttaggactatcaaaatgtcttttacagatttaatacttaaaccgctattgagtttttgcaaaacaaaatcctgtacataattttctttcaaaacataatactcaccaaaatatggtaagatatggttttctagaatcaacatataagcagcaaaagttgatcgttttacataaggtcgcttatcctctttccaagcagacgcaatttctctaattgtttttttctccataataatatattcaaataaaccataaattagagaaaaataatcatagatgttccagatttgcgatttccggagtttagtggggagtgggtggaaactgagttgcaagatattgttccaaatatatgttcgggtaaagacagaatttccaacagcggtgaggtcgctctctatggttctactggagttattggtaggacaaattctgcttcatataaagagaatattgttctcgtagcacgtgttggtgcaaatgcaggtcaaatgcaaattggtaatgctccttgtggtgttacggacaatacacttgtaattgatgcaaaagaatggaactactacatttattacttcttgcagcattataatctgaacagattagtatttggctctggtcaaccactaataacaggtggcatgctgaaaagaattaaagtaaggtatggctgtaaagcagagcgcaataacattactcgcttattatgcctaatagatgagcgcatagctacccaaaacaaaatcattgagaaactggaatccttaatcaagggaattgcagacaaattattccaaacagcaagagaaactaaactgttattagaattagcaccaaatataacatcaggtactgataaaaacggaagtgggacgattcctctttatggttcaactggaattataggcaaggttaaaaatgcaagtcaaaaagggaacatagtattagttgcaagagttggaacaataggtactgtgcaatatgttaaagagtcatgtggtgtaagtgataatgccttaattgtagaggcaggagaaatgacaaaatatatttatcattttcttaaaacgtataaatttgcacatattacatcaggaacgacacaacctttgattacagcgagttccttgaaaaaaattgctgttcctacatatgatattgaaagacagactcaaatagtcctctgcctaaatattttggaaaggaaacttgatattgaaaaacaatatttatcggacattgcaatgatgaagcaatacttgcttcaccagatgtttatataatcatctgacggagaaggaatagccacattgacgatcagtattttatcttgaaatagtccaattgttgtttataactgtcttgtgcagtcaggcaggtgtcacgcagatagccgtttgtagtaccccaattctgaatgccgcgatagtagaatagacgtagctcttcggtaatgacgaatggcacatgaccactttgcagacattgccagaacaacaataagcgaccaacacggccgttgccgtcttggaaaggatggatgcgttcaaatagaacatgaaagttcagaatatcgtcaaacgtcacctttttgatggcattgtattcggcagtcaaggctttcatacgtttgtggacatctctgggcagcaccgtttcttctccacccacctcattggggagtcgtttgtagtcgcctacagcaaaccaagacttttgactgtcggaagtgttggtcttgagtatagcgtgcagttgcttgatgtgtgcttccgttatcttgtctgttgcatgatcaatgacgtagtcgatgcaacggaaatgattgacggtctccatgatgtcatccaccgatgtgttctctgttgtaatagcaagagtgttggtctcgaagataaaacgtgtctgttccttagtcagacggctaccctcaatgtgatttgaattataagtaaggtcaatctgagtacgatggtaaatacctcctctcaatcctgatcccttttcttcgcgcaaacgattcagcagaggagaaataattcctccacctttcttgggaaactcagcatcagcaggtatgttccatgtcttgcccgtccggaaagcaccgtcaatctttccttctgcacagtaattacgagcggtacgctcactgatgccgtatttctcggcatactgaacaactgatatatattccataattcacaagaatagtctttatcggcaagttttatttcaaactcatgtgcaaatatagctatttctgccgttatcggcaagaatagcgacataaatcatgtactttgattccttttttgccgataatgagctaaacttatatgaacaactgacgaagaaggtattgtttctctatattgagtttttcaaatacctgcttttcaatatcaagcttcatatttattgctcgcaccctttcagagattctgtcttgcataattctatttggcataggaaaacatatagccatgaacgcattaacatccaaatttctgcgtacaacacttgcaccttgttctgatgcgttagcatattcatacaatgctttgggtgtcttcaaaaaacaagacacatagtatggattatagccttcccttattgagaaaactttgtatgacggagagacaatacctattttaaatgcatcgttatagttgatattaccaagccaaaggttttgaggggatagaacaatatctcccaatcgaagaactttgtaaccaacattatttgcactggcaacctctttgtcaaagtaatcagattgccgatacaatccttttgctgtcgaacttaatacttggtattgattatttgttgttgtgcgttcgtttcgctcgataaaaatctctgataatgagaccagtctataatctttccatagtatagaactgtaaattcccttgattaaggactatgcgtcagtaatggacgcaattagcggtttaattttcaactcaatgaaaaacgaaaaaacaatcttgttaggcaatgtcgcgtgtatatcaaatggatccggagatgttcaagattctgattctattaagcgagatgggtggtatccattttttgatcgttcagaagagcagaaatggttccctacttattcattcaacagggaagctattatctatgctggagaggggcaaaacttttttccacgatattataagggcaaatttgcattgcatcaaagatgctatgctattactgacttttgtgagtgtttattgccaaagtactgcttgtattttatgaacacattgaattcctatttcattagaaatgccgtcggatcaacagtcccttcattacgaatggatatgtttcaaaaagccaaaatcaaaatacctacgattgagcggcaacaagaaatagtatctacccttgatgctttaagtttgaagtgtgaaaatgaagaaatagtaagggcattatataatacgcagaaatcctaccttctccaacaattgtttatataaacatctgctggagaaggaaagtgcgctgttttacataacaatcaagtattgtctgctcggaagacattttatgaataatagtcttgataacttttgctatcgctctttgttcctcaatgttgggaatacgatgaatggtgttaaaatagtcaataacagaaatattaagcaatccatgatttcttgctccttctacagatatgtccataatctcacgatgccatttctttgattcaaaataatacgcaagataatccgaatccactttagatgggtcaggtctaaagcagatatataaaggagacaatacaccttcttcgtatctatctaatcgtttgactgctccacaagtatattccgaagaataacttttattgtatgcgaagtctcctttctgcaatagataatatccttccaagttttcactcgctacagatttgttgaaaaattcaagttggctaactaatccatattgggctgctattgttagaaccgagtagcatctgccatttgtgttctttcgggttactcttgaacatatatcattcagatgaactttttgccaatctgtatagaagccttttatacgttttcttggtgcagattgtttggggctacaaaacattgcatcactaattgcgtcccttagtaatttcaaagcctcaatgattttgttttgggtagctatgcgctcatctattaggcataataagcgagtaatgttattgcgctc

SEQ ID NO: 10880 - DNA, 364 bp, Unknown
  gut microbiota DNA sequence
gggataagaagcaggttatggaggaactcaaacaaatctgctctcctgaccaatgggacattaccccggaaaaggcattcggtgtatttaaggagttcatacaaaggtggcaaaagagttacccgccgctaaagagataccagcacgacaggtacaggttttattttacatacttcaaatatgaaagggaaatcaggggaatgatttataccacgaactggatcgaaagactgaacagggattataagagggttattaacatgagaggggccatgccgaatccacaggccgtcattctactgatggggaccgtggctcaaaacgcggatatttataaataccctatttataattttttagaatc

SEQ ID NO: 10881 - DNA, 628 bp, Unknown
  gut microbiota DNA sequence
aaatgacgaaagacaagaatagatgtgccaatcagatattggcggatatggaactcttcgacttcctcaaagagaaagtcggagaaagaaagacgaagaccggtgcctaccacgacctgttggaaaagtgtgtggcaggattcgtagtccctttcctcaagaatcacgaatacgtgttgcaggctgaccaatgccatgtgaccatttccgaccttgcatcggaatggcattggcacagggctaccgtcaggacattcctcgacaagttggaggatatggggcatatatatcgtacacgctttgccaagagtgtggtcattacaatggtgttcaacaaaaccggcattggcaattctactaccacttataatggtcaagcggagattcgacctgccgatgagtttgatgccgctctatccaaatggataaccggcaatttgacagactcacagatgggtgatatatgtgaacaatactacgtaagtcggttgaaagagattgccgacaattctcctgttggtggctctggaagccaaacgtcttcaaaggacaaatcagcagatgaacttacccggacattggttcagcgcatagccgttgccggactgaagcgaaccatacgaaactc

SEQ ID NO: 10882 - DNA, 789 bp, Unknown
  gut microbiota DNA sequence
gccactcctaatatttttgaggcttgatttaacaagatcaagtaaacttcctcatgatgttccattctatcccctaaaatctcttttgccagtagatagacaccatcaggatcatttacctttatcctgtcttttgatttgatgctagttttataaatcaattctacatagtgtggttttaataaatctttgcttgttgtttccatgttcagctatttttaatctgttaccaagacatggatatggatgaatgttttttacttgaatacaagttattcttgtttgaagtgttgggacaggtcactgttcctgcccctttttacacattcaatcttggtaatttgtgttcacagcaaatttttcattgcagcctttaattgagtgttttcaaagctatccaagtaaatttgagtgaccctctcagaactatgtcccaatgcatcacatattaatgatgtactaacacctgccctttttagagtggtggcataggagtgtctagccacataggtggttaatttcttgtccaattcaagttcatccccaagtgtttttaaacaagcatttacttttccaatcaccttgtgaatcctgttcaatttctgctgttcagttttatgaaaactggataaaatgggaaatatatatggattgtcagatttatacttgttcatgatctccatagcttttggatggattggaaggtgtataagttttcttgttttcttcctcctgtacactagctgttcatccatgatattttcccctgttaatctggccatgtctgtg

SEQ ID NO: 10883 - DNA, 832 bp, Unknown
  gut microbiota DNA sequence
ctccatgatattttcccctgttaatctggccatgtcagtaaaattaatcccacccattagatatgagaatgtgaatagatcaatagccagctggttatatgaagagtttgaaacaggctccttgtggttcatgacctttatcacattatctttaacaatggctctttttggggtgttttcatgtagttttgataccttgtaatccttgaatggatagaattcagctttaacatacccttccttgatagcaatgttataaacagtccttagtgtgcgaaacctgatgccaatagtgttgtatgccagattttgacctttaagccatgtttcatattttcttagccattgcacatcaatttctgaaaaatatatatccagatgcttgttgaactcaatcaaggaattgtacacttgtacatgtgatagggcatacccaatcctgttctccctcttcaactgttcaatttgctgtaaaaatagttccccaacagttttacatgaatgtgtatttttaattttctccaccagagtttttgcagtgaactctcttttttccactttcaagtcaatgatcttgtctgtgtactctttcatcttttcaatgataagcctttgtatagcctccctgtttgggcaatttctttttggttcatttttcttaaaatcccaaaaattagggttaatatttactcctaaactaacatattttgtctgcctgttttggataattctaagcattaatggatgatttccattctttaatgtttttgatgtgtaataaatgattgatattgagggattcatgcttaatttctggtttaaacatggttta

SEQ ID NO: 10884 - DNA, 73763 bp, Unknown
  gut microbiota DNA sequence
cttgatagcaatgttataaacagtccttagtgtgcgaaacctgataccaatagtgttgtatgccagattttgacctttaagccatgtttcatattttcttagccattgcacatcaatatcagagaaatatatatccagatgcttgttgaactcaatcaaggagttgtacacttgtgtatgtgatagggcatatccaatcctgttctccctcttcaactgttcaatttgttgtaaaaagatctctccaacagttttacatgaatgtgtatttttaattttctccaccagggtttttgctgtgaactctcttttttccactttcaagtcaatgatcttgtctgtgtactctttcatcttttcaatgataagcctttgtatagcctccctgtttgggcaattcctttttggttcattttttttatatcccaaaatttaggattgatatttactcctaaactgacatattttgtctgcctgttttgaataattctaagcattaatggatgatttccattcttcaatgtttttgatgtgtaataaatgattgatattgagggattcatgcttaatttctggtttaaacatggtttaaacatcaagctaaaaacacctaaaaatgaccataaaacaaaagagagtcacttttgtaactctctcattttcagtggtaccaattggaatcgaaccaatgacacaaggattttcagtcctttgctctaccaactgagctatggtaccatcgctgaattgcgagtgcaaatatagaggttttatttcaatctgcaagagctgaggcaaagaatctcgaaaaatattatttcccgctttgtcgaagacggatgcagaggtatatcatccataccatgatgaccatggatgcatagggaactgccggaacgaacaagaaccatagtaaaaagccaatgatcaagagatagaggtagataaacagatatttgttgataatccacggaagagagcgtttcccgaggaagaaggcggtgacgagatttaacgggttcgcccagaaggtattaaagttggggaacattgtgggatgtttcgtgaagaaacacaaaaagacgatgaggcacccgacaacacctgtcgctataaagaatggaatggcgattgcctttagtaaacgccggctttttgctttttgtaaaagtaaaatgagtgcaagcgtgcagatggcaaaaacgaagaacggggagaagtaccagggagttgaaagatcttgttccggggcttcgtataccgtttctattggttgcacaagtggaactccattatatgctgcggaatctaaatgatacatgaggtagtcgggaagaaacatttgttcccggatggttgctacggaagttgcgggagacccgaggatcgtgtgaataccccattggatccacggggaacgacttagatattcgtccagaagattccagaaacttttcgtggaaggttgagctatccatgtgatttgattgcccgtgcttttctctataatgtcccgtacccgggttgaacagttgtcatataggaagttgtaaaggtattcccggtttgctggttgatagttttcgaaaagtaaatccattaaatattgtttttgaatggaatccaggtttaaggtctgggaatacacgctacgttcatcatagatgtaggaggataaaaaacgacggaattcggaacacgataattggtaggggagtagaccacgtgcaaatttgaagtaaaatccttgggttgcaaaatcaaaagtcccgtaattgaaaacaatgtccatatcgtttgctttatcaaccacccggatgcccgtgtgtccgaacagcgagtagagttcgttacccggggaacacgtcaagatactgattgtggcgtctttggacaacttaatagaagccgacgtactcgccgtgagtaaaatcaagaacaaggatatgatgaatagttttgttttcatgtgttttgatattatagtttacacgggggatattctatgtcgcaaagaaataaagcatttccgggaacagaagttcctgctttgcatcgatccttactttcgataatctgctggaattgttccagcgtgatacatccttgtcctacatccagcaatgttcccacgatggcacgtaccatgttgcgcagaaaacggtcggccttgatggtaaatataagttgttcgtctgtttcttcccagttagcctccatcaaatggcagatgttcgtttttacatccgtgtgcagtttggagaaactggtgaaatcctcgtaacgtaggagaagttcacaagcattgttcattaaccggatgtccggtaagggatgcggccggtaggcaaacgtgtaagtaaacggattcttgtttttattgatataatatttgtacgtacgcgagatagccgaaaagcgagcatgcatgtcaggctgtacggcgtaaatatctttgattgcgatgttttttcccaagaaacgattgagcttgttcgtcagggcttgcgtgtggtctatgacaacatcactatcaaagtgggccacgaaaaacgatgcgtgtactcccgtgtctgttcgtccggctccggtcacgttgatttcctgttttagcaggagggtaagtgctttgttgatttcttcctggacagagggagcattgggttgtatctgccaaccgttgtattcacttccgttatatgctaattcaataaaatacctgtgcatgtttccactttttcaagattcaaaattaacaaaattccgtgagagtagaagaacatgaaacgttttttacttttcttgttctccgggtcgagggaatatcatccacggataaaattcaattaacttgcaacttgtgacacgagaacctgtaacggaagattataaacgttaatttttaacgcttgtatcctgacattatatgctgattttacgttatatttgtgaatccgtagtatttcaagggtatgttaaatgttgaaaaggaatgagcagtattgtagaaaatttgaaagagattgctggtagtttgccggaaggagtaaaattagttgccgtatcgaaaacaaagcccgtggaggcgatagaggaagcatacgaggcagggcagagagtattcggggaaaaccgggtacaggaattggcggagaagtacgagatacttcccaaagatatagaatggcatatgatcggtcatttacaaactaataaagtgaagtatatggccgcttttgtttctttgattcacggtgtggaaagcttgaaattgctggagacaattgacaaggagggaaggaaacatgaccgggtgatcccttgcctgctgcaattttatatagccagtgaggaaactaagttcgggttggatatggaagaggcgaaagctctcttggagagtgacgattacaggcagatgaagaacgtgaagatcgtgggtgtgatgggaatggcaacgaacacggatgacgaaggacaggtcagacgggaatttcatcacttgaaagagatttttgacgagttgaaggcaacttattttgcgggaaacccggaatttaaggaattatccatgggaatgtccggagattaccggattgccgtggaagaaggaagtacgatggtacgtgtggggagttccatcttcggggcgagaaattacgcgaatatataatttgaaagattcattattaactatttaaataaatcattatggcagatttgaagacgaaatacatgggactggagttacggagtccgattatcgcgggaagttgcggtttaacgtccgacgtggagaagatggtcgagatggagaaagcaggagtgggagccgtggtgttgaaatcaattttcgaggaacagattaacgaggagacttccggtgtgttcaaggccggttacgggatgggtgatgcttacccggaggccgaggattatatcaaagcgtacattcgttccaacacgatacagaagtacgtggaattggttcgtaatgccaagagtcgtttgacgatacccgtgattgccagtgtgaactgctttagtggtggagaatgggtttcgtttgcccgccagttggaagaggccggggcggatgcactggagttgaatgtatttattttgccggtgaacgagtttaaggagagtgcggaagtggaaaacgtgtatttcgagatagtgaaatccatcaagagccagataaagatacctgtttccgttaagattagtcattattttacgaacctttccgctttcgtggataaaattaaggcttacggggcgaatgcaaccacattattcaatcgattctacgagccggatattaatattaatactttagaaatgggggccgcttcggtgtttagcactgctgccgaattgaggacaactctgagatggaccggtattttggccgggaaggataagagattggagatctctgcttccactggcgtgcatggtggtgaggctgccgtgaaattattgttggcaggggctacgacagttcaggtttgttctgtcctttacgagaagggtattcacgtgatcgaggatataaataattttatcgggaaatggatggactcgaaggctttcaagacgatcgaggattatcggggaatgctttcttattcgtctatcgagaacccggatctttatgaaagagcccagttcatgaaatactttagtaataaacaatattaatttatgagaagtacatttatcttgttgttgtgttgcatgtgctttgcatgtgcgaagtatccgggagtgccggaaaaataccatgctttgttggacaaagctttagaaacgtcgggaacgaatcagccggaattggcaaaggctttggaaagtgctactccggaaatgaaggagggcgtggcctttttgatttcttacatgccggagcgggatttgaaaacgatgaaaggggacgatttgttgtcgaacgtaaaattggcgtatgaagctcgtaaccgttttgcctgggcgaagagcgtgccggattcaattttcttgaatgacgtgttgccttacgcttcactaaacgaggaaagagatcaatggcgtgccgatttctacaagaggttcgctccttacgtggagaattgtaaaacattggaagaggcaattaaagccgtgaacaagaatatccgagatgaagtgaaggtggattacaatacggctcgcgagaaaccggaccagaatccctcggagtctattcgtcagggaatggcttcttgtagcggtctgtctattttattgacagatgctttgcgatcagtgggtattccttcccgtattgccgggactgccaactggcatgataaccgtggaaatcataactggtgcgaggtttggttggacggtaaatggtattttaccgagtattacccgaatgaactcgatcgttcttggttcctcgccgatgccgggaaagctgatcccaaagatcgtatgcacgccatttgggcctcttctttcaaaccgacaggggagagtttcccgttagtttgggaccttaaaaataatgatgtgcctgctattaatgtaactcaacgttatctggatatttatcaagaggtttatcaatctcagttggccgggggaaattacgtgcctttaaaggttatgatgtttaaagataaacgtaatatgcgcaaatctgacgatcgggtagctgccaacgtggatattttctgcggtaaagatcaaattggtggtggacgcactgcaggaccgacacaggatatgaatgacgtgttggaatttatggtggaaaaaaataaagtgtatactttgaattatttcgataaaaacggtcagtgggttggtgaagaagtgaaagtgaaagaaaaaccggtagaagttaaattacatttgtaaaaaaataaggggcggttcttgaggccgcccttttgtttattaattcttgggtattgcagatataatcttgagattatttgcgtctatcgtgacatcgaattcccgatccccttgttcaacttcaaaaatgtaaatgagcgaaccgtctgctctttcttcataatcaatgtcgtcaatccggtaattcgcgtaggaagaagttttcagtacattcatcacgttggccggtacattattgtgtggaatttcccaagtggtgacaacccattgattctggtggttgaatactacctctttcatgatttgtttatccataatatcaatttttaatacccctttatcttgatcgatttctacgatattggcttgtgggtatttttgctggataaattgtaaaactgcttgtggtgcactctccggttgatagccccggccgttatccataagggttttcaccagagttccattttcgagataatgcagggcaacttcttgttctccgagttctgcttcgatgatgtagatggtctccattccggatcgttccagcttgtcaacgtcttctacttcccattttccgtattctccggattcaaagctgttgcgaattaccacggggagagaactatacttgatgtcgctttctgtcatcacccattggccattgttgtcaaaccaagcctcgacttccgtgaagtcgatatggaattcggctacttgatacgtgttcttcacttcccattctactcgtttggctgaggggtattttgctttaaaggcgctcacaacatttttgggtggagtgtagctgctgtctttgcagctactaaaagcaaacgtggttgtgagcaggattaatgcggtaactaatgttgttttcataatttttattttaagatcctcttgttttacgttacaacaatttaaatgttacctgtttattatcctataatatttccatccatgtctactgttacctgtctctcgttatcaccttgttccagttcgaatatgtaaactttgctgttgtcagcactttccttgtagtcaatatcgtcaatgtggaaaccgggatttgcggcttttactttgtcggctatttcctgaatctctctttctttaacaccccaagttgtgtataaccattcattagcgttattgaagtgtagttcttttgctttgttatcgtgtaggatgtcgatttcggtaattcccttttcgatttcaatatccacgatcgtggcttgtgggtaattgttgttgatgaagtttttcaagacttcaggaaccgtgttaggttgataatagtcgttgttatcaatgtcttctacggctttgattaacgttccgtcttccgcgtagaataaatcgaattcttgtttgcttttttcaacttcgatcacgtacatggtttccatttcaactctctccagcatgtccacgtcatcaactctccagtctttatattccgattcgccaaatgcggtttgtatggctttcgggagattctcaaacagaatatcactctcggtcatcacccattctcctttggtgttaaaccacgcttctttctcgatgttgttgtcgtagaagttagccacgtagtggtcgtgttgtaattcccagtcgacacgttgtgcgtttggatatttctcgtatagtacgttcacgattttttcatccggcgtgtagttatcatcattatcatcacagctagtgaaagtaaatccggctaacaataaagaagcgaaaatagtcattcttgttttcatggcatataaattttaatgtttgtgttctttgttctaatttctgagaacaaagtaaaggggtgattttggaaagatttgggaatttattgattttggatttaaaattgtaaatcgaatcggtgtttcccatcgaaggagtaggaaatgtggaaatggtagaggtggacgatgctctgaacgatagccaatcctagtccggtagaatcactttttttattgtcggcttgatagaaacgagtgaaaaggcgggattgatccaaggaggaaccatccgtgctgttggtgaaggtaattccggttgattgtatgcgaatagtgatacttccctcgttcggggtgtgtatcatggcgtttttcaacaggttcgtgattaatatatttgccaatgattcattcatgtgaactttacaaatggcattttcttccacttctacatgtaggtttttatgctcgtaaatttcttgaaaatcttccacgagttcttggatgatcgggttcagttctatttccttcgtctcgtggaattggccgttctcgatgcgggaaaggagtaacagggatttattgagtttcacgatacgtcccagattccggtggatgtcctcgatttcttccagttgtccttccgtgcaatctggccgttctgccaataattccagcttgttccggcagatagctaacggggtctggagttcatgggatgcgttttcaatgaattgtttctgttgggaatacatctcttcgtttcgccgggtcattttaagtatcgtttcgtttagtcgccggaattcttttattttggtaggattatccaacgggagattcttcccgcccagggtaaattggttcagccaattcaatagtttatagaaaggggtcaagcttttcctgaaaacaacctcggaaacaatcagtatacagataagtagcgtgacgtacaagatcacgatcgaccataatatcgcttcgatcatatcgtcttgttccaaggttgagatcatgatggtcaactcgtaaaactttttgtcctgtcctcgaaaagccgtttttaagactcgaacgggatcgaactcgtattcgagctcgtagaagcgggttgaatcaaaataacgttctttgtagtgaatagcttcgttttcagatatttccttgatgaagtattgactcattaaatcactactattgttgattgctgccgtgtctctttggacttgttgaatgatgagatgtttgtagttttcgagactatcatccgtctcgtccagaatttcatccagtatgctataaaagaaaaagcctgcccagaacgtgaggataataatcatcacgatcgaaagtttgcttatcgtgtggtggatgagtttcatacttccggtgttgtgattagtttataaccgaacccgtacacggcttttatttccgggatagcgtcagcggttttcatctttttgcgtaaattttttacttgggaatagatgaaatcgagactatcggcctgatcaatgttatcaccccacacggattcagccaatgtcgttttgttgatcaatcggttcgggttggtgacaaaatagtagagcaggtcaaattcttttcgattgagtttcagttcttccccattgatgaacacggtgtgatcgtcaggacggacggtcaggttttcaatttcgatctctgtgtttccatccgtttggtgtcgtcggatcactgatttcactcttgcgtgcaattctgccaagtggaatggttttgcgaggtaatcatcggcaccgaggtcaagtcccgtaaccttgtcttcaatggaatctttggccgacacgatgatcacgctttcccgtttctttaattttttcagctcttccagaatcgaaagcccgctacccccgggaagcatgatgtccagcaagatacaatcgtagtcgtaatcattgattttttgcagggctgtagaatagtctgccgctgtctccacgacaaagcgttctttctccagtgattgggtcatcacttctcgcaagtctttctcgtcttcaatgattaatatcttcatggtattgaaattttgtagaacaaaaatagtaatttattctggaaagaatctggaataaattttaaattagagacttccgagagtacatttccaatttattcctttatatttgctacgatgcaaaaagaggttgtatgaaggataaagacttgtcttcggacataccggcggcatacacggtatggctcatcccggcgtttgggggtgtcatgcaggtcgggctattctgaaatggaaatgggtgttgcaaatgcaaggtactcgttcccttggtttcctgtattggttaggccactcgtgggaagagaatgagtatcgtggagggataatcttactttctataatcattattatttgcgggctaatgttggcttttttggtgaaataataatttaaacaatagaaatatggagtatccaagtattaagatgttaatggaacagattcgggattgggcagaagaagaggattatgatgcaattatcgaggtgttgccggaactgaagactcccgggcaattttacgaggcagtcttgtgtcttgcttatgcttatttgaatcaggggttttaccgagatgcggaagagtggttgcgtaaagtagaaagccaaggatgtaaaagtggtgtttggaattatcggttggctgtggcgttgatgcatcaaatgcgtttggaagaggcattgccgtatgctgaacgtgcggtgactgtggaggctgattatccgtggggatggttagtgtatagcaagttgttatatggaggtcaaaggacagaagaggcgttagaggcagcaaagaaaggtttggctttgatgcctggggatgaggagttcacctcgttgatcgaggatatttccaacgggttgtcattttttgaagttaccggtgtggaggaagacgatgggaagatcgagaacggggaagagaaagccggtacattttgcgggtccgtgttgttggactctacgagtttcgatgtaaataaggttatggcggatttgaaatcggagtgggggatagaaccatccgataagccggaagatatggcgagtgacgatacaagtgcgaacgaatcgacccgggtgttttatctcggtgagactttagtggccatcagtctcatgccggcaagggtgccggatggtgaggccgaatattttgcagagaccaattatatgtggccggaggccgttgaagtgacgaaaacgcataaagctcacgtgctggtagccgttcttgctcgtggattgtcccccgtagaggccggtaagttacacgtgaaagtgattgcgacttgcttgaaacagccccatgttattggcgtttatgtttccggtaccgtgttccagccggagttttacatcgaggtggcagatatgatgaagggtgacgagaatgccttgcccgtgttggattgggtgtatttcgggttataccagagcgaagaggggaataacgtgtacacgtatgggatgacagctttcgggaaagaagagatggagatattggggagtaagcatggcttgaccgagttgcatggatttatgcttgagatagcctgttatgttatcggttcggacgtgacgttacatgaaggagaaacattaggaagcagtgaggaacagaaattactgattacccgatcgaaaggggtttctgtggaaggtatgactttgaagattgagtattagtacggagattggtcatgttttttctgttgaaattaatctagacttattggtttgtactgtttttatatatatgtaacctaaaggtgggtgtttgtgaacatcatacaggaatctattcggacgcatcggaatcttggggaatacgagtccttgaaatgggattgggaatcacaagtgacggcggtgtttagattgcccctgcgttaagaaatagagctatattttatggttaaacaatttattatcaagtggtcttctatttccggttgaagtctagaaataaagtgttacttatgtgtattactcttgcgggatttttggaaaatgtagaatcaaatacaatgagtacactatccggttgtccggaaagaattatgcttctccaaaagattccttcatcttggttttggcgtagagtgatagtgtcagaatgtgcacccgtatcttcatagtcgaagccagatgttcccgagtcttcttcatgatgaattgttgggagcttcaccggttcatattgcttttctaccgtgtaggagggggtgtcagtccagcttgccgtgatttgttcgtgtaaaaaataaattgttgcaaataatatgattagtaataatgtggagatgatgtagaaatgttttagttccatgattttaattttaaatgttaattctttatatgttttgttgttgaaatgacttaacaaaagtatactaaaaaaaaagaaaaaaacaaaggaattatgagaaaattatgagaattttgaatgaagaattcatttcgagttaatcttaacggggaaaatggagcttgtttttgtgattgagattaatttatatacctttgccaaagtgtgaagtaagtgatcaacaagtgtatggaaagcagtagtggtgataagctggtgagttttagaaatggtgatgagggtgcatttcgttattattacgatttgtactataatgctttatgcttatttggtctgaggatgttgaaagaggaggaagtggcggaagatattgttcaagatgtgtttgttaatttgtggaaggcaagagaagcgatcgagtcgactttacatttgaaaatgtacctgtaccaatccatgcgacatcgttgtttgaactatatccgggtgaaaaagttggaggaggattaccggatggaatatgcgctgcttaagtctgaagagagatttggggatgcagttgtagaggaagaggttcatcgggtagtaatggaagaaattgatggtctgccgcaggaacaacgtcgggtgattcttttgcatctggaagggaagaataatattgagatagcagaggttatggaagtttccgtgaacacggtaaaaacgcataaagctcgagcccgtcagcagttgaaaacgaagttgcaggatcttttcgtgataacttttattctaggattataattttgtgatacagttatttgtaaatattgggcaatgaaaattatcaagtgccgttctttaatttttgaaaaaaataaaaaataatttgatttcttgtcatcctcttgcccgacatctttgtattaagagtagttattgggataataatccataataataatttggactatggacaatgatttagggatatcaatcgaggaaaaggttcaccggataaaagcttatttggatgaaacgatgacgccggaagaggaggttgagtttcagcgatggttagatacatccgtggctaatcgggttttactggatcggatacgggatgaacgaattctgttaaataagattcgttttgctgaaagaaatgacaaaggaaaaggttgggataatatccagaaaaagattcgaaaaagtccgggtatttttattcgttttatgcgttatgtagccgtattggttactataatgttgattggagttgcagtttatcaagtggtagattgccgaaaagaagatgataacgggttattggcgcgaaaacagcccatgtcgatgaaggggggataccgggcatatctggagctggtgaccggggaacgtttggtgttagatagtacaagtaatgtgacaacccgaattgagggggcagtgataaaagcagaaaataaaggaacagtgattgtcgatgaacaaaaaacagattctgtcacggagagtgtggaatataatcggcttgtgataccccgagggggagaatataagattgttttggcagatggaagtcaggtgtggattaattcccaatcggttttagaatttccagcttgtttcgtgggaaaagaacgtcgggtgagattacaaggagaggcttattttgaagtttctaaaaatgtggagaagccttttattgtggatatggggaataaagaaattagggtgttaggaacgagttttaacgtgaatgattatgatggtaagtttgtaacaacgctggtttcgggaaaagtacaagtctttgtcaatgataaggattatgtccttacttcttccatgcaggttcgggtagagggggatgatgtttttgttgaagaggtggatgtgagggagtttacggcttggaaagacgggttgtttgtttttaaaaagcagaaattacgagaggtgatggatatattgtctcgttggtatgatgttgatgtcttttatcagaatttagaattacagaatttacatttcacgggaaccatacaacggcatagtgaaatctctggcatgttgaaatttttggaaaagacagatatagtgaaattcacgttaaatgggaaaacgttaatagtgtctaaataaaaagctgttgaaaaattaggccttttcaacagcttgaatgaacaactgagtgtttcatcttttagtagaacaaatttatgagaaaaaatcgacaaatacgatttttgagaaatcgtattttaaaaaaagtagtgaacattatgaaattgacattcattttgttgtttatcagttttatgcaggtgtcagcaaccctgtattctcaaaatgatagagtttccattcaagtaaaaggaggcttgatagaggacgtttttcgattgatagaacggcaatctaattatgtatttgtgtacaaccacgaacaagtgagcagggtgaaaaaactttcgcttgatttcaaaaacaagagtgttgcagaggtacttgacaagtgtttgaaagattcggggttatattacgaattattagataatacaattgttattcgtgatttaggtgaatcgggaggaaacgaaaaggaggtgaaaggaagagttattcgaggggtggttacggattcgcaaaaagggcctttgccgggggtttcggtattaattaagggaacttctctgggagtggtgacgaatacggaaggtttatatcgaatttcattacccgataatcaaaaagatataacattaatcttttcttttatagggatgcaaaccaaacaaattaaagttgctttgcaagacacgattaatgtggtactggaagaaaatttacacgaattagacgaggttgtttcttatggatattatcaggttgataagcgtcacatgacgagttctgtgacctctttgaaaatggatgatatcatgcagcctggtgtaagtacggttgatcagatgttggaagggcgtgttcctgggatgatttttatgcaaaattcaggacaagtaggtgctacacctaagatcaaaattcgtggtacaacaacaattctgggttctcaagctccgttatgggttgtggatggtgtaattttgtctgatccggtgaatattgatcccacgtcgattaacgatttggatttcgtgaatttattggggaatgcgatttcaggaatcaatcctgatgatattgatcagatcgacgtgttgaaagatgcttctgccacggctatttatggaccaagagcatctaacggagtgattgtgattacaacgaaaaaaggaaaagtaggtgcaccttcagtttcttattctttgacgggaacttttcgtcagcgtcctcgctacacggatcgagcagtcaatgttatgaattcccaagaaagaatagattattctagggatgtgataaagaaccaactgaatgtaccgaatttggatagctgggtaggatacgaggctgcttattatgaatatagtacaggtaagattaattatcaagagtttttggagcaggttcgagagatggaaacagtgaatacggattggttgggaattttaatgcaggattcttattcccattctcattctttgaatgtttccgggggaactgatcatatccgttactatgcatctctgggatataatgatgaaaacggtaatattcggggagaaagtagcgaccgttattcagcaatggctagcttgaatttgaattataacaggtttatgatgcaatttaagttgaatggtagcacgatgaagagagaatatactccggcagaggttggagtgacaacctatgcttataacacgtctcgtagtgttcctgcttatgatgagaacggggagttatggttttatcaaaaaaataatgttagttatgaccaaccttttagtattataaacgagcggaaaaattcgtatgataaaatcaatacggaacagctaggtttgaatgtgtctttggagtatcgcttattgcagagtttaaaggtgggtgttttttgttcgtataatgtatccaattcaagcgaagatgtgtattttgctgataacacgtggtacatagcagatttgaagaaagcaagtatgtccacgggtgagattgatataaccacaacgttgtgtccggtgggaggagaattacgaatggataatacgaagaatgaaaattacagtttacgtgggacgcttacgtttaataaggccatggataaagaattaaatcatgtgctttctgcttctttaatcggagaattaagttcatcgaaatacacaggttttaagattacaaagcgaggatatatgccagatcgcgggatgatttttaataagcttgaaacaatgaataaagataatttgtacacggcgtataacgaatggttgttaacagatgacgctatgggggtcatgaaagataatttaacgaatttggttggacttgtcggatctttcgtgtattcttacaaaaattcttatatttttaatgtgaatgggagaattgatttctcgaacaaatttggtgatgcgagtaatgataaattgttgccaatttggtctgtttcaggtcgttggaatatgcacgaaaacgtgttgaagaatgtgggttggatagatatgttggcgttgaagatgtcttttggctatcaaggaaatatgtctgcattggattctcctcggctgattataaagaaagagggaatggataactcttttaaagaattatattcaacaattgctaattacccaaatcctaatttgaaatgggagaaaacttctacttataatattgatgttgatttctcattattaaatcgtaaaataagaggaacgatcgggtattattatcgatatacgagagatgcttttctttctaaaaaagtgtcagttgtgaatggcgttgaagcttatacggttaatgagggtaatttgcggaatcaaggatatgaattgacgttgaattttatgccagtgaatacggcaacttcgctcaatgggcaacagagagggattgtttggcgatttgatcctaattttggatcggttttcaatcaattaatagataaagtaaaacgtaaagatcgggttttacaagatgaagtaaaatatgaagattatttgaatggtaaggtgcaggttgccggacgtccggtaaatacattctattcttacagatttaaaggattaaatccggaaaatggttctccgatgttttatggaacggataaaactacaatggttaatggggaggaaaaattgacaaaagagatttatggagaaatggaccgggaggatgtgtggttaacggttatggaacattcgggagcgcgtgaaccgtttttacaggggagtattagtaattatttaggatggagaaatttaggactttcgtttaatttggcgtatagtgttggttcaaaaatacgtttgtttagaatgttcccgaatgatggagtcgttgtcggaccggaaaaaaatctgcgacgggaattcgttaatcgttggagacagccaggggatgagaaatatacaaacgtacctggaatattaactggaagtgcttggaatgatgctagatggccttggtggactactgaaccgtataaattttctaataatttgtgggaaatgtatgatttctcgaatattcgggttgtatctggcaattatttgaaattatcaagtctttctttgcgttatgtcgtgccggaatatatttgcaaaaaaatgcgagttaaatctctgtatgttaatttgagcggaacaaatttgtttactatatgtagtcgaaaattaaaaggacaggatccgtcgcagtcaggctcgacatctttgataaatctttccgtgcgtccgacgtattcgctacaattgaatgtgacattttaagtgatgaattatgaaaaagatattattgattattatgggatgtactttgttgggtgcttgtggtgatttcttggaggaatattcgcaagaactcgtgtatgcaaggtcctgtgaagatttggatgaaattttaataggaaacgggtatatgaaacgaaatgcctcgcaggatttcttttattataatgaaacaggtacgtattatccttatttacacgtgatggatgatgatgtggaggaatttattacaggagggttgaaaatgaatggtttttctacgccggcagaacgtttacgtaatttttatgcgtggggagaaagacctttttcttatatggatggaacagaaatgagagatatagattggaagagactatatcagcacattgggtatgtgaatgtgattatatcttacgtgaaagagtttgaaaaagatccggaagagatacgtcgtcgagtaatgggggaggctcaatttctgagaggatggtattattatatgttagtaaatttatatgctaaaccttattctgagaaaacggcgagtatggatttgggagttcctttaaatattacagaatatattgaggataagtattttagtcgagatcccgtacgaaaggtgtatctacaaattgtagcggatttaaaagctgcagctgataatcttgcaggtattgttcaacctacattttaccgggttaatgaggctgcagcaaggactttacttagtcgggtatatctgtacatgggtgagtggcaacttgcgatagaagaatgtgataaaatcatcgcttctgggtgcaaactgcagaatatgaatacgatgagtggacaatggttgaacacggtggattctccagaaatattatttacccaagggagttattccatgcagtttttaatggataatagtcttatttcttatgcagctcaaggtggaggacgatatagggcttcagatgagttaatcagtttgtacaaaaaatatgaaagtgagggggttgtagatttgcggaatacagcttttttggaaccttcatcgaggtattgtccgggatttttctttgtacgcaaatctcctgatttatcgacaaaatcaggtttggctaaagtttatgatgcctgcttgattcgttctgcagaggtttatttgaataaggcagaagcccaggcaatgttagatcaatcagaggctataaatacgattaaagttttgatgaataacaggtataaagatggaataattcccgtaattgatggattgaatgggaaagctttagttgattttattcgggaggaaagacgtcgggaattatgtttagagggacatcgttggtttgatttgagacgttatgccgtaacttcaaaatatgctgatgcgaaacaggtgagacatggagtttatcaatctgccatggcgaatatgcagccgggagtgtatgatggaagttacgtgttaaaagcttttggggaggatgatgcttggatgttaccgattcctgattacgaaattgtttttgatcagggtgctatggttgataatgccaaaagagcgcctcgtaaaaaaataggaattaacgaataaaggatgtaagtatgaaaaataattattttacaatattgggaattgtactttgtcttttcatggggtgtaactctgatgatgaggatgtgaaagctgttgaaaatatgcccgattggtttaaaatagaagataagccaggggaaattaatcatttgatttatggtatttataaagattacggggttaccatttttataaatgatacgcttggttatgaggagttaggagaggatgcttatggaaatccggttgttcacacagaattattcaatatgggatattatgtgtatggtacttatacggatgggagaatgagactgtcttctgatacggttgcaatgataattgccgtaaatatgatcaaggatcgggtaatcccttatttgccagaagagagtgtatacaggcctctttcgttcttattggcagattcgatattattgacggaaacgataagttatacacccgtgactcgtgaagttaacgtgtatggtaaagggttgagaggaattgttgtaggacggttgaatgcaatgaaggaaatggagcaggatgaattgaatatgttggggggagaaatattggctgtgaagagtgcggattggattttggagttttgcgtggatgaattggaagactattataaaattacgggagaagatcaatatgggaagacaagtactgaaagtcctttctctccagccccgaaacctgaagaattagggtttattcggcgagtggatgctttaatttcaggaagaaaatatatgaaaaatccggataggaaacaggatattcaagattacgttactgtaatttatgcttatcgaggagaggaaagtcgtttctatgagttgtatagtacttatccgaaggtaatagataagtttaaattgatgcgaccgatagtggaaaaatatgaaattgccaatgggataaaatgaataaaaagcctcgcttgaacgaggctttttatttattactttaaccacttatccagccaagttgcgaaagtacgttgccataaaataccgttctgacatcctagtacccagtgacattcttccgggaagtacaagtactgagccggaataccacgcatgcgggcggcgttgaatgcgcccataccttgagaggcatcgatacggaagtctttttgcccgtggatgaccaaaatcggggtatcccattctccaacgaatttgtgcggggaattgtcaaacgtgcgttgagcaaccttgttgttcttttcccagggggagccgcccatatcccagttggcgaaccacatctcttcggtgttgtagtactgcatttccatgttgaagataccgcagtgagcgataaatgctttgaagcgtttatcatgatgtccggcaaggaaatacacggaaaaaccgccgtaagaagctcccacgcaacccaaacggttttcatcaatataaggttcctgttttagctcgtcgatagcagagaggtagtccttgatattttgtccgggatagtctccactgatttgttcattccattcttgtccaaatcccggtaggccgcgacggttcggggccacgatgatgtaaccgttggcagccatcatttggaaattccagcgataactccaaaactggctcacggtactttgcgggccaccctcgcaatacaggattgccgggtattttttgttcgggtcgaaatgaggaggataaatgacccatgttaacatttgtttgttatccgtggtcttgatccagcgggattctaccttacccatggtcaattgatcaagaatacctttgttcacgaatgatagttccgtgtcttttcccgtggtcgggtctactttgtaaatttcggcgggtttactcatggatactttcgtggcaatcaggtaatcgtttacaggaataactgacgtgtagttgtgtactccttccgtgagtttatcgatcttgccgtcattcaaggttaacttgtaaatttcatctgtagcgtgataatccgagatgaaatagatggtgttatcatctgcccaagacaggcttccgacattttgatcgaaatctttcgtgtattcttttttctccccggttttcaggttcatcacgaataagcggattttgtcagcttcgtaaccgtcacgttccatactttcccatgccatgagttccccgttgggagagatcacttggttctggtcgtatcccatcattccttccgtgaggttagtggttttaccggaattcaaattgtacaaataaagatccgtgttcgtggaactcatgtaggcaacaccttcttttttacgggccatgtagatcacccctttaccgtcttttgtccaagtgagttgctcggttcccccccaaggacggacgggtgattcccatttttcaccttccatgatgtcttttcccgtggtcaccatttgtccggggatataatcggccacgaaaggatgcgtgtaggcttccacccagtcattccaatgacggtaaacttggccatcaattaaacgggcatttgctttcgggagatcagggtgaagatcatgaacatcttgttccagtttcacgtctttcaggaaaagaagtttggatttgtccggggagaaaataaatcccccaatgccaccttcgacattggttaactgggtaaggccgctaccatctgcattcatttcccataattgtacggaaccggatttgctggacatgaaagcgattttaccatcggaagtccaggtttctccgaattctttatagtccgtgtctgttaattgttttgatttcccgtcagccaagttcatcacgtagatgtcactgtacgagcgatcttcttccttgttgaaataagttacgtcatacaggagtgttttctgatcgggagatacgcttacgctaccgattctgccgaatgaccataacacctcgggagtcatcacgtcggatgctagtttcatatccggtgttttataacttgtttttactgcttctttcttgttgtcacacgacaccattgccaacaagattaatgcagaacataaataatttttcattgtaattttagctgttttattacacgattttcttatttcgttgccggttgtacgccgttttccatggcttccacgatcttttgggtaagctcttctgctaattccgggttatccataaccagttgtttcacggtttcccgtccttgtcccaatttactttctccgtaggagaaccagctaccgcttttcttgatcacgttgcattcaacgcccaagtcaacaatttctccggaacgggaaattccctctccgtacatgatgtcaaattcggctttcttgaatgggggggcaactttgtttttcaccacttttacacgagtatggttaccgtagatttcctctccgtctttgatttgtcccacgcgacgaatatccaagcgtacggatgcgtagaatttcagtgcgttacctcccgtggtcgtttcggggttgccgaacatgacaccgattttgtcacgcaactggttgatgaatatacagcaggtatttgttttactgattgttcctgtcaatttacgtaaagcttgtgacatcaagcgggcttgtaatcccatcacgctatcacccatttctccctcgatttcggctttgggcgtaagggctgccacggagtcgatcacgataatgtcaatagcggcagagcggattagttgttccgcaatttcgagggcctgttcaccattgtccggttgtgagatgaataagttattcacgtcaactcctagtttttcggcgtatgatcggtcgaaggcgtgctccgcgtcaatgatagcggcaataccgccttgtttttgggcttccgcgatagcgtggatagccagagtcgtcttaccggaagattcgggaccgaatatttcgattacacggcctttcgggtatcctcccacgcctaaggctctgtctagcccgatagagccggaagggataaccgcaacatcttccacgacattatctccaagtttcatgacgcttcccttaccgaaattcttttcaattttgtcaagggtaagttgaagtgcttttaacttgtcttgattggtttctgtgtttgccataatttattgattttagattttgaattttagattttaaattcttccaagatctgctttgcatgatccttggtgttcactttggtgattattcgttcgataatcccgtttgcgttaatgatgaaagtggttcgaacgactcccatgtaggttctcccgtataattttttttcagcccagacaccgtatgcttccagtatctttttttctgtgtcggcaatcagattaaatgccaaattatatttagcgataaatttcaaatgtgaatttgccgaatcggggctgacaccaacaacttcaaatcctttttccgtgagggaagaataactgtcattcaaactacatgcttcagccgtgcatcctgacgtgttgtctttcgggtaaaaatagaggattaattttttgcctttaaaatcatccagcgtgatttttttcccgtcttgatttatgccctcgaagtaaggggctttatctccttcttttaatggtgtcatatgcgtttataattagtgatttacgataaggaattaaacaatttatgatttgatataacttgtttacttcttttcccgtagtctatgtacaaaagtaggaatattttggtgaaatgaaatagagttttggaatatttgtacatttgcataaatctaaaaatagcgtatggaatttattgaaacgtataatttgactgggttgattatcggaatttgcacgttcttgataatcgggttgtttcatcccgtggtgattaaagcggaatattattgggggacggggtgctggtggatttttcttgttttgggaatcgtgggaacgatagctgccttatgggtgacgaatgtgttgtggtcttctttgctgggcgtgtttgccttttcttctttttggacaatcaaggagatttttgaacaggaggagagggtacgtaaagggtggtttcccgcaaacccgaagaaacaggataaaaaaatgtaaaatttaaaatgtagagtgtagaatgaaaaagctttgtgtgggggtattataaatcggaaatcataaatcaagaaattaatacatggatagttcagcaataatagaacagatgaaccgggagagccggggaacgttaatggcgagtttaggtattgagtttaccggtataggggaaaattggttagaggcaaagatgccgattgatgaacggacgatgcgtcccgggaatttgttgcatggtggagcgattatggcattagtggagaccgtgggaagtgggttgacttatatcggggagaatttggaggagaatcacgtgtttggaatcgagattaatgctaatcatgttcgaaaagcacaaggaaaatatgttatcgggcgtgcggagtttattcataaaggtcatcgtacacacgtggtagctgtcaacgtaacggatgagtttggtaatttggcttccgtgggacggattacgaatgtggtgctgcctaaatcttaattaataaaaaatagttttataaagatagaatgaacggagggtgtcaaaagttcattttgcaatgactattttctccttgtgaaattatttgatagtaatttgtttagaggtgtaaggggaagttggtaaatacaaatagaacttttgacacccttttgtttatatggaattttttaattgtagaatttcttgttttaatttgcctacttcttcagctagttcccttatttctgaatctttttttgctatgatacagagtagtttatcttcgatattttgttctggagcaaagtacgtggggatttcatcttgttgagattgaaatttttctccttttccagtaaagatccatattggtgataggttgggataagtggtgaaaagttttgtcaaagtatcttcagtaatgcctgttttactttctagagttcctcttgatattcctgttaaagagtaaaattctcttttgctaatccctagatttgctacaaattgtaatatcctttgttttattggtgaaatattttgcatactgctttgcatttggcgaaatattttgtatctttattggactttaatagattaaatgattgtaaatatacagaaaataatggattaagcaatgaattttcgttgttgtggagagggggtttattacaaacggtatgggtagaaccgtttttttctgccctgacttaaaccgatgattatggaaaagaacgattgggccaatgtttcaatagagaatgcgttggacggtttgtctatggaagaaatcgagagactagaggcgtattacatggcagaagcggaatgtttgatggcgtttgggggacaagagaagaaagagcctttgacgtttatgttaaagcatttacgtgccaccgagtgtttgtttaaaactttacaatttccatgggaagagagtgttgcagtcctgtacggaagttttatgcactatgttgctttggaggagaggaaagagagtggaaaatgtttaccggactttatgacggaattgattaaaagaatgaaattccttgcccaaaaaggaccgttgatcacggctttgtttcgtcgatatcaaggtcaaagaaaagaagtggaggctttagttgctttaaagaagggtgaattaaacgagcaacaatgatggacggcgtgaataaaggttctttttgcggtgggataccgggaaaggagcaaggtttgtcattgaaagattattatctgataaaatcgcaagtgatgaggcgataccggagtaacaagttgatggaagaatatgacgagaatttactgggagggttacgacatgatattgatgagatgaggcaagtactgaattgcttgagactaccgtggatgaagttggcagatgcgttttttcaggggtacgtggaatctcccttggcagataaaaaagggagattgttagcttcacgatttatcgagttgatggtaaaattatcgggagaagtttcttttgttgagaaattaatggaatatggtaattttcaaatgaaggaaataaaggaattattggacgcgtgtaaggagaaaacgtattatagtatcacggttgataatgagttgttgtacggtctctcggtgcaacaattagttgagcttcatgatacgattgaaatgtttctcgaacatggaaattcttcctttcatgagtttgaagatgacgatctgtactcggttgatatgtcaatgtctgtttttcgtttttcggattgtgattcctattctatttcttatgacttggatacttacgagggagaaatgagatttacttcttccgaacaaatgaggtatgtaatcaagcggatgcaacaattcttggataagatggaagagggggattctgttgatgctgtcgaagaggctccggaggaatttgctgttgttatcaaagaagaccgtatgccaagagaacgagttttgaggtcgactccgtttgtggatagacaggtgtgccaacgtgatgaggaatcgctggttacaaattttaatataggagttaatgacttgtgtttaaatggtttgtctgccggacagttaaaatgtattgttcgaaagttggaaggtttcttggatatagttaatgagaaatggagagaatgaggttgagaacatgtagtcactatttgatgtgtgattggcatggaatgtcatgcatttcccgtcatgattcttgtttgcaaatttctatttttgtgtaatgggaatttgtgtgggagtgtgaatgaaaattagctggtatttaggaggaaataaggcaacacaagcagatgactgacgtgttgccttcgtttcatagccgtttggaaactgtgtttgatatgttggcagtacagtcgtgagatacggggtgtggctgaatacgctcttatcacgtgtttatttgtgttggaaaagtattaaagcattataatttataatgaatattccgttttggagtggggtataaagtgcgattcagaacttttgaaatcatttcttttagggattaagtcgtttgatggtttcttctagtttgaacatttcatctcggaggcgtgcggcttcaaggaaatccgtttctttagcggctttttgcatggcggcttttgttttttgcaacattttctccaattccggtttactcatgtaggcaatgacgggatctgcagccatgttcacgtgttcttcttcgatataagctcgggaggtctctttcagcacggattccgtgaatttacgtatttgggttggggtgataccgtgttgacggttatattccatctgtttctctcgacggtactgggtttcatcgatggtttcctgcatggagcgggtgatcgtgtcggcatacatgatgaccttaccatttaggttacgggcggcacgtccggaggtttgtattagtgaacgagtggaacgtaggaatccttctttgtcggcatcgaggatggcaacgagagaaacttcgggcatatccaatccttcacgtaacaagttgactccgacaatcacgtcaattactcctttacgtaaattttcgatgatctgtactcgttccagcgtatccacgtcggagtggatgtattggcatttgatgcgaatacggtctaaatatttacttagttcctctgccattcgtttggtcaatgtggttacaagaactttctcgttgacctcgatccgtttttgtatctcgttgataaggtggtctatctggtttttgctaggaacgacttctatttccgggtcaaggattccggtggggcgaatgatttgttccacgaccacgccgttgcatttttccaattcataatcggccggggtggcactgacgtaaatggtttgtcccgtgttggcctcgaattcttcaaacgtgagcgggcggttgtcgaaagcagccggaagacggaatccatattccacgagtgattgtttgcgggaatggtcgccaccgtacatggctctcacttgcgggagagtcacgtgcgactcgtccacgacaagtaaaaaatcctgtgggaagtagtccagcagacagaaggggcggacaccggcagcccgtccgtcgaagtagcgggagtaattctcgatgccggagcaatagccgagttctcgaatcatttccacgtcatattttacccgttcatctagtcgctttgcttcaaaatgtttaccgatggaatttaagaaatcaacttgcacgacaaggtcgtgttctatatcataaatggctttcgcgagtgtggctttatccgtaacaaacagattggcgggatagatgttcaaattctccatttcatcaatcgtttttccggtctgtgggctgaacgatgtgatccggtcaatctcgtcgtcccagaactcgatccgataagccattccctcgaaggtttcaatggccggaaaaatgtctacggtttcaccttttgcccggaaactgccccgtttgaattccagttcgttattcacgtaaagggcatccaccaaacggcgtaagagttggttgcgaccaattttgagtcctcgcttcaagtaaatgatgttcgagccgaaagctgtcgggtctgccatgccgtaaaggcacgagacggatgaaatcacgatcacgtcccggcgtccggatagtaaggaggccgtggctcttaaacgtaatttatcgatctcatcgttgatcataagatctttctcgatatacgtgttggtggtgggcaggtaggcttccggttggtaatagtcgtagtaagatacgaaatattccaccgcattttcggggaagaaagccttgaattccccgtataattgggcggccagcgtcttgttgtggctgaggataagtgtcggacgctgaacctcttgtatcacgttggcaatggtaaatgtctttcctgatccggtaactcccaataatacctgtcccgggacttcatccaaaagtccttgcgttagttccttgatagcttccggttgatctccggtcggttcaaattgggaagttagtttaaacatctactaattttagattttagattttaaattgagaatatagtcccttcaatttaaaatttacaattattcaatttacaattaagaaagtttgctcatgaatttctccgggttgatgataaagcggtcatggatggccgaaccgattggagcggtttcatcccatgcctcgatggagaaacgaatgcggcgaccgtcgacttcggtgatggtggctttgcaggcaactttcttgccaacagcggttgctttcacgtgtttggtgttgatttcgatacccacggtgtcgctgtcgtcatccagcatgccttctaaacatttgatagccgtgttttccattagtcctaccatcgcgggtgtcgcgaatacttccagtttgcctgaaccgtaaacggctgcagtgtctttatattgcacggtaatttcttgcgtgaacgagtgtcctgtttttatttccatgattcttgaatttaaattgcaaagttaacgaataatcctgtatggaaggatcgttttaagaagttttcacgtgatgttatggattgtttaaatccggttaactgaaaaataggcgtacggctacaatgacgagtacaacgagcaagagataccggatgtatttggctccccatttgatactgaaacgtactcctagccatgcccccagcatattgccacaggccaggataagtccgattttaaaatccacgagaccattccaaatgaaaatagctaaagcgataatcgtgtaaaatagtacgataaatagttttatggcattggcttttaataaatcataaccacatccgagaactaaccctgccagcaagaagaacccgataccgatttggataaatccaccgtaaattcccaggaaaaagaagatgacgtttcgtaaccacgggcttttcatttttgccttgtccgcatttgcttttacccaagcatccggattcaagagtaacatgaaaaacataataatcagaagcccggctatgacttttttgaatatttcttcgttgatatccacggcaataaatgctcccgcgatgctgccgagagctacggggagcagtaatttggaatcggttttgaaatcaagtattttcttttgtttaaagccgttgacagatactacgttttgtaataaaatggcaatccggttggttgcattcgccacgttcgccggtaagccgatgaagataagaaaaggtactaccaacatggagccgcccccggcaaacgtgttgataaatcctgcggcagtaccgaggagtatggtgacgatgatttcgataattgtcatggagcaaagttaaaaactaaaacccaaaagctaaaagtttatcgtgagtatttccgggggtagcggaagaagatcgccagaagggcggcaactcccattaagtacgggtagtagaggtactgcatgatggccagtggggtaatggaggctaggccggcagccatgagtaattgtgccccgtaggggatgatgccttgcatgaaacacgagaaggtatctaataaactggctgattttcggggatcgataccaaaacgactggcaatgtctttagctatggggccggacatgatgagggcgatcgtgttgtttgccgtgcataagtcggcaaaactgacgagggcggcgatacttaattcggctccttttttggatttgacacgagttgtcaacttctgaataatgtaggcaatccctccgttggagcgaatcatttcgagcatcccgcctgctagcaacgtgataataatcagttctcccataccggagatccctgtacccatagcggcaatccatccccaaaattgaatgcttccggtaattattccgactatgccggaacagagaatgccgagtagaagtacgatcatcacgtttactcctgccaacgcggtggtaagtactagaatgtaaggaattacttttaaccattctatcggggtgacggtaggggttgtcgttatttcactgccttgaaacaggtaaacaatggttacgagtatggcaaccgggatgacaattaagctattgactttgaatttgtctttcatgttacagccttgtgtgcgggtagcaacaatggtcgtgtcggagataaaggacaggttgtctccgaacatggctcccccaaccacgatggccaccatgaaaggcgtgtttatgtctgtttgagtggcaataccgacggcaacgggagttagtgccacgatcgtaccgacagatgttcccatggaaagtgaaataaagcaagcggcaatgaacatccccgccagtaggagactatccggaagtacggatagggccaggttaacggtagcatcaactgcacccacggcttttgctgtttgagcaaatgccccggcaagaataaaaatccatatcatgagcatgatgttgctgttggcagctcctttgcagaataggtctattcgtttgtgaagttgtccccccgaagagatggctaccgccacgatggaagaggcgaggaatgctacggtgatcggcattttgtagaaatcccccatgatgatggaggctatcaagtagatacttaaaaatacgatcaaaggggttagtgcccaaaagtttggtttagtttcttggtccataggttagaaaacttgttttacaatttcttgaatattttccgattttcccatcgtgtagtaatgaaccgcgggaaccccgtgggcgatgagttctttactctgggccacgcaccattttataccgacttgattgatttccttgttatttttgcacgagcggatctctttgaccagttcgtgtgggatgtcgatgctgaatgtacgtggaagcatttccagatgtttaaatgtggatatgggttttaggcccggtatgatagggacgttaattccttgagcccggcatttatcgacaaattggaaaaatttggcgttatcgaagaacatttgggtgacaatgtaattcgctcccgcatcgactttctttttcagattttcgatgtcacaggcttggttgggggcttcgtaatgtttttccgggtatccggcaaccccgatgcagaagttcgtgggaacggtatctgtcagcgtgtcgtccaggtattgaccgtggttcatgcgggtaatttgttctaccagttcacaactatagcggtgtccgccttcttcgggagtgaaaaaacgttctcccggtatggggtcaccccggagggccatcacattttcaatgtcaaggaaattcaagtcgataagttcgttctcgattttgtggcgggtagcccctccgcacacgatgtgaggaaccatgtccacgttgtatcgcctcatgatggcggcggccagtgccacggaaccgggacgtttcgttacggtcacttttttaatcgttccgtccgggtattctcggtataccacttcatcccggtgaaacgtgatattaatgaaagggggagcgagggctatcaagggttcgatagcttcgtatattttattgatgtccccaccttttagtggtggtaccagttcgaaagagaagactggtttgtctgtattgttgagtatgtcaatgaccttcatgattttggattttaaattttaaattttagatttcagctgtacgaactctgtttattttgcgattttaatcagtcgtatgtttacagactcccccctctggctcctccgttgcatagggggaggggggactaatcggttttaaaataaacttttatcttatttcaatgttatacgctgaaatatttcgcttcggggtgagaaatcagcatcccgcacaggcttgtcgaggggtaaatggaatatccttccgtgaggcgaaccccgatctgggcaggagcatccaggatgtcgaaggctaatttcttcatcgcgtgatccggacaagtcgggtaaccgaaagcgggacggatcacgtgagttccttcgttaacttgttcctgcatccattccgcgcaagcttctgccaagcgggcacaaagactttcccgtagcagatgttcaaagtcacggcaatcgttgcattggtgatcatcctgtactttcaaacagaataatcccacgctaccaattcctttttctttcgggatgacaaaatctgccagtgaaagacactcttccaagtccgctcgctgccggggcatcgtgaatcgatactgaccatccagaacgatgtcttcattttccgaataggcatcaaagaagcggacaatgatggaaacatcaaattcatttccggcgattactttacctagcatatccagtgctgcctggtaagtgcggtctgcttcatcgttcgtgtaaatgatttccgggtatttgcctttgaatccccagaaatggaaaaatggtgtccagtcaattctttccaccaagtcttcgaggttcaggcgtttcaccagtaaattatgttccccgaaagtagtgggttccacgtgattccaatcgtatcgcggggctctccggcgagcctcttcgagtgatatttgtttttgttgatgttgatagtataaagttcgaatgttttcttgttctgtttttatttcacggatgtaattctcccggtcattcagtaaacgcttgatgattcccactgttcgggaagcgtccccgcctgacacgacgcaataattatatttgggtgctagtttaactgccgtatgtacagttgaggtagtagccccaccaacaattaggggaacttgtaattgttctttttgcaacagttcacacaggttttccatttcccccaaagagggtgtgatcaaaccactcactccgataatatctgcctcatattctttggtagccttgacaatactttgattatcaaccatgacaccaaggtcgattacatccagattattacaggtcagaacaatattcacgatgtttttaccgatgtcgtgtacgtctccttttaccgtggcaatcacgacacggggccgacgggttacattttggccggatgcgttgtgacgttcgatttccggttgtaggatttgtacggcttctttcatgactttggcagatttcacgacctgcggcaagaacatttttccttccccgaaaaattgtcctacccgttccatgcctttcattaaaggtccttcgatgatttctaccgggctggagtattgcgtgagtgcttcttgtagatcgtctgtcaggtaatccgtgatccccttgatcaaagcgtgtccgagacgttcttctagggaacgaagccgccattcttcctggtgtgtagtttttacttcaccttttgtttccttgtatttttcagcaagggagatcaaagtttccgttgcttcaggtgtacggtttagtacgacatcttccacggctttcagtaataccggttcgatttcgtcatatacctgtaacatggcgggattcacgatagccatgtctagtcccgcgcggatagcatggtacaagaagacggagtgcatggcttctcgtaccgtgttatttccccggaacgagaatgacaagttggaaacaccgccggatgtacggcatcctttcaagttctgttttatccaacgtaccgcttcaatatagtccacggcatagttgttgtgttcctcgatcccggttccgatggctagaatattcacgtcgaatatgatgttttcgggagtgaagccggcttgtgtggttaacaagtcataggctctctggcaaatgtctattttgcgttggaaagtggttgcctggccttcttcatcgaatgccattactaccacggctgctcccaagcgttgaatttctttggctttgtaaaggaagtcgtgttctccttctttcaggctgatcgagttcacgatacattttccttgcgtgttttttaatccggcaaggatggtttcccacttggaagaatctatcatgaaagccgctttggcaatatccggttcgttgctgatgatacgcacgaaacgttccatttcaaccgtgccgtccagcatggcgtcatccatgttgatgtcaatgatggatgctcccgcttggatttgttttcgggcgatcgtggcggcttccgtgtaattcttttcccggataagacgggcaaatttcgcggagcctgccacgtttgtacgttcgccgatgttgataaaattgtttaattctttatctaccacgatggtatctagtccactcactttcagttggtgagtgggtgtcgggacttttctcgggggaatgtttttcaaagcgtttgcgattgcccggatgtgttccggtgtcgttccgcaacatcccccggctatattgatcaatccctcttttgccatgttttggagacaaagagcggtaaattccggcgattcgtcgtattctcccatttcattcggtagtcccgcgttcgggtatatactgatgtgacacgggatacgtggagccagttcccgcaagaagtggtgtaattccttcgccccgaatgaacagttcaaaccaaagctgagaatcgggtagtgggcgaggctcgtgaacagggcttccagtgattgtccggtcagagtgcgtccacttttgtcgtttaccgtggcggaaagcatcacgggaagatttgtacctttttcttcctgtactttggctatggcatagagagcggctttcgcattcagcccgtcatagatagtttccaccaacaagaggtccacgccgccttctattaatgccgccgcttgactggcataagcattggccagtgtatcgaaattcacgattctataagtcggttggtcaggatcgggggcgagggttaaggatttatcggttggtccgatacttcctgccacgtagattttgcgttctttgcaagcggacgccgtttcttttgccaaacgggctccttctaaattgagacgtgaaacccattccacgcacccgtattcggtttgcgagattgcatttgcgttgaaggtgttggtttctattatgtcggctcctgcgtcaatgtagttttgatgtacttgacgaatcacgtccgggcgggtaatgtttagcacgtcattattccctttgaggggaatcggatggtgtgcgaattcttctccccgaaaatcggcttcagtcaatccgaattgttgtaaagctgtcccggtggcaccatccagtatatatatgcgatcttgtaagttcattttaataatttagaatttaaagtttagaatgaaagagttttaaatcgaaaatgccgtgtatcccgattttgtcgtctttgatgcagatggcggcaagtatttcttgcgttttcccgattttttcgacacagggggcaacgtcatctgttgttttgatctcgttggcaaaggctgtagcgtacgtgtcggctaaagtacaatctttacaaataatcatgacggcatctgctttcccgaagcttaaagagggccccactgttccggatgaagtacaaattcctaggggggcttggtcagcccggatggtgaaccccactttttccgacaggggagatgttccggcaaatacggaaatatcaatgttttcttgtatgtccgcatagatatctccaccattttccacgataatttcccgtactccatatttttctttgatctcttgaccaattcgactggcaacagctccggcaaccccactcattgggccgattccggattttttggacatctccgacatcttttgaaaaattgtcggggcttccggtcgtgcctcgtagggaacgagtgacgtggcgtaatcgggatcattttgtaagtaagcatccatgctttctcgtaatgtccggattcgggattccgtgaatgcgagaatgctttcttggaaagattcctgatctattccgatccacaagtctgtctctttgtagacgaccgtgaaagaatgccagcgttctttctgcaaatgctcccgatatgtgcgatttttgtactcgatcataactgtactgatagtttgtaaggtttataagatctgtgcatttgtctagcagctttccggattgctgaattcaatcttgaaaagtttcaacgggcaagctttcaagcatagtttgcaggcgatacatttttcgggattgaattgtagtttccaatcgggagcctcgatagtcaaggcgtgggagaaacaggccgaagcacagtttccacaattaatacatcgggagtcatcgtaagatattttgctggataccggacttacggttaccccgttatcattcaagaaagcaatagcctgttctattctcaagggatctgcgtccatctcgatcaagagtgatccggtttttccgggttgtatttctgcttttaggatattcacttttacatcataaatacgaattaagtcgtatgtcaaaggtctgtctgttgcgtctaccgggaaggttaatattacttttttagtcatgattgcttctgattttagatttaatgattttagatttaagattccaaccgcgggaattgtcacgtttcgttctcaattctccattttcaattctcaatttcttggagtccttttagtgaagtgcctgtcggcatggggcgaacgggttccgtgagtaggaagtctcctttctgaatccatgactttaaaatctcggcgatttgccgggcttttgacaggctggcaacgggagccgttttgattttatgaccgttaacctcgatctctccactttgcaaggccgcataatttgttttacctaaaatcttatttccgtctccgtaatctacaaccgtggtttctatttgttcatttcgaatagacactctccgggcaagatcttcatccagaataggaatgggtataccgataccgacaaacatgctcaccccgtatttctcgtaataaactcctcttaggaattccgtgctcatgttcttcaagtcaccgatcacggctatcgtgcgagcgttactggtgggaatgccgtattcgtttgtttctttcgtggagtggaattgggtaccgttccaagtgacgtatccttccgttccacaaaggaaaatacgggttcccaagccgatcgtgcggcattccggatcattcaacaggggagataattctccggccgtgctgtaagaagcgttccgcaatttgggtaatagggttcccatgtacgtgtatttgattttatccgtggagttagtagccacgttataattctggtaggcatttctggggttgtacaggatagcctcgttgatcgtgtctttggtgatcactgttttgatatgtttccggggataacaatccgtaccttttccccaggcctccagcgtgatttctttacctgcaatcagatcttctatgatgtgggctcccccgtaactggggttttccggattgcaatcagttgctcccacgtaagtgtccacggcagccaatccgccactgacacgaatgccgttcaattcgattttttccatgcgaatcgggggattagcgtgtccgaagtttaaaaatgccccggaggaacacattgccccgaaagtggccgtggtcacgacatccactttctctgcgatctctttcggggagagcgtttttgccagttctgcaacctcttcggcagtcaacacgacagccgtacctttcttgattttatcgtttatttccgcgtatgttttagccatgatcttgtacaattttttaatggataaatttttgttggtgattttttatctgttagctgccttgcaactaattgatttctagggatgatttgatggtatgcaatgacacgttttcacacggtttatccttgaaaccgattcatgaaattctgaaaattaccgtgtaatttcccaatcaaaaatctgaaattaaaaaaatctaaaataaaaagtccggggtataaaaaatattagcgcatgcagcgcatacgcatagacatggcgatagaatgaatgaaaagaatgctacaatttgtagtgcaataaatgctgttttgttttgttgtttctgttttcattttctttcagcttaaattataactcctggttctcaggtcgggttttggcaccttgcaagtggccttgcaggttgtcggagtttccatgagcccgttctctcgactcctctttataattcaaacaatcctcgcagattgaattgattgggacaaagaaaaacagaataaatgaataatgcaagtatttggtaatttttttctgtagtttcctaaaatcgagtaaaccgattttaggaaactacactagaaatagggtgggattagataatcttgaatcccaaggttaagttccatgattttggagctttcaccccatctccgaatttctttaatccgaattcgtagtcaatatcgaaagttactttccatacatcgactccggctccgattttcccgttccacatcattttgtccgtgttgaaatcgctttttaaatctttcgtcacgaaagatgcaacgggaccagcgaatccgcgtaatttgaatatggggagtttgagaatgttatatcccaccataacagggatgtcgatggaactgtatttgaattttccgatagaaccgatttcgtcattgattttactttctttgtgtgcaaagttcaaggctggttctaggtaaatactcccaagattgattcttgcgaaggcacctatcatgtatcctccatgcgaatctattttatattcttttgctttgatttttgcgtcattccaaccaccgtgaataccgatatttataggtaaggattgagccatggtggttaaaccgatgaggctgaagagaactaaaattactaattttttcatactgtccttttttgttttgaataattgatttatctatttatatattctattcgtttgaattccgaaaggatgataccagtggcaacgcccacgttcagggattctgtcgaataaagactgtgtgcaaagctgggaatcgttattttgtggttcaccagttgttcgattcctgcggtaatcccgtttccttcgtttcccatgacgataaatcccttgctttggagatgcatccggtagatattttctccttccaaaaatgtcccgtaacagggaaaatccgagttcgtgaaccgggggataaaatcgacaagatccaagtaaaaaacgttcacccggaatattgcacccatgcttgcttgaacggatttcgggttaaaaatgtttgcacaatcgtggtcacaaaatatatttcggatgccgaaccaatcgcagacccggagtatcgtgccgatgttgcccgggtcttgaataccgttgaggaccacggatagtgagtcttttatctcatccgggttgtatgttctgacggggatttcagctagtgcaatgacttccggcagagatttgaaattggagatgcgtcccatctcgatctcgtttacctcgatcgtgttacattttttcaagtgttgttgattgctttcgatccaagaggggcgggcaatcaatgaatctattttcatgtcggagaggagtagttcctgtaccagtttatctccctcgaccttgtataaattatatttttccctgaatttctttttttcaaggttttgaattacatttgttaggtgtttgctaagcatcgtttttaagcttgctggttaaaataaaacacaaacatagtatttttttgagatttttgagcatgcgggtagcgtacaagataagttttattttttttatattcttcgttttttattcgtgttctccgaccaagtatatcgggaaagatgagtatttgttggatcgggtaaaggtgaaagtggatgattataagcttaatcggtctgatttaaaacggaatattcgacaaaaaccgaatacccgaatcctgggggttgcccgctttcatctgggattatataatttgagtgggaggaatgaaaaaaagaaatttaaccaatggttgcgacgtataggggaggctcccgttatttacgatcctttcatgacacaacgaagtgctagccaaatagaattgtatcttcataataaaggattttatgatgcgcaagtaacggatactgttttttacaagaaaaagaaagcacttgtggagtattacgtgaaagtgggacctgttacccgaattcaagaagtgaaatttgatgacaggagaggacgggaaaatctgattgccgaggaaagcgggttgatggctaattttcggcgggatacggtgaacactcttttggagaaagacgcatcgttggatcttgatgtgttggatgacgaacgggagcgcatcacgaagatgcttcgggaaagagggtatttcaatttctcgaaaaattttatccaattttttgctgacacgacgagtgtagcgaaagaaaatatggctaaagtttttgtgcgagtggttgagaatgccgtggatagtaatgcttatagacgttatttcgtgcggaatattagtgtgaattttgactatgatccgatgctaacggcggaacaggttgattccatgtataatatgttgtattacaatggttataatatcctgtatagggataagttaaagataagacctaaaatgataatagagaccattcagttgcagcagatggaattgtatgatgcccgccgagtgattgatacttatgtgcgattgcaggcactgaatctttttaagatggtgaatatcgattttagagaggtggaatcggatggcgatgtgaaagccttggattgtgtgattcagttatcacccgtgaagaggcagtcctacaacgtgtttttggagggtacgcataattctggaaatatgggagtggggggtaatttgacttataaccatcgtaacgtgttccgtgccggagaaaatatttcagccagtatttggggaagtttgaggaaagaacaggtcaatggtgagggaaaaatatttaatacttcggaaattggtgcggaattgaagcttgtgaccccgcagttttggataccttttttcaagatgaaagatttccggcggaattatgccccgaaaacttcgatttctttttcgtatagttatgaatacaccccgtattatactcgttctattgctaatgcccgtttcggttatttatggcggaaggcaaacaagaaatggcggtataattttgatttggtcgatctgaattacgtgttgatgaaggatgtagatcagaattttatcgatggtttgaagaatgaatatatcaaaaatgcctacacggatcacatgatcctttctgccgttttctccgccacttacacggatcagcaggtgaacgtgaaaactgcggattatagttattttcgtgtaaacacggagacttcggggaatttcctttctgttatagatgggattgccgggagtaaaagttctgcgagtggaacattgaatgaaaagtattacaaaatcttcggggtaaggtatgcgcaattcgtgaaagcagatgctgaatatcgttataactggtatatcaaccgggcgaattcgcttgtgggacgtctttttgtggggtgtggttacccgtatggaaacatgaaggtgttgccttttgaggaggcgtattacgggggtggggcaaacgacatccgggcttggcaggctaggacattaggtcccggttcttatttagctacagagaaatacccgaatagcgtgggggatttcaaattggcgggaaatattgaataccgtttcaagttgatttggttgttggagggagcgttattcgtggatgccggaaatgtgtggaatattaacccgaaagaaaatcgttccggggcaaaattgaattacaatttctttaaccagatagctattggcacgggagcggggttgagattgaacgctaatttctttttattacgttttgatttgggaattaaggtaaaagatccttcaatgcccaagggaaatcgtttcgtgttgtttgattcacggggtggattccggcgttccgtgtttaacgtggcgattggatacccgttctaaaaactaaaagataaaaactagaaactaaaagataaagttggggaacgtaaatcataaaattaattaggggttgattattctagaaataatgtcgatatttgaacatagcttttatcttttagtttttaacttttaactaatacatatatcgtggttacacaaatagttgtatacttgtctttgttgttgcaaatcgtggccatgggatttgcgatcagtttgtttaagcggacgaagtttaatgccgcttggattttgatttcaacgggcttttttctgatggcgatttatcgagcgatagaattggttccttcgatgcatagaggggagtcggaggagttgtaccagacgaaagtgtggttgtcatttgttatttcgttggcttttgctatcggggcgttttatatacgaaaggtgttccagtttttacgtcggctggatggtatacggagtgagacggaaaagcgggtactgtcggctgttatccgcacggaggaacaggagcggcagcgttttgccaaggagttgcatgacgggctagggcctttgttaagtgttataaagatgttgctttccggtttcgaggaaaagaactcgtcggaggtaaacgacaaaatcaaggggaacttgaaacaggctgttgacgaggctatcacgagtgtgcgagagatttcagctaatattagtcctcatatattgaataattttggtttaaaggatgccacggagtcatttattcgaaagttgcgtccggctgaaggtattagtataaattttaaaacaaatattgataatcgtcgtttcgtatataacgtggaagtaatcatgtaccgggtgatttgcgagttgatcaataacacgttgcgacatgctaatgccagtaagattagtattgacttacagttacagggggatgttttatacttggaatacgaggataatggcatggggtttgacgtgaaacaggccgaaagtgatggcgggatgggattgagcaacatgcagtatcggttgaattcgggaaatggagatattaagatttccagcgagtcgggccggggaatgattgccagggcttttataaagtgtaagtaaatcttgttttatggataaattgagaatatatctggttgatgaccacaagttgttccgggaggggttgaagttattgctttcgactcaggatttcgttcgacatatttacgaggcctcgaacgggagggagtttattgagaatttgtcgtttgttgattgtgatgtcgtactgatggatatagagatgccggagatgaatggtattgatgccacgatcgaggcgatgaaaatgaaacccaatttgaagattattgttctttccatgtacggggacgagcagtattattacaagatgattgatgcgggggccaaggggttcttgttaaagaattcgggtatcgataaagtggtaacggctattcagaaggtggcagaaggggagagttttttctcggaggaattgttggtaaatattttgaataatatgcgtgataacaaaagtgaggcaccagaaaccgtggataatgatatttcggagcgggagttggagattttgtatcacgtgtgtaagggattgtcgaatcaagagattgcggacgaattgtttataagtaaacgtacagtagacaagcaccgggcgaatttgcttagtaaaacagggtgtcggaatacggcggcattggtgatgtatgcgattaaaaataatattatagagatatagatgaatgggatgatttttgcagccggtttaggtacccggttgcggccgttgacaaacgatcgcccgaaagctttggtggagttgaaaggaaagactctgttggagcgggtgatcgagagaatgagagaagtgcaggtggagcggttagtgattaatattcatcattttgccgatcaggtagaactctttctgaaagagaaaggagatttcggtatggacatcgttttgtccgatgaacgagatgagttactggatacgggaggaggggttttgaaggcccgggaattatttattccggggaaacccgtgcttattcataacgtggatattttaacagatttggatttgaaggctctcgttcgtcagcatgaatcacgtgaggcatacgccacgctggtcgtgcaacaggccgttgctgatcgggttttgaagtttaatcacggtattttgaaaggttgggagaacaagcgaaccggggagcagaagattgtggatgaaggcttttacggggccacggagttcaattactgcgggattcaggttcttagcccggagtatttaaagcatatcattcatcggggagtgttctctatcatcgatgagcatctggcacaggcaaaagaacatcctatcgagcttttccggcacgatggccgatgtctcgacttgggtactccggaggccataaaaaaagcaagtaattttagatttaatgatttatgattttagattgagagattaaaagaagggatagcttgtgtggctggaatttaaaatctaaaatcattaaatctaagattattaaaggcttctgtttcctgggattagttttatcctgttcgtgtcttcgaagaacctgaaatacatgtagagtttgtaattaaaatcaaacccgtaatctctgttcaagctgtaatcgatgtaactgttgattctcggatctccggcagcataccttctgttccattcgatagcatactggtgattcatactttgataataactttctgagtgctgactggccatgctctggtgacttgtcaaccaaaaatcgaatcccgaatcaaaaacaattaattcgtattgcgctgaatctttgatagcgcaacgcccctttttattttgggctacctctttttgagatgcacaggagaaaaatagggcaagcataaggagtaaaccgaatattctcatcatgtttgatttaagttatgcactactttcccctaaggtaagaaaaaaaaatgaaaaaacggctgattcagccgtttttatctttattttacagcgatggtttcaatttcaaccatagcacccatcgggagagcttttacggcaaaagctgcacgggcaggacaatctgtcttgtaatatttagcatagatttcgttcatatcagcgaaataagacatatctcccaacaggcaagttgatttaaccacgttgtcaaaagtatatccggcttcttccaggatgtaaccgatgtttttcaaacattgttctgtttgttcttttactccaccttcaacgaattttccggtattcacgtcaataggaagttgaccactgatgtaaagcgttccgtttgcttcaattgcttgactgtaaggaccgatggctttcggtgctttcggtgagttgattacttttttcataataactttattttatcaattaaaaaatagatttcagtttctttgtcgcgaatataacgaaaatcaagttgtgatttcttcgtgacgggtaaaataaaaaactaaaagttgagacatctgcctcaacttttagttttttatcctcaattacaagtatgattagtaattgtttttcttttcttcgaaatatgcttgagggtgagcgcaagcgggacacgctttcggggctgttttgccttcgtaaacgaaaccgcagttacggcattgccacaggatcacttcgtctctttcgaatactttaccggcttccacgcgagctaaaagcgttctgtaacgagcctcgtgttcagcttccactttcgcaatgttacggaacacggctgcgatggcggtaaatccttcttcttctgcaactttagcaaattccggatagaggtctgcccattcttcgttttctccttctgcggcagctttcagattttctgctgtcgttccgattacacctgcggggtaagatgcggtgatttcaaccattccgccttccaagaatttgaagaatctcttggcgtgttctttttcctgttcggcagtttccatgaatactcccgcgatttgttcgaatccttcttttttagctacactagcgaaaaaagtataacgacttctggcctgtgattcaccggcaaatgatttcaataagttttgttctgtttttgttcctttaatgctcataaatttaatctttttagtggtcatgttttgatagcacaataatacgacaatttgtttatcaaaacaaatatttagtttttatcagatgatagaaaatgcctataaagtgtaatttttcttatctctgatgtactaccgtatggctagtatcaagcatttttttgaattgaataatccgtgatccctaggctttcataagtcttcatgagagcttcatcatcatccgtgatcacgagtaacttatctccggtatgtagtttggtttttcctttggggacgcaatatgaatcgttctttttgatcaaggctaccaacgtgttatccggtaataccagatccattaatttgtcgccttttgccaacatggaaggaatgacttcaatttcagacatggcggttttaatttcttcgggtagttcgacgttaaagacgtttttgcgttcttcgggggttgacaaaccgagtagtttcgccatgaaactgactgttgttccctgtacaaccaaagaaagaatggtaatgaagaacaccacgttaaatattaatgatgcgtgctggatgtttgcgattagcgggtacgtggcaaaaatgatggggactgctccacgcagaccgacccatgaaacgtatgcccgtgccttggtggtcattttccggaaggggataaggcataaaaatacacttatcggacgagccagtataatcatgaataccccgataagaatgcttaacgctgcgaccgggagtaattctgccgggtttaccagaaggcctaacgtgaggaacatcacgatctggaataaccatgtgataccgtcgaaaaaggtggtaagactctttttgtgtaccactttatgatttccaaccactaagccggctaaataaacagctaggtaaccgttaccttttaccagatccgtgaacgagaaaatgaagaacacgaaagctaataaaagaacaggatataatgattgattgatgtttagtttattgatgcagtatacggccagtcttcccagtagataaccggatacggcaccgatactcatttgcatgatgaattgcagtatcgtgttacttaaactgttttctcctgattgaataattccgataagtaatatggttaacatataggccatcgggtcattactaccactttccagctctagcatgggacgtaggttctcttttagcccttgtcgtttggaacggagaatcgagaacacggatgcagaatcggtagacgacatgacggatgcgagtaataatgattccgtgaagtttagggtgacgaaactattttcgagattcgtgatgtagtagataaaataacccgtgaggaaggctgtaaacatgactccgactgtggcgagaacaataccttgtcctaaaacaggtttgatctctgccgcacttgtatccataccaccggaaaataatataatacttaatgcaatgactccgatgaattgagcagtttgcgggttgttgaattctattcctaaaccgtcggttccgaaaagcattcctactcctaggaaaaggagtaaggcgggaactccgaaacggaaacctgcttttccgacaacgatactgacaaataataggatagatccaataagtaatatatttccggcatttagaatcataagtgtttagttttaaaaggttatttatctagtttgagcctccttctcgcttggcgtggtttttcttttttacgaaagaacggccgctaggtttccgtcccctgccttttgacgagccatgttcgaatgctttcggattgtattctggtgctgctcccaagtgagtaggaagtggtattttataaatcgtttcttcgataaactgctctatgcggtaaaattttccttgctctgccccggagacaaaggtcaaggcaacaccttccgcgctggctctcgctgttcgtccgatacggtgaatataatcttccggatcatggggtacatcaaagttgattaccaatcctatctcatcaatatctataccacgggacacgatgtcggtggcaacgagtatatctattttattatttttaaaatccatcataacagattcccgctctgactgctccaagtcggaatgcatggctgccacgttgaattttttacgttttaaggtgaaggcgaggtcttttactttttgtttggaagaggcgaagattagcgttttgtgtaagaccggtttgctgaaaagttcttcgatgatacccattttctggctttcgtggcagatgtaagcggcttgcatgatggcttcgttgggtttggatactgccacgttgatttctaccgggtctcgaagtacattttgggctagctgtcgtatcttcgggggcatcgtagccgagaagagtatggtttgtcggtctttgggcagtttgttcacgatttgcatgatgtcatcaaaaaatcccatgtccagcatccggtcggcctcgtctaggataaagtattttacttgtgaaaggtctatatcactgtgttgtagatgtgcgatcagtcgtcccggtgttgcgatggcaacatccgcacctaagcgtaacgctttcttctgttgatcccataaacttccatccccccctccgtagacgacaaccgttgaaacggggaggaaataagaaaatccctcgaattgtacgtctatttgttgggctaattcccgggtgggagccataatcacagcttttaccgtatctgttcggttctcttctttgattagtctatttaaaatcggaagggtgtaagcagccgtttttccagtgcctgtttgtgcacaggcgattaaatcttttccctctaagataacagggattgttaattcttgtataggggttgtttcctgaaaattcatggcatctaatccttgcaacaatgaatcctctagttccagctcgtcaaatctcatcttttatatctctactattctttatttttaatgctgcctttttcctgttttaaagtacagcggcaggagaaaattacacataaatctatcatcgtgtcaatcccttctgtttgttgcaaagttaaaaaaaaaatcattttattcccattcactcgtggaatcttttaactccgggatgaacgaggacttgaatatgatatttttcttgctgatacgacgttgacggttgtagtcctgtaatgctttcaaggcgattttacccagtaatacgatcgcgatcagattggttatagccatgattgccatgaatagatcggcaatattccagacgagatccagggcggcgattgatccgaacatgaccattccccccacgataatccggtaaagttgtaaataggttttattcttggatatgaaaaataagtttgtttcacagtatgaatagttacccacgatggaactgaaggcaaaaaggagtatacaaatagcgataaattgtcctcccacgcttccgatctggtgggacagggccatttgtgtcagttggattcctttcaccgaaccatctagcggaacgtccgaaagtagaataatgaatgccgtacaactacaaatgattaacgtgtcggtgaaaacactgagggcttggattaatccttgtttcaccgggtgggagactgttgccgttgcggcagcgttcggggcggaacccattcccgcttcatttgagaaaagtcctcgccggacaccttgcatgatgacggctcctaaacccccgcccgcgaattgttcaaatccgaatgcgttcgtgaaaatagaaccaatgacatggggtaatgttccaaggtgcgtgaataggatgaaagcggcaagcagaatgtatgcaatagccataagggggacgatgattccggatataacggcaatccggtgtattccaccgaatatgaccagtagggtaaacagggttagaatgattcccagccagacacggtttgtcccaaagacttcatgaaatgccaaggtaacggtatttgcttgtaccgagttgaatacaagtccgaaggtaatagtaatgatgacagcgaaaagaatgcctaaccatcgtttctttaaacctttttccatgtaaaaggcggggcccccgatgaacgagcgttctcctttaactttatatatttgggctaacgtggattcgatgaaggcagaggcagaaccgataagtgcaataagccacatccagaatatggctcccggtcctcccagggctagggctgttgccacacccgccaggttacctgtgcctacccgcgaagcggttgcaatgcaaaatgcttgaaaagaagaaaccgaattcttgtggttcccgcttgctattccgtcaccaagcagccggaacatttcccggatattccggaattgtacgaatttactcttgaaggtaaagtagaccccgatacagattagcagggctattaatatataggtccaaataaaatcattggttgctataatccagttgtttaaattttccataaccgcatcacgtatttaaattacgagtaaaatacgtgatgaaacgggtgaaagttgtaaaaattagattatatttaaagaaaaagttcacaccattcttcgaaacgggcgactgtttcttccccataaaaagccatttctgcccggattttgcctagtttcttttcccgggttaaattggttttcgaataaaacttatcggcaaaagcgattagtttttcttcaagagtaacggggagcatatcccgttggggtaaaggtaaatgatttttcttgatcatttcaagtgatatgccggcccccgtgtgtcgttcacatactagggcatgacggggaaggccctcttcgcggagtagatcggctcccagataaccgtggcagatgtagggatgttctccgaaacaaccgatgtccggggccttcgtgagaaaaatcccgatgtcgtggagcatggcagcctcttgaatgaaggggatgtccagatccatttcgggatgtcggatagccagtgattgtgctttatctcgaacaagttggctatgtatgaggagggattgcccggcgagggaatccaacgtgtaatatttacgaataatatctaatgggtttatcattatttattcttttttttaaacttacaaatatagatgtttgttcgtgaaaatgtcatgattggttttattataaatattccgggctatttgtaacgggccccgatggttctccagtcaataattgtccatattttttcgatgtgttccggacggcgattctggtaatcaaggtagtaggcgtgttcccaaacatcgattcccagtattggggtgtaacctttcgtgatagggttcccggcgttattttcggacaaaatgtataatttcccttttttatcttttgcgagccatacccatccagacccgaataacgaggtggcagctgttgtgaattcttttttgaaattatcgaatgaaccccattctttctcaatggctgaaagcagtgctcctgatggggtgtgttccgctttcggggagaaagagttgaaatagataatatggtttaacgcttgtgcggcgttattgaatattgccccggtggagttcttgacaatggtttcgaggtcacaattttcgaatggtgtccccacgatcaatttgttcaggttatcaatgtaagttttcagatgtttaccatgatgtagttttatggtggcttcactgataacgggagtgagggcattcatttcgtaaggtaaaggtgggagggagaatttctctttcgatgtttgttgttgagcccacaatgtcccaattgttgtgaccagaagggcaactatccatatctttttgaaagcttgttttgttttcatcttctatttttcttttaaagtttatgttatttacgaataaaagtacattttggttattaaaaagtcctctaacttttataattttgaccgtttttatgaaagagagcggtggggagaacaaatgtgcaatttcaaaatttgagtgtatgatcaggataaatgttacaattgaggtgaagagcgaggttcgcgctcaagttatggaacttttgcgtgagatgtctgaattgtcaaggcaggaaaaggggtgtatcgggtacgaaatacttgaaaataatcgtttggataacgtgttgatgatcatagaaacgtgggaaaatgaaaccttgctggctgttcataaaggaagtgatcatttcgtgagaattatcccgcgggttcgggaactggcaacggaaatgtgtagccagaagttcacggatatggcagccgtgaacgaggctatcgtgggacgtcgtagcgtgagaaattatgccccggataaggtgtgtgtggagacaatcgagcgtttgttgagagcagccatgtacgcaccttcggttaaggatcgccgtccttgggaatttttcgtgatcgaggagcgggagcatcttgatgtattggccgggactttaccagaaggacttgctctaagaacggccccagttgcgatactggtctgttgtaatactcgtcaggctgggcttgacggggggaactggccccaagagctgggtgcgagtgtccagaacttgatgttgcaggcctacggggagaaactgggaaccacctgggttggaatttatcctcagatgcaccgggttcatcaagtgaaaacattgtttcacttgtcatcggaattcgtaccgtttgccgttgtggcaatcgggcgatcggcagacgagcaatcgactgttcccgagcgttatgacccttcgaaaatacattttatcactcgttaaaaatattcgtaaaaaaatcactaaaaagagaaccttttcatgtttcagttcgttaaattaggtacgaacataaaaattaaagaatatgaaacatgaaacttcaaatctactgatagggctaggtattggcgctgttgtaggagttgctgtaggttatttaatggtagctgataatcgtaaaaaattagcagaagaatttgatcatgccgtgtctaaagtgaaggaagaggtgaaggacgtttattcaaaagcaaaaaacaaggccgagaacgtgaaagaacacgtgaccgaggatgtcaatcatgtagctgaaaaggttgcggggaagactgctacggaaacgaagtaatagcttatggagaatattgccgagaagacgtttgctgagttgaaagaggatatttcaacttacgtggaattgaggctagagctattaaaattgaatacatacgaaagggttgccaagacaatggcagtcttttcgtatggtattgttttggttttattggctttttttgccattttatttttattcctggcgttaggttttttcttgggagaattattaggtagcatggctttgggattcgtgttggtggttgggatgtacctgttgttgttcgggataacgatgtttttcaagagaaagatcacgtctaaggtgatgaacgagattataacagcaatgatgagtaaggatgaaaaagataatgaagagacaaccgaccccgctggacatgttgatggcggaacagcgccgggtgcgtgagagttgccgggtgcaggaacagaaaataaacgaggattttaagttcatacatgatcattccgggcggattttgtttgccgggatttcttctttgtttttttctaaacgacgagaacctgtcgagaatgacgagaagaaagaaacggaagaacaaaatccgatgttgggaatgatgtttaaaaatattccacctttattgtgggaggctgctttgccaatccttttgcgttggggagtgggacggatcggtaatttgtttagaagacgagccaaacgataaaagtttaaaatttagaatgaaattaaaaagcgtggttcccgtgtggctgggatttaaaatttagaatctaaagtctaaaataaacgacgagttttgttatctttgtatcctctattcgggttatatttctgaaaataatgggtcaattacgaccattccatcaagaggtgttttattttaatagaaggaggataaagagttatgtcgagtattaatgcatcgcaggttttggagacaaagccagtcgggaagttattgttacagtattcaattcctgcaatcatcgggatgacagtaacgtcgttgtataatattattgatagtgtttttatcgggcatggcgtgggaccgttagccatatcgggtttagcgatcacttttcccttgatgaacttgattattgctttttcgactttggtgggtatcgggggtgcgacaatcagttcgatttatctcgggcagaaagacacggagaaaacgaattctgtcttggggaatgtgttattgttatgcgtgattaacggattttgtttcgggggattgactttgatattcttagatccgatcttacatttctttggggctagtccggcgacgttaccttacgcccgggattttatgcaggttattttgatgggaaatccgattgcttttacttttatcggtctgaacaacgtgatgcgagccacgggatacccgaaaaaggccatgttgagttctttactgaccgtatttgccaatattattctggccccaatattcattttccatttggattggggaatccggggagcagcattggccacggtgatctcccagtcgatcggtttaatctggattgtgagtcactatctgaataagaacacaacgatacgttttaaaccgggaatatttaaattgaaaagtcggattatcatgagtattttttccatcgggatgtcacctttcttgatgaacgtgtgtgctagttcagtggtcattatattgaataatagttttatgcgctatggtggtgacttggctatcggggcctacgggattgtgaaccgggtactgaccttgtttatcatgatcgagatcggggtgacacaggggatgcagccggtaatcgggtttaattacggggcacttctttttgaccgggtacgtaagacgttacgttacgctttgattgccggggtttctatcatgacgtttggttttttgttgagccagttgtttccctcggcaattgtggggatgtttacggataatcatgagttgatggaattatctaaatttggcttacgagtgacttgtttgatgttccctctcgcagggtgccagattattatcacgaatttttttcaatccattgggaaagctaaagtctccatatttttgtctctttcccgacaattgttatttttgattccgtttttgttaatattacctcgtttctgggggattacaggcgtgtggagtagtatgcccatggcagattttatttctttcatgaccacgataggcacgttcatgtattttgtcagaaaagggcttttgtttaaaactaataaaacaatagaatgagaatagttcagttattatttggagtgtgggtagggatatgtttccttgcgtgtggagagaaatcggattcttttacacgggaggaacgggaacgcatcgggcatttggaagaagagggtattatgcctctgtttcttgtaacaaaccgggtagattcattgttcctgcgtttgcaggcaaaagaattcgggaaagaagatgtcgagacggaaacctttcgtgttttaagatcacgtatgcttgctaccgtgagggattccttgaacgagggagtgggtattgcggctcctcaagtcggtatatcacgtcaattagttgccgtgcagcgtttggataaaacgggagagccttttgaattttacgtgaatccggaaatcgtttatttctctcaagatactgttttagggcaggaaggatgtttgtctattccgggtcggatggggtcggtatatcggtctaaagagattgtcgtgcgctatcgggatgaactttctttcgagtggagacaagatacggtgagagaatttacagctcgcatttttcaacacgagatcgaccatttgaatggaattctgtacacggattatcttccgtgagttttaaggatataaataataaacgggttctcgattttcgggaacccgtttattaaaaaaaatgtctattcgtcgagcgttacggctcctgaaagagccacagcctctttattacggaaagtcatgatcggtgatacagcctcgtaagctgacatgatgtactcgaagagttgtgccgtcaccaattttccgcgttcagctaatgagagttttaatttaatccctgtgtcctcgtcctctgaactttgtaattcggaaagttccccgaattgtttggtttctaatagatattgcacccgatgcaattcatctgattcgaaaaataactcgtaatttttctcgtcccggttcttactgaataaagttgttttcatcttcttgtgtgttgtgtgtgtgtatatatatacaacgttcccagcgttgctctgtttttttatatcaaaggataacacttaatcgtgtaaacatcttgtattagtacaagatacgtgccatatatacgtgaggtttcaaataattaacaaacagagttcatggaaatatcgcttggggtgcgatatgaatacttcgtgtattcccgtgtgatctgcctccttgttaatggtaagactttcatttgcctgtttgtagaccccgtccagcatcacccgaacccggcagggtagctctgatcttgtcatgctgacaagtgaagtccggattaacgggctgggatattgattctgaaaatcaaggctttgtcccttgtttatggagtcatgtaattgtgctaattggtaggtcaccgctgtatgttgagattctgtcatgatcaatcccatggcaacattgctgagttgtgttaccacaagaatgaggatactatgtaatatgaatcttatcatacttagtgtttgtttcaaatttaaagaatataaattgcatttgcaatgtttttcttcttttttctatcgatctatataaaaataagtatttttactaccggaaattgtttttttgtttcgaaaaggttacaaattaacatttcatataccccatcattctacaatttatgtggatttattactcatttataattttttttacgatagaagttgaaaaaagatatagaataataaataattttggaactcggattgcattataaagcgaacttgatggaaataaaaagtaaacaggaaaattttagattgcgggagtggaagttgacggatatagtatcattagtaaaacatattaataacgagaaaatatggaataacgtgcgggatggacttccatacccgtatacaatgttggatgccgataagtatattcggatggtacaggcccagccttatgtccagaattttgccatagaggttgcgggggaggccgtgggtggggtagggatcgtacccttgacagacgtggagcgctttagtgcggaggtcggttattggctgggtgaagactactggggccgaggaattacgagcgaggctgttgcgttgctggttgattacgtgttccggaaaaccgaaattattcgtttgtttgcctctgtttacgagtataatccggcctcgatgaaagtgttggaaaaagtcggttttaccagacaggctattttgcgtgatgcagcgattaaaaacggtcgggtgatagatatgtattattatgacttgataaagcgtgaaatatgaaaaacgggtgtcatattgtgggaatactatttattttttggatgatatatccttgaaatacttgtctcatgcttttgagttgtctccagaagtgattggagatgttaaagaaaacaatggattacaaacaaagaattcccgggagctaaagaaagaacgaggtgggaagtagtggtatttgccttgagatatagtgagatccaaatgcaagattaccgtgaaatctcgagatagactaaatattaattgacaaataaaaaagaccgcaatccatgttgcggtctctttgtatatttagaaagtcttattaccaggcgaacataggtctgtcgctcatcatggcgtttacttctttctttacttgtgcgattacggtttcatcgtccggggcactcaatactctgtcgatcatgtccacgatgataggcatatgttcttccttcaaaccacgggtagtgattgccggggttcctacacgaagacctgatgtagagaacggggtgcgggtatcgaacggaaccatgttcttgttgatcgtgatgtcagctttaacaagcgtgttttctgctttcttaccggttaattccgggaatttggttctcaggtcaatcaacatggagtggttgtcggtaccaccggaaacaactttgtaacctttttccacgaatgctttggccatagctttggcgttagccagcatttgtttggcgtattcagtgtactcgtcagacagtgcctcaccgaaagcaacagccttagcagcgatcacgtgttcaagcggtcctccttgttgtcccgggaacacggcaaagttgattacttgtgacatcatcttgatctctcctttcggagtttttaatccccaaggattcgggaaatctttcggaagaaggatcataccaccacgaggtccgcgaagggttttgtgagtggttgtggtcacgatgtggcaatattccatcgggttgttcaataaacctttggcaatcaaacctgcaggatgagacatatcgcacattaacaaagcacctactttatcagcgatttcgcgcatacgtttgtaatcccagtcgcgagaataagcggatgctccagatacgattaatttcggtttgtgttccaaagccaattgttccatctcgtcatagtcaaccattccggtttcttctttcacgtggtaagctaccgggtgatagttaataccagaaagattcactggtgatccgtgtgaaaggtgaccaccatgagctagatcaaggcctaggaaggtatcgccgggtttcatgcaagcgaaaaacacggcagcgttagcttgtgcgccggagtgcggttgtacgttagcgaattcagcaccgaataattggcaagcccgatcaatagccagttgttctgtctggtcaacgatttggcaaccaccataatagcgggccccagggtatccttctgcatatttgttggtcaggcaagatcccatagcctgcattacttgctcgctcacgaagttttcagatgcgattaattcaagtccttctttttgacgaagacattctttgtcaatcaggtcgaaaatttgagtgtctcttttcattatttagatttttaatactataaacgtttataaatctaggccaaaattatactaatcgtgcatgtaaacaaagtatttgtcaactttttttcatctcttgttttttaattttcgaatatttgtgtacgtttgttgtgtataaaatttatttgattatggaaaatccctttagcgtagaaaaaacggttagaccgacttttctcactgtactttgcatcttgacatttgttggtagtggttggggcttaattaacaatttgttccagttagttatgtttacaccggagcgcttggtcgcccagatccaacagataacgaacatggcgggagccgaagcccaaccttcgtgggtttcttctatcatgagttcgtccttggaggtgttacaaactaccataatgcacgggaaagcaatctactcgttatcagctttgtgtgccgtgatcagtttgatcggagctttcatgatgtacaagctaaaaaggaatggtttttatttatacgcaatcgcacagattggccagttgtttatcctgccgatttattccggttggaatagtgtcgtgttgatttccatggcaatgtccggattcttggcgttggtatttatcatcttgtatggcttgaattatagtaagttaaaatattgataatttgaacgtatatccctttctgaaagggatttgtgcttgatttgatatatgtcattaaacgatcgtttattgatatgtatttttttgttgtcggggattcaggaaaaagaattaaataattgaaaatgaatttttaagaaaatgattaaaaagtcgatttaatccgctttatttgtaactattatatgatcatttcttaatacaatcgtttatgatgtttgatatttctaagtcagtgggttacactgaaagaatgaattatttgaagagaggttttctgttttatatgtgctcctcttgtatgttactcgttcaatttgcgatctatctcgtgaatagtaattattgggaatccttgaattttgttgggggcttttattatttgatggcggcattggggcaagcttttcttttcaatttgatcccttgggttgttttatatcttcccttcacgtggtggcggcagatgcagaaggttggtgccattctgttcacttgtgctatatttttattgaacgtgctggcctatctgaacgggattgttttccagttgtataaatttcatatcaacggctttgtgctggatttagcttttggtgggggaggaaaccaagtattcgtgtttaataataccttggtcttgcatggggttcttatcggattacttattttgttgtttactttagcggtcgtttttatcgcttaccggtatgcccggtatgttacttctaaacaggtgaaaatcggtatttatctttttctattctcctgtattgcaccccagttaacccatgcttgtgctgctgcgtctaacttaaattcgatcatggaagtatcggcttgtttaccgcaatattatcctttgacagccaaccgtttgatgttaaagttgggggtgatcaaaaaggaggacttgtatgtgaataacccagataaagggaaggggcatagtttcgtgtaccctcttcatccgctggaaaaagtggatagcgtgaaaccgttgaatattatttatcttattctagattcatggaatttcaggacttttacacgggagtgttgtcctaacatccgggcttttggcgatcgttctgcagtattcaatcgtcatttaagttccagtaatggtacgcggggcgggatattcggtctgtttttcggtatttctgcaacatactggcaagattttgaacgtacgggagtacagcctttgtttatcgagaatttactggaaaatgggtatgatatagagacgttcgccagtgcaacgcttgttaatcctcctttttatcgtatcgtcttcggggatgtgaaagatattcgcaaggaaactccgggagcaacaccttttgatcgggataacaggatcacggaagattttttgaattatctggatgagcgaaaggatgtgaataaaccgttcttttcttttgtattttatgatttgttgcatgcaatagatattccggctccttatcgtaaaaaatttcagccctcgtgggactatgccaattatctggctttgaataataatttggacccggaaccgttttttaacctgtaccgtaattgtgcctattacgtggattcgctcgtgggaaaggtggtgaataaactggaggcgaacgggttgttggataattccgtgattgttattaccggggatcatgggcaggagtttaacgagaataagaagaacttttggggacatggaagtgatttttcgaacgcacaggtgcatgtcccgtttatcctgtactacccggggaacactcccggcgtgtactcgcacaggacgtctcattatgacgtgacaccgactttaatgaaacgggtgctgggggtaaagaatcccgccgaagattattctatgggaagagatttatttgatcccgaacgcccgccttttcatctggccggagatccgcagaattatgcttttattatggataatgtgatttacgagaagaaagtggcggggaatatccaagtgacggattctttgttgaatcgtctttcccggaatcagataaattcgggattgctgcttaaagctatcgaattcaagaatatgtttttgaagaagtagggagtaaactcaaaacttgctggtattcatttgaaataaaaaagctgctttcacaagcagctttttttatttttattatcctccgaagttatcatacatcacgttttcgtccggaactccaaggtcgtacagcattttggttactgccgagatcatcataggaggaccgcagaggtagtattcaatatcttccgggttttcatgattcttcaaataattctcgaagattacttgatgaacaaagcccggtttgtaagccactccagctgcgtcagccacgggatccggtctgtcgagagccagtgtccagtggaagttcgggttctcttcttgaatcttgttgaactcgtccacgtaaggagcttcttgcaaagcacgtgcgccgtaccagaaggtaactttacgatcggtgtgcatcgtgtggaagaggttgaagatgtgtgaacgcatgggagccataccggcaccaccaccgatgaacatcatctcgttgttcgtgtctctcaagaagaattctccgtaaggtccggaaatacttactttatctcccggtttacgagagaagatgtaagaagaacagattccggggttcacgttggcaaaaccaccgatagctttgtcgaacgggggagtcgcaatacgaatgttcagcatgataatgttaccttctgccggggagtttgccatggagtaagcacggtaggttgcttccgggttgtgcattttaagatcgaacatcttcatgcgttcccaatcagccttgtatttctcgtcaatatcgaacgtcttgaagtcaacgtcgatagcaggcacgtcaatttggatatatcctccggatttgaatttcaggttttcaccttccggtaattttaccacgaattctttcaagaaagtagagatatttctattggaaaccacttcacattcccattttttgattccgagaacttcttccgggatgtgcatttcaatattctctttcacttttacctgacaagccaagcgccagttgtcgtgttgttgtttataggagaagaatcccgtttcggttggtaggatagaccctgctccggattcaacctgacaacgacacataccacatgaacctttacctccacaagccgaggggaggaagattttgttgtttccaagggtggctaacagcgtggaccccggttcggttactaattccttttcgccatgattaatatcaaccttcacctctcctttgggagtcagtttggccttggcgaacaaaagcatgcctacgagaatcagtgttacgatgaggaacacgatgacacctgacatgacaattgttgtatttattgctaataacatcattttaattttagattttatgattttaaattttaaattgaggactccagagaaatttacaatctaaaatttacaatttaaaattactttacaggttaattcccaagaaactcatgaatgaaatagccatcaatccagtcacgataaaggtaataccgatacctctaagtggggcggggatgtttgaatatttcagtttctcacgaatagcggcgatacccacgatagcgagtaaccaaccgatacctgaacccaaaccgaaagccgtagcctctccaatgttagcatatcctctttcttgcatgaacaaggatgctcccatgatagcgcagtttaccgcgatcaacggcaggaagattcctaactggttgtaaagtgctggggcaaatttttcaactaccatttccacgagttgcacgatagcagcaatgactgcgatgaacatgatgaaactcaagaaactcaaatcgatgtttgcagcgctttcaccgagtaaccagcttaaagctccggctttcaacacgaagttgtccagcaaatagtttaccgggacggtgattaataatacgaatacaacggcaatacctaatccgaatgatgtcttcacggtctttgatacggcaaggtatgaacacatacctaggaagtaagcaaagatcatgttatcaatgaatacggaccgtacaaatatatttaatagattttccatatcgttatttcacttttagttgactatttctgttctattaaatccttgttcttggaacggtgaacccaaatgatcagacccaccagcatcaatgccatcgggggaaggatcattaaaccgttgttttgataaccccaatcgtagaatatttgtgggattacttttaccccgaacaaagttccggatccaagtagttcacggaagaaagccacgataacgaggattaaaccgtatcctagaccgttaccgataccgtcaagtaatgaaggccacggtttgttgcccaaggcgaaagcctcgatacgtcccatgatgatacagtttgtgatgatcaacccaacgaacacggataattgtttacttacctcgtatgcgaacgccttcagtatttggtccaccatgattaccaaagcggcaaccacgaccagttgcacgatgatacgtatgcgtgtcgggattgtatttctcagtagcgaaagaatcacgttagagaatgccgttacggctgtaaccgaaagagccatcacgatggcgggttctaattttgcagttacggcaagagcagaacatatacccaatatctgtaccagaacagggttatttttgctcaaggggccgagtaacaagcctcggttcttagctgaaaataatgtttctttatcgctcattattgtatttgttttaagaattgttcgtaacattttaagtagtcgccaatcatggtttcaacaccttttgaagtgattgttcctcctgagattgcgtctacttcatgagctccggtagcgtttccacctttttttacagtgatggcttttaacgtggagttctcaaaaatcgttttcccgctgaattgtttttggaaaaagggttgagtgatctcagctccaagtccgggtgtttctcctttgtgatcgaacagaactccgtaaaccgtgttcttatcttcgtttaaagaaatgtaaccccaaacaggcccccaaagcccaactccataggtcggcaggatatacttgatggccccgtcaatgtcggctacgaatacagggaatttgacatctgctaatgctttatcatctttgatcgtttctgaaagcaattttccgtctttcaatgcttgttgaagttccggatttttaagtgctttctgaagtttcttaccttccgtcgggatgtccacggcgaaggcgtttccttcaatagcctcacccttgtagttcagaatgaattgtttcgtgatgattttgttgaacaattcagccgaagtctccggggtagaactaacatttacagaactcagaatgttttgtctcttctcgttctctatattctcatcttggtatggctttagtgaaagagacactatcgccagaatggctgcaactacgacaaccaaaacgatggaatagataaaggtatatgtatttccttgtttgttcatctcgttattaattttaaattttagattttagattttaaattcgtatcagaataaatttacaatttaaaatttaaaatctacaattgcatcgctttagctcttttcagtctgcgcttgatgttaccttgaactacaaaccaatcaataagcggagcaaaggtgttcattaacaggatggctaacatcattccttccgggtaaccggggtttagtgtacgaataaggatggccatgacacctaaaatgaaaccgtatatccattttcctctttccgtttgtgccgatgttacagggtctgttgccatgaatacggctccgaaagcaaaaccacccatgattaaatgagtaatcggggttattgccgcatacgggttgcttgcgggtaacgtgtagttaagtaataaagccatacagtaacctccgatgaaagtggaaagcatgattttccaactcccgattccggtggcaattaacaagatggccccgagcaatatacagaaggttgatgtttctcccacggaacccgggatcaatccccagaacatggaagacatgtcatatgtcgtgggtagaccttgggcagcctcggcaagcggggtcgcttgcgagaacccgtcgggcattccggcgatccatactttatcccctgaaatcatggaagggtaggagaagaagaagaaggcacgggctaacaatgccgggttccagatgttcattccggtaccaccgaagatttctttaccgataatcacggcgaaggcggtggaaactcccaccatccaaaggggtgcgttgatcggcataatcatcgggattaataaaccggatacgaggaatccctcgttgatctcgtgtcccctgatttgtgccgcggcaaattcaatacccaatccgaccacgtaggaaacgatgatcatgggtaacactctccacagcccatagaagaataactcgaagaaatcggtatcggccagagtacccattgcgttgaaatgctggtatcccacattatagataccgaataaaagggccggaataagagccagtacgacaatgatcatggttcttttcagatcgatcgcatcccggatattacagcccgaagatgtcgtgcggttaggcacgaaaagaaaagactcaaaacccgtgaaaacagaatgcaacttgtatagtttgcctcccttttcaaattttggcttttgcttatctagatagttgcgtaaaaaattcatctttataattttaaattttagattttagattttaaattttgaatcgtgtcccatcaaggaattgacaatttaaaatttgcaatttaaaattagcttagttcttttatcattaattctatacctttttctagtatttcctgaaccggggttttagaggtacaaacgaactcgcataaagccatatcttccgggacaacctcgtacattcccagttgttccatcttgtccaagtcctctgccagtactgctttcagcaggtaaacgggaaggatgtccatgggaaggactttctcgtattgtccggtcaccacgaatgctctttcttccccgtgatagttggcatcaagagtgtatttcttgttcgggcataagaaagaggggaaagtttttgatatggagaatttgttgaaaccgggagttgcccaacccaaaaattcgtaattgtcaccttcggggataacggttaccatattattatagtatccgaggtagttctcttcagttaccttgtaccccgtgagtacgttaccggaaataatacgttgatgaacttgatacttcagtttcccattcacgatacaaccgatttttgcccccagaatggttttgtaataagcaggcttttcaacttctgaacctgcgagagcaatcgtcttgcgggcgtcgaattttccggaagtgaataatcgtccgataatggcaagatccatagcatttaccacccaaacgatttcccctttgttgattgggttcagatgatgaatctggattcctgcatttcctgccgggtgtggtcctgcgaaataatttacatccacgtttttcagcttggcgaacacggatgttgaaggtgtcccttctttcaagttcaaattcgcatttttaccgcataatttttttaagcaatcgattccggattggagtgcggttaattcatctgcaagagtaatgtcgaaatccggagcgagaggagcggaatcaaaaccggacacgaatatcgccttcggcatatcagccggggtagcgatgatgtcgtacggacgttgtttgatcatgggccaaacaccgctgtcaagtaatttttcgatgacttcgtctctggaaagtttgttcacatctgctgccccgaaatccttgtattggatttcggcatccgctttaaccacgacctccagtaacttccttctttctcctctgtttacggtttcgactgtaccgctaacaggtgatgtgaatttgacttcaggtctgtacttgtcgataaacaacacgtcacccgctttcacttgatcgcctgcctttactacaagtttgggagtaagtagacggaaatctgttggttttaccgcatagaaatcacatctctcgatgtttttcaccagattttcggcttctccttttaacttgatatcaaggccttttttcagttttataaccttggacattgttttattatgtttttgatatgtagataattatttctaattcaccctgtaattgtttattttaaaaatacgtgcaaatatataatcaattattgaatttattcagtaattcaaaagttaattcatccctttagatgtttttttttactgctcgatttctcaaataaatgaatgtttgaatgaggtgaggtttattgatgaaattcccttttggcatggtatttgtagaaaaaatgagaaaactaatgagtactaattatccaaaatggtggttgaattatgaaaggaatatttttttgttgtgtattagcaatatggatgacttcgtgcaagtcggcaaaggagagcgtttctctgactggggtgaaatgggttgcggagagtttgaacgggaaagagattaagttcaaggaaggtgggagcgaggtattcatcacgcttgaaagcagtgataagaaaatatttggaagggcgggatgtaatcgcttttttggtgtttacgaacaaaacgagtcgcaattgacttttagcgggatgggtgcgactaagatggcttgtcctgatatggatattgaaacaagttttttcaaggttctggaagatacgaagagttttatcataaagaatgataagttgacgctgaaagatagtaataacgtgattgcggtatttaaagcgcaaaaagaaactcctaaagaggaataagacaaagtttatagtttgatttttcgtgtagtaaaaagagtgtcaaaatttatttttgacactcttttagtttataaggtttgtaaagtccataaggtttataaacttttttaaatcacttccgcaacaacaaaagtacttcccccgatgtatatcatatcccggttgctggcggcttcacgggcggcttgataggctgctgcaactgtcgggaaggttttcccgtgaagatgatttactcgggctttctcggctaaagttttctcatccatagccctgggtatggatgctttgcagaagtaataaatagcgtctttgggcaggatgcgcaacacgctatccacgtccttgtcgtttaccatcccgatcacgaaatgaagttgttcgtacgtgcaggtttttaattgggcgacaatctcggttagtccatcgatgttgtgtccggtgtcgcataccgtatagggggtttgtgataattcttgccaacgtccaagcaatcccgtgttgcgaattgtgttggctatgccgttgtatatgttttgatcggagatgtgcaagccattgtttcttaggcttagaaccgtttccagaacggccgggatattttttcgttgataaagtcctttcaggtccgcttgcacgggggcaaacgtgatcccgtttttgttttccagccggtaggtgtttttattatctcgtgttacttgccagttttcggatgcaaattcaagggtggtttcacactcttttgctttttcaataaagacaaagtcactggcggggtctttcgtcccgatgattgcgggaataccgggtttgataatccccgctttctcgtgtgcgattttttctagcgtgtcaccgagaagggccatatgatcgaatgaaatattcgtgatcaccgaggccagaggggtaatgatattcgtggagtccagtcgccccccaagtccgacttcgataacagcaatatcaacttgttgatccgcaaaatattggaaggccatcgctactgtcatttcgaagaaggacggtttgatcccggcgaaaagtgatttattctcttccacgaaattgatcacgtattgttctgtgatcatctccccgtttattttgatgcgttcacggaaatctttcaaatgcggtgacgtgtatagcccggttttatatccggcttcttgtaatatggaggccagcatgtgagacactgaacccttaccgtttgtacctcccacgtggatggtcttgaattgtttgtgcggagaaccgaagtgttcatccagttttaacgtgttgtccagattggctttgtatgcggccttaccttctctttggtacatgggaagctgggcaaataaccattctaatgtttccttgtagttcatgtatattcttttaaataaactggttcattctgttgagcgggcaaaaatagtaaaaatatacggtgggtgtaagttcgggctttgatatttcttttcagtgaaaaaagcgtgtgtttgaggatgaaaatattaataatgcataaaaagtgtatagcattaatttcgtacaaatatggaatgaattcgagaaatgtaggctgtacggtgtgtttttttttcgtgcatttcatttgacgagtgtgaggcgtgaagtgaagggagagtgtgtgctggtggagatgatgtatgtatttgacgaaatttcactaactttaaacccggaattagtatgtcatgataaaaacgtactaattatcaaagtcacgtatgtgttgcatttgggaaaataaaaatgaaatagagatatgggaaaggaagtacaggcaatcttgaatcttttgagtgaaggtgtcatcgtcgaggggaatattcaaacgccaagggatatacggattgacggcacgcttgtcgggactgttaatgctgacggtcgtttgatcctcggaccttcttctcatgttacgggaaaagtcaattctccgaatattgatgtgttcgggagcgtggagggggatatagtttcaaccggtattgtcgtgttaagggcaaaatcaaacgtgaagggaacgatctccactgcaactatggttgttgaggccggggcggtgtttaacggggaaagtaatatgattgcgtcgaccaaaggtgttgttcgcccggaaacgacagaaaagaaataatgcaaattctttgtgtcggatttcaccgaaaagatataactttgcagaaattatagaacgttatatggctaatgatagtaaagttgttccagttccggttttgaggcgtatgcccgcttatctttctttcgtgaaaacattgcaaaagcagggagagaagtacgtctcgtcaacaagaattgccgaatacatggaaatagacgccacgcaagtgacgaaagatctgtcgcataccggtatctccggtaaaactcgtgttggttacgaagtggataatttcgtggagatactggatgactttcttggtttcaacaagattaataacgcttttctagttggggcaggttcgttgggatgtgccttgttgcaggataagggattgagaaatttcggattgaatatacagaaggctttcgacgtggacaagtctaaaatagggacaaagattaatgatgtcgagatttttcacgtggaccagttccggggaatgccgggagaatgtaacgtggcgataggtattattaccgttccggctgaatgtgcccagaacgtggccgatttaatggttgcctggggaattaaagctatttggaattttaccccggcccggattaaagtgcctgctcatattgccgtacaaaatacgacaatatacacgaacttggccattttatttaataaattgaacgggcaggaatagctttgtcaattttagatcccagctgcacgagacggcgctttttatctttttagttttccaattatctccttcggctcccccttgcacgggggggagagttgattgtcaagcggcttcccctcattttttctcatgctaaaccccatgcgttacgttttttaggatagtgtccccaaaagtgtgtaaattccaatttatttatttttgtaatagaacagtcaaaaataacttattatggaatttaca

SEQ ID NO: 10885 - DNA, 1188 bp, Unknown
  gut microbiota DNA sequence
gtacttgacgtaggcttccataccgttttctgacatgaagcggtaattctcctcagaaccgtagccggaatcagcaaccaccgtatgggccaacctgtcatatctgcttgagaaggattgcaggaaaggtatcatggtcagtgtatccgtagggttcgggaagagtgcaaaatcggtaatgaactggttctcggtgccgatctgaaggttgtaaccgggctttgtctggccgttacgcatggcatcctccttcattctcatgaaagtagcgtcattgtctgttttggaataggagttcctgtcctgcagcgtgtccggatggttgtcgtattcctgcagcttgtccctgtgctcttccagctccttgagctgtttgcgtttctttttcagcgcagccttttcctctttcgtggagggttcaggaacctgttcaagtgcctgacgcaattctcccgccatttcggtcagcatggccggagtgaattctatttcctcattgctttccgaggagttctcctgaacgatgacatcgtctatctgtcctaacaggacatgtatcttcttcatcagacgttcacggttccgctcaaccgtttttcgccagacgaaagtatacttgttggctttggattcaatctttgtcccgtcaatgtattccacattcaaactgatgaagcctttggaagagagaaggagtacggtttgggtaaacacctcgttgatttcattcttcatccggttgcggaaacggttgatggtgatgaaatccggtttctcatatccggcaagccagatataatggatgtcacggtgaaggagcttttcgattttccggcaggagtagacgttgttcatataggcatacagaacgaccttgagcatcatcctgggatggtaagggctgcggccgctttccttgtacaatttcctgaaactttcaaggttcaggctcttaaccagagcgtcaaccatgcgcaccggatcgttctctgcaatatcctcatcaattctttgagggaaaagcacggtttggttgggattgtaagggcgaaaatgtatctttggcatagtataaattgtatgcttaaagatacaatatctttaggtaataacaaagcccctgcttgtgaaagtcggggttttgtgcataaaaaaagaaggtgtgcattttgacacacctcctataat

SEQ ID NO: 10886 - DNA, 1342 bp, Unknown
  gut microbiota DNA sequence
cggaatttgctccggtcacgattatgatgtttaataatgtttattttcctcgaatagccgtgattccgggcaactctttcccctcgatgtattcgagtagggcaccacctccggtggatacgtagctaactttgtcggctaaaccgaattggttgatggcggcaaccgagtctcctcccccgattaaagagaatgcaccatttgcagtggcttttacaatggcatcagcgatagctttggttcccactgcgaatttcggcatttcaaatacacccacgggaccattccaaaggatggttttggattgctcgatgaccttggtgaaggaggcaatactttccgggcctacatccaatccttcccatccatcgggaatttccatggaaggaacgatttgggtgttggcgttattgtcgaaagcgtcggcagcgacagtgtcggttgccaatacaagatttacacctttttctttggctagtttcatgatttcaagagccaggtcgagtttatcttcctcgcagatagaattgccgacatgaccgcccagtgcttttttgaacgtgtaagtcattcctccccctaggatgaggttatctaccttatccatgaggttcataataatgtcgattttggatgaaactttggagcctcccatgatggccgtgaacgggcgggtggggttgtgcattactttatccacgctttccaactctccttgcatgacgtagccgaatagtttgtcattcgggaaaaatttagctatgactgcagtggatgcgtgagctcggtgggctgttccgaaggcgtcgttgatccaaacgtcggctaaagaagccagtttttgagcgaagttctcgtctcctttttcttcttctttgtagaatcgaaggttttccaacagaagaacttctcccggtttcaggtctgctgcagcttttattgcgctttccccgatgcaattatcggcaaacttcacgggtactcccaacagttcttccaagtgtttctggatatgttttaatgaaaatttgtcttccggtccatttttcgggcgtccgaggtgagacatcaatattacggaacctcctcccgccaacactttcttgatcgtgggaatggctgcccgcatacgggtgtcgtccgtgatctcgaacttttcatttaaaggtacgttgaagtctacgcggataagcgccttcttgtttttaaagttgtaattatcaattgtctgcatagcaattgttattttaatgagtaaattacttaattaaaagataaaggtaaggataaaattatttaaaccaaaaaatatacagaaaggaattttgtgtgtaaaaccagc

SEQ ID NO: 10887 - DNA, 1075 bp, Unknown
  gut microbiota DNA sequence
accataaaaaacatttgatcatcatttattcctttaaatttgttctattggtctttgtgaaagcgaaattaattatatcctcccaaagattacctttctatcgaaatcttaataaatatttaacagattcagattatttaaactaattatcttctacacaaacgtttgaatatgctacaaaacataacctctgacgccacgatttcattttttatagctatttttgcacgtgtataaacatgctaatattttcatttactttaaataaataggacaaggtgatggaagttttcccgatagataaaaaagtagagcaactctttaaagaagtcagccgaagaatattccggttacaaaacggaagaagtcttgacagcatggaacggataggagctgacacgcggggacagatcggggcaagttacctctctctcaaaaatctggccggacaataccaacccgatttaagattggcacaactattgtggggaacaaagaaacgagaagaacaaatcgttgcctgttttttattcccggttcaagagttgattacagaaaaaattactcaattattacaatactgttacaacttcgagatcgcagaatatttcgggacgttagttctttcgaaactggaaaacgtgaaacaaatggtaaatgaatatttaaattccgatcattcctatcttcaagttgcagcactaaccgccatcggcaggagtcgaattgatcgaaaactaaactccccattcaccgatagttacattctaaacatggatcgtgccaagttcacggacacgaacgtacaaaaggtatacgatcgtgtaagcatatgcttgagagaatagaaaaacaagaacgtgttaataaaacataaacggacaagggaaagggggaattgattcttttatatcaaaatgtttcctatttttgtgccgaattaaagaaaaaaagaattaattaatttctaacataaatttattgctatggcaaaattagatttaagtatttatggaatcacggatgtgaaagagatccttcacaatccctcatatgaagaattgtacaaggcaga

SEQ ID NO: 10888 - DNA, 5593 bp, Unknown
  gut microbiota DNA sequence
tgtgggagaaaatttgtaaccttcacggaaaatatggatttttacctcttgtaaaaacgtatctgataagatgtaagttattaatataggtgtggcagaacgaaattagcaggaatgaaacgagttgtaatcataatatgcatggggataacaattttgtttttgttgtcttcttgtcggaaaaatgaaaaagcgaaaacggcagaattgtgcagggagttggaaaactctgtgatgttatcgcctgcgtttgattctttggtaaagatgtctatggggttgcctaatttttttcgttcgaaagtattgttggtcgcgggacgttgttattccactaaggtggagcagatgcaacaggctcggatttacttacgggaggcctaccggattgccccgcgggacgtgaagaatcttgtggcgctggaattaacccggctttacggctctttgattttgcgggatagctgtgtggaagaggccattcgttttataagccgggtgccttccaaggtggtgtttacccgggaggaagaggctaaattctattacttgggagcttgtttttttaaatcgatcgatatagaccgggcttttagagccgtggatcaggcattgtcgttgtatcgaggactttcggatacggagggggagatcgaggcttatcgcttgaaagcaactttatatggggttttgcaggaatatgaagaacagtatgcttgttacgaggaggcctatcgccttttgcgacgatcaagattccgggataaggtgaaacctttttacgagcagatggcggcaagcctgaaaaagttaggaaggcatgaggaggcgttactctggtatgaagaggttttaaaggaattgccggattcaagtaggcttggacgttacgggattcaggtagccgaggcttattctggattggggtatcacgaaaaggcacgggaaatattgaggggcgggttgatgaatgaaaaacgaggtggaatgcgcaacgtgttgcttactcgtgttgccgaatcttttatccaggagggacttcgagactcggctttgatagcattaaaaagtgcgattgacttttacgagatatatgctcgtgaaaatcaattgaaggttcccggtgtgatgttcatgaattatttaaggtatgggcgttgtttgtgggagatgggggaaaaggatgaggctgttgcgtatctggaaggtattagttataaaaaagcagaatccccggagagtcaattggttcaggctcaggtgttggaattgttgagcgaatatcacgaggatatggaaaaccggcaggcgttttgtggcgtcttgcatcgacgggattcggttttggagttgtacgattccttttatgataacgggcgttatcgtcaggtgttgaaaaaatacaagaatcaaaaatttctgcgggagattgaagagatgaaccggaaacaggagtctgccaactggtggttggtgctggcattgcttgtgaccgtgggattgatcgtttcggccttggtatatacctgggtttcgtggggaaaagaaagagagtataataagagaaaatagtatttatggataagcacgagatatttatgcggaaagcgttggaagaagcccgcttggctgaagaagaaggagaaattccggtaggggcagtagtcgtttgtaaaggtcgggtaatcgcccgggctcataatcaaaccgagcgtttgaatgatgtgacggcgcatgcggagatgcttgccatcacatctgcgacttctttattgggaggaaaatatttaaatgattgtaccctgtatgtcacgttagaaccgtgcgtcatgtgtggcggtgcgcttgcttgggcccaattgggagaattggtgtacggggctgccgatccgcatcgggggtatgcccggctttccccgtctgtgttgcacccgaagacaaacgtggttaccggagttttagagaatgaatgtggagaattggtaaaaaatttctttgccaaaaaaagataattaatttattctccattttccattttccgttttcaattgttttgttgtacatttacgaattgaatagattgttattaataaagtagtacatgggtaattttgatataaggaccgggaatgtgccagataatgagaaagaactggagaaagctttgcgtccgttgagttttagtgattttcgtgggcaaaagaaaattgtggataatttggaggtcttcgtggaggctgcgaagatgcgaggtgaatctttggatcacgttctgttgcacggccctcccgggttgggaaagacaacgttgtcggctattattgccaacgagttgggagtcgggattaagattacttccggtccggtgttggataaaccgggtgatttagcggggttgttaactaatttggagccgaatgatgtgttgtttattgacgagattcatcggttaagtccgatcgtggaagagtatctttactcggcgatggaggattttaagattgatattatgatagataaaggtccggcagcccgatccgtgcagatccaattgagtcctttcacgctgatcggggcaaccacgcgtagcggcttgctgacagccccgttgagagcgcgttttggaatcaatagtcatttggagtattacgatctcgacgtgttgacgggaatcgtggagcgttcggcagctattttaagaacaaagatcacgagtcaagcctcgaaggaaatagcgtccagaagtcgcgggacgccacgtattgctaatgccttgctgcgtcgggtacgggattttgccatggtgaagggaaacggggtggttgatcttgagatcacgacctttgcgctggaagctttgaatattgataagttcgggctggatgatatggataataaaatactgttgacgattattgataagtttaagggagggcctgttggtttgactacgattgcaactgcggtcagtgaggacccgggaaccttggaagaggtttacgagccgttcttgattaaggaaggttttctgaaaagaactccccgggggcgtgaagtgacgggtttggcctacaagcatctgcggaagaatcggcgaacggatgattggcaagctacgttgttttaggtgattccggcggattgggaaagcggaaagtgttggataaaatgataaattcaaaagttttattaacgttaaagatgggtgaaagtgggggtgggcctgtttaatttgcggattggataaaattttgaagagtatcaatgagttgtatttttgttaaatagtgtcaatcctgtcaattgttaaaatggatttgttaaatttgcgtgtatgagaaagcaacagataatcatattagggattgtgtttggtatatccttgctgggattgattattctccagaccagttatttccaaacggcttacgaggtgaagaaggagcaattcttctactcagctaaccgggctatggatgatatggttgattatatccgcaagcaggaagaggcgggtaggctttctgaaaacaggaatctgtctgaggtcagacgtcggggtgtggagattgatgccccgatctatattgacccgaaacgtccgattgctgtgaagaatgacccgtcggcagttgccaattctatgcttaatttgattgatgatgattcggaggtgaaggatgtcagtgagtttgtgggaagtaagttcaaggaagataatttggccacttctatctccaagttgcaacaagccatgaaagagcgaaccggggaaaattacaggtttgtgccggaagggaaagaagataaacacgtgatcgaggggcgggttgatttgaataatctatatggttttatcggtaacacgctgacagatgcgggaatccgttcccgttttgaattcggtattaaggaaaatggtaaatttattctgacatccaagaattttttaagtcatgtctcggatgatgtgacgcttagccggaagatatttccgggtgaaagttcttctgcaatcttatacttgaaattcccggatgcttcgtccgatacggcgggttccgtgtggatggttttgcccggggtgctgatcacgattgctatcgtattttgtgccgtgttctgcctgatcgttattgtccggcagaaaaagttgtcggtcatcaagaatgattttattaataatatgacgcacgagtttaaaactccgatcgcgacaatttctttggcatcgcagatgttgaaggacggggcggtgacgaataccccggagaccattgaccgggtggccacgattatccgggatgagagtaaacgtttgactttccaggtggaacgggtgttgcaaacggccttgttcacggaaacccggatgaaactaaagctaaaaaatataaatattaatcagttgattgaagatttattgcctaaatttagcttacgtgtggaggataaagggggtaagttctctgcttatcttgaggcagatcaagatgaagtgcttgcggatgaggtgcatgtgacaaacgtgatttccaatctcgtggataatgcgataaaatattgtgtaaaaccaccggaaattaccatttatactcgtaataaagataaagaaattataataagtgtcattgataatggcataggaattgctaaaaaagatcagaagttgatctttgaaagattctatcgtgtgtccacgggaaatttgcatgacgtgaaaggatttggcttgggactatcatatgtgaagaaaatcgttgaggctcatggtggaagaatagacgtggaaagttctcttgataaggggagctgttttgacatcatattacctttaaccgtaaaaaaacaaaaaataaagagaaccttatttttctaaattcgtatatttttacagagaattaaaaaataggaattatttaaaacaacatagctatggatgagaaaattaaaattttattggcagaggatgataccaacttgggtatgcttcttaaagaatatttgagagctaaaggttttgagaccgttttatgtgaggatggagagattgcatatgaaaggtttttgaacgaaccgtttgacatttgcattttcgacgtgatgatgcctaaaaaagatggttttacgcttgcgaaagaagttagacagatcaatagcgaaattccgattattttcttgacggctaagtcgatgaaagaagatgtgttggaaggattcaaattgggagccgacgattatatgagtaaacctttcagtatggaagagttgttgctgcgtatcgaggctgtcttgagaagatcaaccgggttgaagccggaagatgaacaagagatcttcaaaattggtaaattgacattcaattctaagaaacagaccttgtttgatggggaagaagaacaaaaattgaccacgaaagagtctgagttacttcgtctgttgtgcttgaatgtaaacaaagtattggaaagaaattacgctttgaagaatatctgggctgatgacaattattttaatgccagaagcatggatgtttatatcacgaagttgcgtaaacatttgaagaaagacccgtcagtggaaattatcaatg

SEQ ID NO: 10889 - DNA, 268 bp, Unknown
  gut microbiota DNA sequence
tccctgacaaaagaggtttacaggccatagaccattcttccctcacgcgacttggctggttcaggctctcgcccattgaccaatattcctcactgctgcctcccgtaggagtctggaccgtgtctcagttccagtgtgggggaccttcctctcagaacccctagacatcgtcggcttggtgggccgttaccccgccaactacctaatgtcgcgcgtgcccgtcccgtaccaccggaattttaaatcgagagccatgcggctctcgagt

SEQ ID NO: 10890 - DNA, 160 bp, Unknown
  gut microbiota DNA sequence
aactacctaatgtcgcgcgtgcccgtcccgtaccaccggaattttaaatcgagagccatgcggctctcgagtatcatgggatgttagtccacgtttccgcgggttatctcccggtacggggttggttgcacacgtgttactcacccgtgcgccggtcgcc

SEQ ID NO: 10891 - DNA, 3715 bp, Unknown
  gut microbiota DNA sequence
gtggttataaaaatcttccagaattacgataaaaaactttcaaaatttattcacccatttttcgattctcgtgtttgtcttagaaaataagataacatgatagagcaagatgaaaaagagatacgaatccgggaatatctttcgggagagttaagcgaggcggggagacaggagttccgagagtggttggccaaggatatggatgtgcggcgaatttttaaagaacaagtgaaacaaatgcacttgattcgttgggctgaacactgggatgtgatagacgaggagacagctcgaaggcaggttgtagctcggatgcgtcaacgtcgtttacggataggatttgtaaggtatgctgctgtcgtggttgtgatgttggttgccggactggtaatctgggctgggcgttatcagtcgaaagaacttcccgttttggctgttgtttccactcccgtggtaaatgtccctgttttgaaattggccaatgggaaggaaattccaatttcttcccggaatacggaaatcatccgttctacccggagggtagatatacagctggcagattccgggagattggaatacgtggcaaaatctgattctattgttggggaggtggaatacaatacgcttgtcgtaccccaagggtgtgaatttaatatcgtgttggctgatggtagtcgggtgtggctgaatgcggggagttcattgagatacccggaggctttttcacgtgatgaacgcaaagtttttttgagtggagaggcttattttgaagtggaacacgatgaaagtactccttttatcgtgaatacggaagtgatggatttacaagtacttgggacgagttttaatataaaagcctatgataatgaaaatacggttgtaacgacccttgtttctggaaagattcgacaggagtttccgaacgtggggaagaaaatcgtgttgacgccctctcgtcaatcggtattcgatcgtgtttccggaaaattggagacgaaacaagctgatatccaagaaaccctcgcttggagagaaggtaaaattatcgcgaataatgaacgtctggaggatatttttcgacagttatcccgttggtatgattttaaggtggtgtacactctgccctcactgaaagacatccgcttttatcttcattctaaccggtacgctgaagttcgcacgattctggaacatctccagacgacgaagggaattcgttttacttacgcggagaacacgatttacgtgagtcaataaaaataaggagatgccctcacatccccttacctgttagcccctcagctaacacttgtattaatttaataataagctaaacaaagttatgagaaaaaaacggaaatttcaacaaacgttgagaaaaatgaagctacttgcgttatttatgcttttaggtttttgtacctgtcacgctaccattagcgctcaggaggctcgtattgatctgaaaatgtctgatgcggcattaagtcaggtgttcaggagtatcgagcagttgacggagtatatgtttatctataaatccgaggacgtgcagtctgtctcgcatatcagcgtggatgtgagggaaaccatggtgcgggatattctggatcaatgcctgaaaaataccggattatcgtacttgtttaaggataaagtgattattatccaaaggagtacgaccgagccggaaaagaaaggaatacggatcacgggtaaggtgacggatgaaaagaaagagccgttaccgggggtaacggtgatgatcaagggtacgaagttggggaccgtgacggacgtggacgggaaatatgccttgacggtcccggaggggaataatacgctggtgttttcgatggtcgggatgaaggataaagaggaggtgatcggcaagcggacggggattgacgtggtgttggaagaggcggtgagtgaactggaggatgtcgtggtaaccgggtattacacgcaggcgaaaaacagttttacgggtgccgcccggacgattacggccgaggagttgcagatggggggaaaccagaatatcctgacggctttgcagaatatcgacccttcgttcatgaaaatagagaataatctggctggctcgaacccgaacgtggttcctgaattccagatccggggagccgggagtatttccgggatagagagtgaatacgagggaaatccgaacacgccggtgtttattgtcgacgggttcgagacgacggccgaaaaggtgtacgatatggatccttaccgggtggcttctattaccctgttgaaggacgcggcggcaacggcaatttatggttcgagagcctccaacggggtggtggtgatcacgaccaatgccccggccagtggtaagatgcaggtgagttataatgtcgacgcctcgttttatattgccgacttgagtgactataacgtgtgtaacgcggtagagaaattagcaatagaaaaggcggcaggaatgtactcgtccacgatggtgaattatcagctcacgttgaatgaatggtacaacgagaagctggcgaatataaagagggggtatgacacgtattggctggataagccgctggatgccgtggccgttgccaataaacattcgttacgtttggacggcggtaatgacaatatccggtacggtatcgagctgggatatagcaacacgccgggggtgatgaaggaatccgggcgtcgtcgtctggctttgggtatggagttgcagtatatttacaagagtttgacttttaggaataatttgacttattcgaacgtgaaggcgacaaattctccttacgggtcattcagtgtttacacgaaacgtaatccctacgtacggtataaggatgacgacggtaattacatttataaggtggacaagtatatcccgatcggtgggggcgggttaggaaaggattattataatccgttgtataacacgactctgaacacgacggacgaggagaagtacaatgacgtgacgaataatttcggggtggactggacgatcatggatgggttgcgtttgaagggtagtttttcgtttacacaccagaacacgtacaaggataatttcaagcctgccaagcacacggattttgcagattattcggatgatgattttgatcgccggggggcttatgtcgggactcgcggggagaattacagttatgatgcgagcttagtcatgacttatttctaccagttggataagcacgtgattaatgccaatttaggttggaatctccaagagagcgtgacgagggaatttacggtgaagacggaagggtttccgaacgagaatctggattatatcagtttcgcgacacagtacgagaaagagggttcgccttcggggagcgagtatacttcccgcttggtgggtttccttggaaatttgaattacagttatgatgaacgttatttgttggatttttctttccgtgaggatgcgtcttcccgtttcggttctgaaaagcgatgggccccgttctggtctgtcggtctggggtggaatttgcataacgagggtttcctgaaggatgtgactttcgttaaccggttgaagatacgcgggtcgtacggtttgacgggtagtcagaattacaatccttatcaggcgatgacgacctataagtatttgacaggtgagcgttatcatcacacggtgggagccgaggtgatggccttgggtaacgagaag

SEQ ID NO: 10892 - DNA, 10752 bp, Unknown
  gut microbiota DNA sequence
tacattctaaattttaaattctaaattagtttgcaccctatttactggcatagatttccttttctctttctcgtgatcccgttgatcctgggaattattgtcggtcaatatttatcaagctttccttcgacgttcattttgggtgtcattattatatctttttttttacttttcattatccaaaaagtacgttctggacttccgtttgtattactcacttttaccggacttttctccacaggagtatatctatcggcgactaagatccctgcaatcatttcaggtgaaacttaccaattaacagggcgttgcgagcaaattctttctcctggaaagattgttgtttcttcaccccatttatgcacgtatctacaagtcccggattccacggagatcacagtcggggattcccttgccggtctaataagattataccttttacagacctcacacaatcgccatgatttcaattacgataactacctacaacaccaaggcatacaggccaaaggtttcccgaccggagaaatccataaaaccggacactcgcaagacctttattccgtatgtcactcgattcgaaacaacctggtaactaaactacaacgggtcattccggatagtacgacttacaagttattagcagctctttgcctgggatgtcggcaagaaatcactcccgacacgaaagaactgttccaaaacacgggaatgattcacattcttgccatatcgggattacatataggagccatattcgcatttttcttgtgtttattaaggttattccattttaaaagtaaaaaatcccgattgattctgatcccgctaatatggctcgtcgcttgcattaccggcctctctccttctgcttgtagagcagcaactatcctaagctttattaccattggagaggcattcaggcaagaaacaattcccttgaatgccattgccgccgctgcctttttttcacttctcatccatccggaattactctattcggtcagttttcaaatgtcatacgcggcctacaccggaatcatactaatttacccgttaatgcgaattaaaaagatgcacaagtatcttcgcccattatactcgctactttgcattagtttttccgcacaagccatgacattacccatcatggcttactatttccataccattagtttgaacagtatcttcataaatcttatcgcggtgcccgccgcttctttccttttatacgggggaatcatgttactcgcattaccgggattcatcagtttttacttgtcatacatcatcataggtcttacacacctgttcattttcagcctacaacaattttccaaaatcgtgataaatttgccggatttatacccgacagtaactcatgtcatactattttacctcatcatcatccttgccatcatttatttaatcactagaaaacgtcaggtccttagatttatctgttgcagtgtgagtatattactcgtttttcattgctgtttcacgtactatatccaaaaccgccaggaaattgtgattcgtaatctctacaaacaatctgctattttattgaattacaaaggttattacgcttacctcaaaaccacgagccccgatgatggtttatccacctatatcacagccaatcatttacaagctttacccacccatgaagcttttgtcggacaacaaataaaattcattcggaatcacctgtcatcttctcaatgttctatatcaataatcgaccacactaactctacattttcgcatgaaaacattgtcatcattaccgaaaatatttaccctcccaacttcctcgagttccatccacggctgattatcatggacaactcgaacacaagtcactgcacgaaagcctggcaaaaattctgtctcaagaaccaaattccgtttttcaaaacaagcgaagtgggaacaattatcttgaaaatataggcaattttttatggaattcggattataatgctttattttgctcgttaattaacacctaactaaaatggacatagtcatagcgggagcaggagaagtggggacacatctcgcaaatatgcttagtaagcaagaacataatataatgctgattgacagcgatgaagaaaagctggaactattaggcaatcaattagacgttatgtcaatcgtgggatcttgtacctcgattggtgcattaaaagatgcaggagtacataagtgtgatttgtttattgcagtcaatcaccaagaagatcaaaatatcaactcagcgatcttggctaaaaaacttggggccaaacaaaccattgcccgggtaaacaatagtgagtacttggaagacgaaaacaaagagtacttgaaaatgatcggtattgattcgctgatttacccggaacgattggccgcagaagaaattgtagcctccttaaaacagagtggttcaaggcagttacacgaattttcggatggccgtctgcaattattaggaatcaaactttgggagaatgccccggtactcaacttgaccttgataaaaatggcagaacgttacggcgcccaacatttccgcgtcgtggctatcaaacgagcagaccacacgattatcccgcgaggaaatgactctttccgctatggagacttggtatttattgtaaccaagcctttctatgtccccaatgtattcgctctttgtggcaaatcacaatatgaagttaagaatgttgtcatcgtgggaggctctcgtattggtatcaaaacagcttccctgctagagaaaaattacaacgtgaagattatcgaaaaagaccgggagaaatgtattctcattgccgacaaattaaaatccacgctggtaatcaacggtgacggaagggatttggccttattacgagaagaaggaataaaaaacactgacgcttttatcagtgtaacccactcatctgaaaccaacattctttcatgcttgctagcgaaaaaacttggggtaaaaaagagcgtggccgaagtcgagaacatagactacattgatctggctgaaaatatcggtatcggaactctcgtgaacacgaaattaattgccgcctctcatatttatcgttacacgatgaacgtggatgtgaaacatttgaaattcctcacgttttcggaagcagaggtattcgaagttacggcagagccgggttctaagattacccgtaaaactctggctgatatgaatttcccggaggacgcaaccgtcgggggtgttatccgcaacggggatgccattatagcgaaaggagacgtgcaaatcgaggccggagacaaggttgtcatttttgctttgcccagtgcagtgaaaaaagtaatcaaactattccagaaatgattaactttaggttcattaccaacatcataggaaaactattatttgtagaaagtgctttcctgatcttatgtattattgtagccttgatatacggggagaacgatctcatggcttttgtttactccgtgatcgtcacgttgggtgtcgggagtctcatgacatttacagtgaaagtcaaagaccgggtacttgccaaaaaagacggttattttattgtaacctgcacgtggattatcttcaccatcttcggttgcttaccttacttgttcggaggtacaatcccatcggttgttgacgccatattcgaaacgatgtccggtttcacgacgacaggttcctcggtgataaacaacgtggaggccttaccccatgccactctattctggcgctccttgacccaatggatgggcggtatgggtatcatcgtgttacttttagctatcattcccggcttgggaatcgagggacgtgatcttttcgtggccgaggtgccaggtccgacacatgacaaatttacggccaccttcaaatcaacagcccgacgcatgtggtacctctatatttcattaacagcggctcaagccattttgcttctactaggaaatatggatctttttgatgccatctgtcactcgttcacgacgatggctaccggaggatattcgaccaaacaagccagcattgcctattgggactccgcttacatccaatacgtggtcatcatattcatgttcattgccggaacgaatttcggcttactctatgtcatattgcacggtaaattccgcaaactatttcatgatgaagaatttaaactatacctttacatcacgttaggagccagtacaattatcgcaatcgtcctattcctgaatggttatgcaaacttagaattaagcatccgggaatcaatatttcaagtagttaccattctaaccacaacaggattcgccacggcagactacctattatggccacctctcacgggtgccatcatctttgcccttttatttatcggagcatgtgccggttcaacctcgggaggattgaaatgtattcgcctcaatctattattcaaaaattcgttcatcgagatgaaacgaatcattcatcctaacggaattatcaatgtcaagtataacggaaaaagcgttcaccccaatattatgaccggagtgatgggtttctttatcttgtacatgttcattttcgctatctccagcctgatcatgtcactatttactcgggacatagccaccgcttgtagtgctgttatctctagtatgagtaacgttggtcccggcttcggagagattggacctatggacaattttgctaatctacacgactttgccaagatatttctatccattctgatgatggtcggacgtctggaaatattcacggtcctcgttctattcagtaaaacattctggaaaaagtaatccctatccacaagataatttggatctcacccaaagagaggtattttcggagtttagattccgggatacctcgtcattccctttttgatttgatgatttttgattttaaattcgctaaaaaaaaagtgtcccaaacgtcatgactctgggacactcttcgaatttccttctacaaatattctataattcacccaaaccttgtctagtaacaacaatctcgtccccggtgcaatcaatcaccgtagaaggaatattattcccatatcctccgtctatgaccaaatcaactaaacgattatatttctcgtgaatcaattccggatctgtgatatactcctcgacttctccttctgtagctttcactgaagtagtcagcaaaggcccacccagctcttcgacaatagcctgaacaataaaatttttgggtattcgaataccgattgttttacgtctattcatcaagacattgggcaacttgctggtcgccggcaacacaaaagtatacggtcccggtaaatattgtttcatcaaccgaaactcttcattacttacttttgcataagcagcgatgtttcccagatccttacagatcatcgagaaatttgctttctctgctttcacaccacgaatagccgaaacccgttgaacagccttcacgctatttatatcacacccaatcgcgtaaatcgtgtcggtcgggtaaatgataacaccaccattacgcaagagctcaacgatctttcgaatctcccgatcattgggattgtcctcgaataaacgtacaagcatgatcgtaaattatgaattcactttcttgtgatcagccaaaaacgtagccaaaccggaatccgtcagcgggtgctttaacaaacctttgatcgcactcaacgggcaggttgcaacgtccgccccagcctcaatacattgaatgatatgttgtgtgtggcgaattgaagcggccaatacttgcgtgttaaaaccgtaataagcatacatatccacgatcttttccaccaactcgataccatcactactgatgtcatccaaacgtcccacgaaaggagacacgtaagttgcacctgctttagcagccaacagagcctgtcccggagagaacactaacgtacaattcgtacgaattcccttgttggtaaaatatttgatagccttaataccatcagcaatacaaggtacttttaccacgatattcgggtgcaaagcggctaattcttctccctctttaatcataccttcgtaatcagtcgcaattacctccgcacttacatcaccatccacgatattgcaaatctcaacgtaatgttttctacaattctcatcacctttaataccctcttttgccattagagatggattggttgttacaccgtccaacacaccaaggtcatttgcctcgcgaatctggtcaagatttgccgtatcaataaaaaatttcatattctatctggttttattgtttaacttcaatatcacggcaaaattacaaacaatatctgtaatccgatcatatttagtttataaagttcacaaggttcataaagtttataaagtagccttataaactctataaatccgttacgcaattagtccgaaaagaatccaggctacaagtaaagtaaataccacgttaaacgcttgcgcacccagaaaagcatacgtggaacgacgattttcagaggttatcaagctcttgaaatccgtctccaacccaatagacataaatgccaaggcaaaccacataccctgaatattcttcaaaataggtttagcatcagacacaacctctggagcaacgcagaatgaaaaaacaagagaagccgcaacgaatcccaacacgaatttcggaaaacgtaaccagattacttttagcgtcggtttctcttctgtaacctctttcttcgaataagaccaataaatactgattaagaaagccgcaactcccaacaacacgttctgcgagaatttcacgatcgtactcgtctgcaaggcaacttctccatatatcgccccagttgcagctacggccccagtcgtatcaattgttcctccaatccaagcccctgccatatcctcaggtaatcccatcaacttagccaaaccgggcatgatcaaaatcatcggcacggccacgaccaatactaacgataccacgtatgacaattttgttttatcccccttgatagctccggcagtagcaacagccgcagacactccacaaatggaaacagcactggaaagcatcaatgacatttctttgtcaattttcattttacgacataaccaaaagcagaaattccacacggtaaagacaacgacacaagattgtattaatcctaatgccccggctttcaacaaatcatcaaagagtactgtcgtcccaagtaacaccaaaccgatcttcacgaaaagttcagaagaaagtgcctccttcaaccacttgggaatagaaaatatattactaatgaaaagtcctatcaataaactaaatatcacggtttcaaatccccaatcctttaggaatttatttcctccgacaaccatggccaaaagcgtaaggaagaacacgaccggaaaacttgcaacaatcattttcaattttttacccgtaaataatccggcaatcaatgccatcaggaacataaaacagaaaacaatcagggcatgtcccacgttatccaaggtaaaaatcttattcatcaatgcgtcagcatctggccaactgaaagaaggccaatgaggttttaattgaaatactactaaaaaaattataaaccaccccacgatagtagaggtccaatcttcggaaatctttaacttgctcatctggaaatttattaatttagtgaataatttctgtggcaaagttaatacggggaatcaaaaaaataatccgtatttttactgattctgaattagtacatttctaataatccctttatagaacctaagtaatactctttccaaccttcaacgatctcctcgaagacctcatctggaatattcgtatgttctaattctacacgagtccgggaaccgtctttttttaatttaatggttacaatagaacgttgatccgtctctccgaaaaaccattcctgaacaagcaaatgattgggctttacctccagattctcgccacaaatatctccctcccataaagaaaatacgaatccctcctctgctttcatttctgcgggataaccactccacagttcgatttgaaaaggattcgtcaatgccgtaaagacttcctccggatcagccgtaatatcaattgtgtatttaaaattcatttataataaaatatagactttaggaactttcagaaccgaagactcaaaactatatggacctaatataaacaagaagtgtgataaaatgactttatcacacttcgctattatctatttcttcttgtattgttcatttagttgatttaccacatcattggtaatatcaaatccctcttgtgcgaaaagcacgttaccgcctaacgtcgtactcagtattaattgaaaacctttcgctttattatactccgtcaagaaatttgtgattgcatcatacaactttcggtttatttccatttgctcgcgttgagcgttctcggtcatttcctgttgtaatttctgcaaattttgctgtttgatcatcaaatccatctgggcttgttcggctctttcacgagtcataaaaccaccgttttccactttattccgaaactctgctgcctcacgatcgaagttcttcacttttatgttcaactctgtccgattggcttccaatttctttaaaaatgcttcattcaattctctcgattgagtataattgttaagcaatgtatccatgttaatgtagacaatttttgcatcagcgttcacagttacagtaccgctttgattgctcgtacttttactatttccactgaaatgtaaaatatacaaaactatcacagcaatcaacaataacacatttaatcctatcgacaaattcttcataaaatgtaactttgttattaataaatcgattcattgaaatctcggcccacacgaggcttgtttcgaatacaaagataatctttcttcttttagttatccgatttttctcttttttctatataaaaaattttctttaacaggtctatttcctctatattaatgacttttcctctctccgcctgccgacgcacccgcattaatccttgtaatgccgtgatagactgagttccaatacctaactttacatcaaccattcctttcatttctaccttacgggcaaaatcctcgatcatcatacgcctattcatttcctgatccatcgctttcatcggttttgatgcggcatgtatagcttggtttagattgttttgggcattcaacaaaaaagcatttgatttgtaatcccccgtaaggaaacgcggcaagattaaaacttccgacagtaaaacagtatctcgtaccataaaaacccccagtaagaaatcattttctcttaaactgtccggaataacaacttgcataggagcatagcctatatgcgaaaaacgcaaagtatcccccacttgcacactcaatgaaaatcgcccttgtttatcaacccctcgaacctctttccccaaccggaagatcgcttccggtaatggccgtatactgtcccggtcacaaactacacccgtgacaaacacattgcctttatcttggctctgcccttgtactcccaagcaaaagaatataaaaaaaaatagaaggctaaactctttcattttcccgggcgatttcactattctgcaaaatgttcaatagcaattctctcgcacggaataattgagctttcacggttcctaatggaatagctagctcttgagcaatttcttcataagaatactcttcaaaataacgtaattctatcaatttacggtaacgccctttcaacatggcaactttttcccgcataaattcagctcgctgcttacggatcgtctcctcttccggattcaacacgtctgccggcacactattgatatacccgcgatcatccgggtttatatcatccttatccaaagaaacaattttggctttcttcttccggataaaatcaatcgtgttattagaggcaattttgaataaccaggtactaaacgcaaactgaggcgaatagtaattcaaactcgtgaaagctttctcgaaagcctcgaacattaaatcctccgcatcagttctgttattcaccatcttcagtatcataaaatatactgaatctttatacctcttaaataactcggcataagcctgttcatctcccgttattgccctcttcacgaccttataatcataaagagctttctctgacaagttgtttgttaactccatttcctcttgttaaaaaatgaatatccattttcgtacactcgataaacaaaaccgatcatactaataataaacgaagttaggaataattttttttgtttcagacaaatagcgcaaatatttaacaaaattacatccgttaaaaatactgtcaacatgacaagcaacacgtatattgggtaaaaacctaagacaatcaaacaaatagttgtcaaataaaagaacaaacgcacgatcatatcgccatctatcataatcctctccgtcattgccaatctcatcttgctagcatagtaatatgaaacttcgtttatttctccttttttgtcactcttatcaattatcacatacgagctcggatcttttgtcatctttattgccccaaaccttgataattctctaaccatatcattatcgtatcctaaatacgattgtgaattcttcgcgaacccacggttttctatataatacgattttcggtaagccatgttacatccatccccaaaaatatattttttatttttcaccatgaccatcatttttataaagcgtaaga

SEQ ID NO: 10893 - DNA, 27829 bp, Unknown
  gut microbiota DNA sequence
cgcaaatttctcacgttttgctcggtgaaatcataatttgcaaaaccgacgacagccgccgtgttttcatcaaaatatgactccatggtcttcacccaatacatggaagagggacggcaattaatctctgaaaacaacaatatatcgtgcttggcagccaatacacctatatttacagccaattttttagtaaatctgaatttagtgtccgggaatattcgcgtacacctcaactgtggataatctttctgtatctcgatcaacacatcctgcgtgtcatcttctgaacattcatcaaccacgatcacctcaaaattatcgtatgcttgcatcaaaaaactcggtaaattccgtctcaaacactccgcattattgtgtgacgtgataataaccgacaccccttcatgctcttgtttatctatcggctttactttgcgagacacgatcacacaccgacgaataacgtgatagatgtaggtgagtgtcaacacaaacagaagtattaccccatacctaaaagctcccagttctccccaaaagactctcaaactctccatatatattaacatttttttatccataaaaaacagacaaatatacttacttaatggggattttaacgtattaattgaacaattttgtgtacattagttcgattttactaacataaagcaactacattatgggacaaccaaaaaacagaggaattatagggatactcaccggtggaggagacgttcccggcctgaatccagctatcagagcggtaaccattcgagccctgcgcgaaggctataaagttattggaatcaaaagaggctggggtggtctgattgacatcgtacgagatccacaatatgacaactccggtaatttttttgaattaacagaggaaatcgtgaacaaagccggacgcacaggtggtactttcctgcatacatccagaaccagggcttcccatgtacctaaggcaaatgtacccaagcatttacaggataaatacttggacgacatcaacgatctaaccccggaagtattaaagaacctagagttcatgggtatcgactacttgatcccgatcgggggggacgacacgttgagttatgcggtacgcttgagcaaggaaagcgtgaaagtcgtggccatacccaaaaccatggacaacgacgtccccggaacagattactgtattgggttcagcacctgcatcacccgtacgatcgccctcacgcatgatctccggacatcagccggatctcacgaacgtatactggttctggaagttttcggacgctacgcggggttcacggcaatgctaccaaccttagccggagctgccaaccgttgcgtaattccggaatacgaatttgacatcgaacgtctaaccgaactactttgcgaggatcgcttcacgaatcctagcaaatactcggtggttctcgtatccgaaggagccactttttccggtggtaacatgattttccaaagtgaagaaacagacatgttcggacataaaaaattgggaggtatcggaaacatgatctcacaacaattaaaagaacttaccccacagtttaaccacggacaagtaatcaacaccatcacgcaaagactgggatatctagttcgctgtggagatccggatgcactggattccatcgtacctatggcatacgggaaccttgccctggatttaattaacaaaggattacacggcaggttagttatcctaagaaacggacgctatgacaacgccccaatcgagattgtaaccagcagtaaaaagatcgtggatgttcccaaattctacaacacggagagattacgtcctcaatacaacagtttcgaattcatgccacagatgatactataaagataaagctcccggttgcccgggagcttcgtctttaagataaaagaattagtactaacttttagtttttagcttttatcttttagtgttctgagtggttgaatcaggtgtgatactatctacctccacgacaacttccgactcctccacaacggttcctaccggttcttgtacttgttttcccgactgcaccttgtttttctgactattcccacaagaaacaaacatcaaagttgcagcaaccgccatcatgcaaatccatccaattcttccaaaagttttcatcatattcaaatttagtttagctagaaattcaacgtgaaattatacgtcatcaagacggtataggttacaaaaaggtgggtcaccatcacggccccacccaaagacaatttagaattttcgaaaattgttatgcaaaaacataacaataacttcaaaacaaacgtttaactaactttattaagaaatgcctccggctctttattaaattagatcccactcagaatttaacaaaaaagacgtgctatgcacaccggaggcaatctcttttgcgcaatacacgtctttataacttcaattcgagtgggatgctgcaaatgtaagcattaaatttcatttaacaacattatttttacgatagaatttggaaaaaagaaaatctctatatagctttgtcttcataaaataaagaagtatgatatacaatcaacacatagcccaaacttggtggtggcacctgtttaaacttcatcgtaaacaatgaggttatgtgattgtattgcataattagatatagagagagcctattgtttacgaacagtaggctctcttttttttattcactttttttaaaatcaaaatcatgaaaccaatcaaaaaatttatgctcaccgagcaagaaatgccaacccaatggtataatatcgtggcagacatgcccaacaaaccccttccccctctccatccgggaacaaagcaaccgctaaaaccggaagacctttacccgctatttgcccgggaattggtaaagcaggagttttctaccgaacgctacatcgagatccctgatgaagtgcaagacttatataaaatatggagatctacccctctcgtgcgagcccacgcattagaaaaagccttggacacacccgcaaaaatatatttcaaaaatgaaggaacaagcccggccggctctcacaaaccgaacacggccattgcacaagcttactacaactacaagcaagggattaaacgcatcaccacagaaaccggtgggggacaatggggtacggcattaagctttgcctgtcaacatttcggcctagacctgaaagtgttcatggtaaaagtaagctacaaccagaaaccctatcgcaaattgatgatgaacacgtggggatcagacgtgataccgtcaccaagcaacctgaccgaggccgggagaaaaatcctacgggaatatccggattcggccggtagcctagggatcgccatctccgaagccgtagaactcgccgcacaggatccccagaccaattactccctgggtagcgtgctgaatcacgtgctattacaccaaaccataatcggagaggaagcacttctccagatggaaaaagccggggatgaaccggacatcgtgatcgggtgtttcgggggaggttcgaacttcgccggaatcagttttccattcatccgcaggaatttgaaagaaggaaaacatacccgggtaattgctgtagaaccacaatcctgcccgaagttaacccgaggtcagttccaatacgacttcggcgatacagtcgggttgacacctttacttcccatgtacacgctgggacatgatttccaacccgcaagtattcatgccgggggcttacgctatcacggagccggggttatcgtcagccaactactcaaggataaactgatggaagccgttgccataccacaactggaaaccttcgaggccgggatcctattcgccaaaactgaaggaataattcctgccccggaatccacacacgctatagcacaagcgatccgggaagcgaaaattgccaaagccgaaggaaaagccaaaacaatcctgttcaacctatccggacacggcatgattgacctctacgcttacgaacaataccttggtggaaacctccagaatttcgagctttccgatcaagaaatcgctcaatctcttgataaattagagaaaatcatgtgaagagcatagctatctgattttttgctacatttgcaaaaaaatcagatagcatgttttatacagaactcactttccatatctctccttacgtggaggacattgcagacgcgattattgccgaactcggcgacctcggatacgacagtttttcatactcggacgacggtttcaaagcttacattccaagcaaaaatttcgatgaagaacaggtaaaatcattagaaatcctttcatttttccaagcactatacacgatcacctgggaaaaaacagaaatcgaaaaccaagattggaacaaaatctgggaagaaaacttcacgcctattctcgtgcaagaccggatactagtaagagccggattccatcccacgattgaaaacatcgaacacgaaatcatcattgacccgaaaatgagttttggcacgggacaccatgccacgacagccctcatgctggaaaccatccttgacatgaaaaccgacttctccggcaagaaagtccttgacatgggatgtggtaccggcattctatctatcatggccgcacaaaccggggcacaatcggtcaccggcatcgacatcgacgaatgggcctacaacaacgccatggaaaacattgccaccaacaacatgaataacatacgcattcttatcggggatgcaactttactggatggacaggaacattacgatatcattctagccaatatcaaccggaatatattattgaatgatatgcccgcgtacgtaaacgtgcttaacgataacggctacctcatcatgagcggattctacaccgaagatattcccgttattcgcgagaaagccgagctattgcaactaacctatcaatccaacaaaataaaagacaactggacagccacggttttccacaagaaataacttttggtggaaagttacaggttgttaaaaaagaacttgaaacttgctaacctgtaacttgtaacgtagcgtagccggatatttgttaatattttaacaaaggcttgttttttcaatttcaatatgcaatatttgcatcgtgaaaaatacacaagaagaatgagaacaaggtatacaaataactataaacagatgatgtgcatgcaaaagctctttgcaggctaacgcactgttgtcaaaaaactgtcgaaaaaagcctgtgtgaatacacgggcttttttcatgtaaagaaataaatgatttaaaaacaataaacttatgaacgtattaaaatttggaggaacctcggttggttccgcgcaacgaatccaagaagtggcaaaattaatctcggatgaccaacctaaaattgttgttctttcggccatgtccgggacaaccaacacgttagtagacatcaccaaccacctataccgcaatgacaggcaggaagctttgacgacaatccagaatctcgaactggattacctgatgaccattagcgatctctacagtaccgaagaattcaagcaccggggacaagaatttgtacaaaccatctttacttatctccgttcgttcatcaacaaggacttttacccgttacaagaaaaagctgtagtcgctcaaggagagatcatttccaccacgctaatgtattattatttacaggaacaaggcattccttccacgcttctgtcagccttggatttcatgcgtattgacaaagactgtgaaccagattatttctatatcgaacaaaatctaaaaagactattatccaacccggccacggagcgcattatcattacccaaggattcatttgccgaaacgcttatggagaaatcgacaacttgaagagaggaggcagcgactactcggctgcattgatcggggccgctctcaacgtggaggaaattcaaatatggaccgacattgacggcgtacataacagcgacccgcgatacgtgaaaaacacgaaagccattcgctctctatcttttgatgaagctgccgaacttgcctatttcggggccaaaattctccacccgtcaagcattcaacccgcgaagaaagcaaacattcccgtgcgcatgaaaaacacgatgaacccaagcgacgaaggaactttgatcacgaaagaaagtcccatcaaagatttcaaagcggtggcggcaaaggacggaatcacggccataaaagtcaaatccagcaacatgttgcttgcttacggttttgttcggaaagtattcgaaatattcgaatcctggaaaaccccgatcgatatgattgccacgtcggaagtcgccatatctctcacgattgacagcacatgccacctggaagacattaaaaaagacctcacgaaatacggcacaatcgaagttgaagaatccctttccatcatctgtatcgtcggggattgttcgatcaacaatagcggactcgccgcccgagctctcaccgccttgaaagatattcccttgcacatgatctcttacggggccagcgaacacagtatttccctgctcgtgaaacagaccgacaaacaaaaagcactcgaggctcttagcgaaagattgttaaatcaatgaattcataaatccgacccacatgaatatagaaaccatcaaaacatttcagactttgaagactccgttttattattacgacacgactcttctacaggccacacttcaagcagcctcccaagcggctaaagaacacggattcaatttgcattatgcgataaaagcaaatgccaatccacatattcttgacatcatccaaagccacgggataggtgcggactgcgtaagcggcaacgaggtggttcaagccgtagcaagtggttttcccccggaaaaaatcgtgtatgccggagtcgggaaaagcgacgaggagatccggctggctcttgaaaaagagatattttgtttcaactgcgaatctttacccgaaatagaagtgatcaacatactggccggagaaatggggaaaaaagcccccgtagctcttcgggtaaaccccaacgtggacgcacacacgcatcactacatcaccacgggaattgaagaaaacaaattcgggttctacctttacgatctcgaccacgccatcacggcctgccgggaaatggaaaacatcaatctcatcggcctgcattttcacatcggttcacagatcaccgacctcacggtattccggggactttgcctgagggtgaacgaaatacaatctcgattgaaagaacagggaatcattcttccccacgtgaatttcggtggcggactgggcatcaattacgattgtcccatgtgtggcttgattcccgactttgcttcttatttccagacttttgccgattttttcgaagccctgccgggccagcaacttcatttcgaactagggcggtctcttgtcggacaatgcggttccctcatctctcgcgtcctatacgtgaaggaagggaaacataaaaagtttgtcatcctcgatgcgggaatgaacgaccttttacgtccggcactttaccaggcttcccaccggatagaaaacttgacctccgtgggtgagcatgaaaaatacgacgtggttggtcctatctgtgagtcatccgattgtttcggtaaagaccgggaattacctctcaccaaccggggagacctgatcgccattcgttcctgcggtgcatacggggaagtcatggcctcacgctacaatctacgagaattaccgggaagttacttttcccggtaatttcccgtggtatttcgtttcataaaaagaaattattatctttgtaatgaatattatagtattctataaatacaaaatattcatataagagatattatagtatgaatttaatatacgattttgatttagataccccagatgaattactggaaattcttgctaaaaacttacagcaacgaagactagaaaaggattgctagtcattgtgatgaattgctcgttgataactatcacttccaactttaaactgacactctatagtttcattgtaataaaacagacccgttttttctcgggtctgttccatattttcaaccaaccattcactatttctggttattcttcttatcattcggcttggcaatagattctctcatttgcgtatcagcctcgatattcttcattttgtagtagtccataatgcccaaattaccgctacggaatgcttctgccatggcacgaggtacttccgcttcagcctcgatcactcttgcccgcatctcctgggcaagcgccttcatttcatgctcggtggcaacagccatagcacgacgttcttctgctttcgcttgggcgatctttaaatcggcttcagcctgatcggtctgcaattcagccccgatattcttaccgatatcaatatctgcaatatcaatagacaaaatctcaaaagcagtaccggaatccaatcccttgttcaacaccaccttcgaaatagaatccggattctccaaaacctccttgtgcgaggcagcagaaccgattgaagaaacaataccttccccgacacgggccaggatggtttcctccccggcacccccgactaactgacgaatattagcccgcaccgtaacccgggctttggctatcaactggataccatctttagccacggcagccaccggcggggtattaatcactttggggttcacactcatctgtacagcctcgaacacatcacgaccggccagatccacggccgttgcaatttgaaacgtcaagtcgatattcgctttagatgcagacaccaaggcatgtaccacttgagccacgtgtccccctgccagataatgagcctccagcaagtcacgataaagctccaagccggcctttttcccctcgatcatggcacgaacgataaccgtgggaggcactttccgccaacgcatcaaaaccaattgcaacaaagatattttcacatcagacactaacgcttgaaaccacaagccaatcggaataaagtagaggatcatccaaagtaaaaaaagacctccggcgataaccgctaccagaaaaaacaaactactctccatcttctattcagtttttaatttaactacaatcttatttttatacactttcaacacgactacttcccgatttccctcgatatacccggaacgagattccgcctcgaccacactgttccccacccgtacttttcccatcggggccaagcgtccttgcgtcatcccaatatctccttcctgaatggattcatccacaccttccacagtgctatcaatctgcgtgtgtaactgcatacgtttccacgtcttcgatcgtaagacgtaataagtcaccccgaaaccacaaagagccgttccgagcaaagtgaaatgcccaaccgtcattcccattgtagaataagcgatataaatagcgattcccacacaagcgaaacctaaaatccccgccacgttcactcccggaaaaacaagaaactcaagtattaacaggacaaaacctatcaaaatcagcatgaataaaacaagccactccatatacaacattttttgtttgataaagatacatttttttatttaactatagtatcatcatactgaaatattttccacacctacccctctttcccaaccgatcaggccgtgataaccaaacgtgacaaaggaagactactccctaaaatacctgtttaactaccaatatcaagagcaggagaatactcacctgaggcaaaccgaccacgtacggcaagaacaaagatgattcaactcgtctctatctcatcgttgtctcgttttcatctcgtctgtaagtaatgaacaaagtattatcattgttcattcagggcggaaataccggaaaatcacatggtacaaaagcacgaacaaaagcccaagaaaaaaatcaaattttaattgccccgaaattatttccccgccctctggcacaggttgctatgctagcgagtttgaacccgcacattttcaacatacgattttcaattctcaattattatcttttactttgtagccaatttttcattacccatgtaggcaatgagtcaagtatataaaagagaggacgaatgaaatacactgaattggctgacaatgaagaattctaccacaaagtagaatattacaacaaggcaagaaccgaaaaattaagctatcattataaagagattctcaaactactgggagaagatcccgaaagagaaggattagtaaagactccttatcgtgttgccaaagccatgcaatttatgacaagaggttacacggaaagcccggaagaaatacttcgttccgccctgttcaaagaagattatcgtcagatggtaatcgttaaagatatcgaaatctattctttatgcgaacaccacatgcttccgtttataggccacgcacacgtagcctatatcccgaacgggtacatcaccgggttgagtaaaattgcccgggtggttgaagccttttcccgaagacttcaagtgcaagagagattgacaaatgacataaaaaactgtatacaaaacacactcaatcctctcggcgttgccgtggtcattgaggcccaacacatgtgtatgatgatgcggggcgtacaaaaacaaaattcggtaacgaccacttccgattttagcggggcgttcgaaaaacttgctacgcgggaagagttcatccgactaattagtaacaaatttcattaaggaataaacatgacaaatatgaaaaaagcatttgttttcccgggccaaggagcccaatttgtaggtatgggtaaggacttatacgagaactcacccgaagcaaaagagttatttgaaaaggcaaatgaaatcctgggattccgcatcacggacttaatgttcgagggaactgacgaagatttaaagcaaaccaaagtaactcaaccggcgatattccttcactcggtgattcttgcaaaatcattgaaagaaaaaccggatatggtagcgggacattccctgggagaattctcggcacttgttgctaacgggacactttctttcgaagatggtctgcgtcttgttcacgccagagcgcttgccatgcaaaaagcatgcgaggcaaatccttccacgatggctgccattcttggattaccggatgaaaccgtggaaaatattttagccgaaattgacgatgttgtcgttccggcaaactacaactgcccgggacaaatcgttatctccggtactacacaaggaatcgccacggcttgcgagaaactgaaagcagccggagcgaaacgggctctcccgttaaaagttggaggtgctttccactccccgctgatggaacccgcccggaaagaattagctgatgccatcatgaacactcacttctcgcaaccctcgtgtccggtttaccaaaatgtaaatgcgcaacccgtatcagatccggaaaagatcaaaaagaacctggttgcccagttaacagcatccgtacgttggacgcaaaccgtacagaacatgttggcagacggggcatcgtctttcctagaaatcggtcccggaaacgtacttcaaggattgatcaaaaaagtaagtaccgaagttgaaacagcaggaatgcaataggttttatcttgaacagaatctattggttaaaagatacagctcaacttgaaacttgcaacaattttaaagcctcccatgggaggctttaaaattttatttatatctttgaacaaagataattcaagataaaatcgggatatgtcaaacaataaaacgaaaaaacaccgtacgattcaatacgtgtttaaaatcagtacgatcatcattatctgtggtctcattgtcttattacttcctaaaatagaaggttttaaatattcttaccaaaaaggaatgccttggaaatacgagacattgatcgcacccttggattttccgctgcacaaaagtgccgaagaacttgcctccgatattgaaaagatcaaagaagaacaagcccccatttttaacttcaaagaaacaaatattgaagcccagattaacaaactttcggaaaaaataaatgcatatcgaaccgcatacaacggaaaagatatggataaaatcattctaaaattacgggaaatttattccaaaggtatcctgctgatgccggaaaaaatggatccggctaaagtcaaaaacatccttatcgtcaagaacaacattgccttcgacgaaaaattttccaacgtgtacacgctaaagcaagcctacgaaacattagttcaatacatcgagagcctccacctggacaaatccacggaggaaggaatactcagtttaggcctgaataattatatcaacccgaacctggaatatgatgcaggaaaaacgggactcgccattgaaaccagcgtgaaaagcatcacgccgacccaagggatggtcaaccggggagatatcatcatatccaaaaacgacctggtaacccctgaaaaatataaagttttggagtctttccggatagaacacgagcaaagcttaggctcaaccattgaccgaatccggatctcagtagctcaaaccgtgttgaccttgatcgccatcatgagtttctccattttcctttatgtctcccggaaacggctattctacaataacagggatttctttttcctatatagtatgtttttactaaccattgccctaggaagtatcagctattttcaacacatcaacatcctcacgatccccgttttattcttcccaatcatcgtgaacatattattcgggacaagaccggctctttatctattgatcggtacaagcttactggtttcctattacgctcccaacaattatatgtacttcttcatgcaaatatcagccgggatcgtagccatgtttagcctctcacacctgcaacgccgttctcaactatttattgcactaggtctgatattcttaacttatatattggtctatggggctttcacgctcatacaagagggaactctcacaccaaaacatctgttcgctgtcgtgttcctcataataaatactggcttgttaagcttaatttatcccgccctttacttggtagaacgcctcttcgggtacacgtctgaaatcagtttactggaatactctaacccgaatcatccggccttacgcaacctgacgaaaaaagccccgggaacattccaacactccctaatggttgccaacctggcggaagaggcaatttatcacatcggaggtagcccgcttttagcccgtaccggggcattgtaccacgacatcgggaaaacatacaatccaatcatgttcgtggagaatcaaaccggggggttaaacccacacgatcccttggactttgacgaaagtgcccagatcattatcaaacacgtgacacaaggcttggaacttgccaataaatacaaattaccggaagtcctcaaagactttatccgcacacaccatggtaaaagtaaagtaaaatacttctactactcattcaaaaacaaatacccggacaaggaaatagatgaatccctattcacttatcctggtccggaccccgtaagaaaagagtgtgccgtagtcatgatggccgatggagtggaagcagcctcccgggctctggaaataaaggatgaagaaaacctaaccaaactggtgaataacttgattgacggccttcttcaagatggacgattcgctaacgcagacttgacattcaaggacatttccacggtgaaacgagtatttacagaaatgctcataaacgtgtaccatgcccgtattgcgtacccgaaattacaaaccaaagcataaccctcaagacctaaatatatgacacaaaaaccaataaccatcaaagacattgcagagaaattaaatatatccgtgtctaccgtctcccgtgcgctaaaagacaatcatgaaatcagcgcacaaacacgtaaaaccgtgcaggaactggcgaaacaactcggttacaaacccaatcctatcgctgtagccctgaaaacccataaaagtcattcgatcggagttattgttccccagatcgtgagtactttttttgccacagtcgtgaaaacgattgaggaagtagcagacggtcacggctacaacgttttagtcatatcctcgaacgaaagtttccaaaaagaacaaaaaagcgtggaagtactcatggccaaccgggcagatggaattatccttgccttatcacacgagacaaaagactatgaacacattaaaatgatacaggaatccggaacacctatcgtgctgttcgaccgcaccacaaacgaactcaacgtgtcacgggtcgtaacggatggtgtcaccgctgcattccaagccgttcaacacctcgtttccgaaggttgcaaaaaaatagctttactatgcggtcccgaaaacgttgccatcggtggcaatcgcatggaggggtacgaaaaagccatggaagccaaccatcttccggctaaaacagaacttatttggcactgctccgacttcacagtagaagcgggaaaagaagcaacacgccaactactctcccggcaagagaggccggatgccatattcggaatcacggatgacctggcaatcggggcgatcgaagccattaaagaaaaaggacttaatatcccggaagacatcgctgttgtcggtttttccaacacgaaacgctcacgctacatgaatccgacagtaagttccatcaaccagttcccggaaaaaatcggacgggctgcggcagaacttctgtttgatcaaatactgaacagcaaacacgcacagataaaaaaagaaatcattaactgtgaactgatcgttagagaatcttcggacagactatgtaaaactcgataaatgctaacataattgctaaaatcttaacaatataaattaaaaccttgttaattactcggttaaagattattaaacctaaaaatcaatggtttgaatgactatttttgtagaaattaataacagcagcccatggatgtagttgtggaaaatctgacgaaatttttcgaaaatcagaaagccgtggattcaatttcttttaaagcaaaaagaggtgaaatccttggattcctaggacctaacggtgcgggtaaaacaaccacgatgaaaatcatggcagggctactgactccggatttcggaaatatcacattcggggactattcgatttggaaacaggctggtaaaataaaaagcatcatcggttacctcccagaacgtaaccctttatatgacgaaatgaacgtgattgattttctattttttatttcaaaactccacaacattcctaaatacaaaatcacgtcacgtgttttggatatgattcgtttatgcgggttagacaacgataagcacaaacagatcggcgaattatccaagggataccgccaacgggtaggaattgctcaggcattaattcacgacccggaagtggtcattctcgatgaaccaacaacaggacttgaccccaaccagattttcggaatccgtaaaatcatcaaagaaattggggaagaaaaaacagttattttaagttcccacattctttctgaaatcgaaacaacttgcgatcaagtgatgatcatgagtaacgggaaaatcgttgccaatggcacgacatccgaacttcgtcgcaaatccgatgctgaatattgcctgaaaataggcatcaagggtggggcaacaaccaacattcacgaggcactgaacgacctgccgggagtactccacatcgagattattcataaacaaaatttcgaactccaatgtaaacccgatgtagaaatcgaaaagtcaatctttaacctttgccaagaaaacaactggtacatcagcgagttaactcccgtacaaaccagattggaagatatatttcgtaaagttacacaaaatgaataattcatgggtgcagttaaagttataataaacaaagaattaaaagtagcatttaattcattattgatatacatcgcatacacggctttcctttgtgtaacgggattcgtttgctggttctccgggaaaaacatcttttcaagcggacaagcctctctaagtaacctgttcaacgtgttttactggacgctctttttcctaataccggcactcacgatgaaaagtatttcagaagaacgcaaggacggaactttcgaactcttattctcaaagccgattaaaacatggcagctaatcatggggaaattctttgctatactattacaagtagttatatgtctggcattgacactcccctactatatcacgattgcctcgctgggtaacgttgaccatgccgttggcttttgcggttacctgggacttattctagtctgtggatgttacatcagtatcggaatgttcgcttcatccctcaccccgaacaccatcgtggccttctttatcacgtttgctattgaaatcggattcgtggttttatttgaatttattgcagaactatggggttccgggttcatggcagcattattcacgtacctctccatcggagaacattttgatgccattccccgcggagtgatcgacacgaaagacttgatatactttatcagcgtaattatcatatttttagcattagcaagacattatatctgtaaaaatcggttttaatatttagtacgaaagtgatgaaaaagaaattgatatacaatccgacctacctgattttatcactgatagcggtaaatattatttcctatttcctatttatcaggatcgacctcacgagtaacaaaaaatattctttaagccctgtcagcaaaacgatgatcaaaaaaatagacaaggatatttccgttaccctatttatgtccgaaggcctcacgcccgacaaaataaaactcggacgggaattccgacacttgctgaaagagtataagacaatcagtaacaaagcattcaccataagcacgatcattccgaacaacagtgacaaggaagctctagctgaacaactagggatagaacctatggcccaggaaatagccgagagagacatggtgaaaattcaaaaagtatactttggagccgtcatccagattggcaacaaaaaagagacaataaatattctcccgaccacagcattagaatacgaggttacccgccgtttaaaagaagcttgcgacacgaccaaaccaactattggtttcttacgtggacataacgaaatgttgaggcaaaaaactcaattaatcgagcatgaactatctcatagtgccaagattgaatccatgcgcatagaccagtttacagatctgaatgactacaaagtaatctgtatcgtgggaccgaaagaatcattcagcaaggaagaacttgttcgattgggacaatacctagaacaagggggaagactctatattgctttgaatcatgcggtcgggcaaatcagttacagccagaataacggtttcatcaaccgggtcggcatagaagatatgctggaagaattcgggctaaaaatcaactatgatttcgtcgtggataactattgcggacgcatattggtcacgcaggatcaaggatttctacaactccagagtgaccgccatttcccatatatacctatcatccagaacttcagttctcacgtaatcacgaaaggactgaatgccatgctattacaatttgccagtagtatcacgaatgtaaagacgacctccgcctacacgttcaccccgttggcaaaatcatcttccatttcaggcgtgcaaaaagttccggtattcttcgatatttataaaacttggacaagaaaacacgactttaatcaaccctataatactgtagccgcattattaaacaacgaagataacaacagtgctattgttgtcatcacggatgccgatttcatggaagacaaattctttgacccgttctatatcagcaatatcaattttgcagtaaactccattgaatggctggcggacgattccggattaattaaattgagaaacaagtatatcgagaatcagtcactaaaagtcgtaagcgattcctacaggagatttttaaaatataccaactttttcctgcctatcgtactggtattacttatcggattatatcaatacagagaatacaaaagaaaacggttgagacgctctcaaccgggtcatatcgattaggtgattattcacctaatcgttttattttttgatacaaggtctcgctcacctcgcataacggagatcttaacttctggcaggcaatcacgcctctggtatgtagcgctgcttttattcccgcaggatttccctcttcaaagagagctttaaacatctcacccaactgcaaatgaatctgccgagcctccccatactcgccttccaatgctaaatgtagcatcgtagagaattcactaggcatcacgtttgcaatcaccgaaataacaccactggcccctatagatactaacggtaaggcaataccatcatcccccgacagaaagataaagttctccggcattccggaaatgattgccgtagcctgttcaaaattcccggaagcctctttaatggcgatgatattctcaaaatcacgagctaacttcaaggttatcgccgcagtcatattcacggacgtacgccccggaacattatacagaatcacgggaagaggtgtatgctcggctatcgccttaaaatgattatacaacccttgttgagaaggtttattataatacggggttacactcaggatggcatctcccaaccgcagataagacagcgtggcaagatcatggatcacttgagccgtattatttcccccgattcccaaaacaatcggtaaacgtccggcattctcttcggcaatgacttgcacgacaaaagctctttcgtccgctgtcatcgttgctgcctcagacgtcgttcccaaagctaccagataatcgaccccaccatcaatcacataattcaccagattcctcaaagaatgttcatccacacgtcctgtttcgtcaaacggagtcactaaagcgacccctactcccgaaaactttttcatttcaatacgtatttatcttagttaataatttaaacaaccgatccataaaatcatctatatccctcactccatcaaaatcaatatcgtgcccagtactgtaaccaatcttacaagacgtcttggccgactccacgatataatccccccacacgtccggtttcaacgacaaatcaatcaacagtccctcctttctgttcagtacttcctgcacccgaggatcacgaaatccccccctgtaagaaattccagagctatccaagtaaatagcatcctgtatttgttccgagttcaatttaggctgccggataaaagcaagcaaacaaacgtccatatgtttggccagagcctcccgcaccctattaacagagaacaccggaacatcatcagtcacccaaaacacgatacattttttagctgtatctaaattataaaatgacaacactcgttcatcttttaccaccattttctttagatggcgctttttaaatccttctgcaatacacttaaacatataaaactatttatctgactcttactcctaactttatcatattcatttgtacatgaacagagtaacacaaatgtagtaataaaaactacatgcactccactttgttatttttcaaacataaaaaaagtatttgaaaaaattccgttaactcttgcaggaaaagagaacattctctatctttgcaacgcaaatcaagaaggactcgtagcttaatggatagagcacttggttacggcccaagaggttgtgggttcgactcccgccgagttcacgaaaatcccccgaaagacactttcgggggatttttcattagtcaaacaattgatccaaatctttcttcaactccggatctgaaggttgtttcgctctactccacaatatttgcccatctttatccaaaagaacaaatcgaggtactgccataaaaccattctctttcagaaaaggtgataaaataggagttatccaatgaacaccgtttatattcttctgtttcaggaattttttccatacagagatattattctccacacaaatagaaataaaacgtattggccgctccttatatttctgggataatttctcaaaataaggtatctgtcgcaggcaaggtccacaactcaaagaccatatttccaaaaatatataattccctttcaaatctccgaatttacactctctatccaatgtatcccggaatacataccgatccatatccttcacttgttgtatcgaatctcgttttgtttctgcctgtacattcacagccaaggctataaaagagaaaaaaaccagtaaatatttatatgttctcattttctattatttttccaaaaaacttttatcggtctatctgcaatcccttcatactttttcaacaatttcaactcattagtaaccggatcaagtgcatccgcatcgtaaacatatacacagcctttcaatccacttaatcccggatcataaactcctacatataattctttcccattctgagaaaagtcaaaacaagtaatttcgcaattattccccaccgtaaccacaggcgtttggggtaacttcggttccgcattccaattataccaacgatacaatttattcccgttcgtgtaaaataccgaattataagtatcattactctgtatcaaagattcccgggtaagtgttatctcatctgccaaataagtatacttccaagcataattcatgggtcccttgttacttgcatatccccgagtaataacaatctccttcggatcacttttagagcgacttaccaaacatgacatcaaatccttattcatcacgacattaatcaattcttctttggggaactcttgctgtctcgcataatatgaatacaaatcataaaaataataaagtgtcgatctctcgtaattcaagaaaaagtgataacttctcatcttagatacactcgttgacggaggaatcggagctcccgttattttcacgtacattttatccattttaggattcccttcaaagaactctccctcgtaaacagcaatatccgatttataattcacggttgcaaatcccccatcctcagacaacacgacataattcgtgatcgaacgatccttgctgcaaatacctatcggcttcacccacggaaaatctgtcttaaaatccgtcacgttatacaactcaaaagtctgcgcattcattcgatatattaacttgtctcccctcgaagcaataaatatatccggtcctattttctccgcatcagtcggatcatttaatgcataccccggatttacagaaacaaatgcagaggtgtaaaaggattcctccttacctgcctcaatctcttcccgacttaaagggcgcataaaagacacacgtccttttttatcttcatcagaactcaacacaaaaattccttgatcaaaagccgctttaacaaacaacgtaaaatacttaaatgtactaccatgctcattcgttacttttaatcgtaacttgtattctcccaactttttaaacgcatacctcaatacccgctcattagacaggaacttcaaagaatctgtgacagtcccgccaattgaagttttcgtataaccgtgataactccactcgtaactcaactccatgtcttccatggtctgttctatttcaggttcataaaccaattcaaaaccgaaatcaagattaatcgtgtcagaaggagcctgaattgagatctccgatattgccttaaccggtaacgtcgaatcgtcatcaatacacgcatgaaataagatgaccgcacacaaactaataaaccatatatttttcatcataatcattctcatattaattgttttaccaactgaaattaaagcaaggttgacggatcaggtatatcaactctcggatgcggatgtgcctgataatactcgtaagccggagtaatcacgtatttgatgaatgctatttcctgctggtaaggaaaactgtatgccttctccaaattacgcccgtattcctcgacaattcgttcgaacaacaggggatgagttgtctccaaatcccagtaataattataaatatccatcatcaacatctgggaataaggaccaaaatgtctttcactccaccatctcggacgcggcaattccgtatcggaaaattcaagtttacactcattccccataaccaaccgaaaatcatcattctcaaccaacttcattttaatcacaaagggatgttgtgttatttccggatcaagataacgatgcaacacaaaagaaattttaccgataattttatttgccggaatgataaaacttttggataactcgtaatgcaatccctcttttgccgtagtctcatctgcaactaattccactccaaatactcgatcatgatctttaggagtccccaacacacgcacagtcatatcataagcaaaatcctctcccttttgcattccgaattgatagtttaatgaatcggatgcaaaataaataccatcttttaattccacatcataagccatatagtccgtgctacatgaatacagccccgccatactcatcaccacgactacaaacgttatataatttaatgctaacactttcatcgctttcatttttattgttcatcggcctccgtatacctgtactcaaattcttcatcaggaataataaacgtgtacaactcatccgtcccttgtaaagtcgttttcaatgcatccacgtaaatatccatattcccccgtttcaacgtgtaaaaatactgaccttcctgtacaaactctttacgtcgttcttttacaatatcttcaagagtcacttggggagatcccggtcgatccttgtatttaaataatccccgcgacacgataaaagtatcaaaatatttttgagcctcgtccggatcactctccaataatgcctctgctgcaattaaatacatttcaggaatccgaatcatattaattccttcaatacttttggaagtatatgcgcccggattacttattttcgtctcattcacaattttcatacatcgcacaatcctgtccgactcctcttccccaatcaaaatacgaaaccaatcattcccgcgcatatcattcccatcttcctgtgccacggaataaagagccgtattatcatcagccggcaaccaagtgtatgtcatatcatacgtgtaaaaattcttttttacattatccaatatctgagttgtataaacaccccagacagcctccttttccgttatcgtcccggccataaaactccgtatattcaacttatcctccaacgggaatttacctgaatcaatcactttcttggcatatattaaagcgttctccaaatcacctttcatccaataaactcttgccaaaagagcctgcgcggcatacaaattaaaatgaatctcccgacacgtggcgaaaccatcatttagcacaaattttctgggataaacaagtaacgtctcatcctcttgcaataacaattctgcctcctttaaatcctttattaccaaatcataaacttctgacacggttttgaaaggtgatactgcaacctcgtaaatcgtcacgtaaggaatcccctgtgcgttaggctttgaacccacgtgaggagcaaacaagcgcaataaatcaaagtgcaggtaagcccgtaaacctaatgcttcccctttataaagtttataatagtgcatcgaattttcgctcttccgttccaaattacgcaatacattattcacgtacccgattgtctcgtatcccttattccatattaaattataataacttctcaacttctcgtgctccaaaatcaacatcgacttcacgttatcattgatcgaatttttcttataatactgggcaaaaacatccaataacccccaactcaaatattcaccatatagagcagaagcacttaaggtcgaatacgccccgtacaatgcatcttcaaatccttccggagtatcaaaatacacgtgttccacgatctcagccttgggcttgacactcaaaaagtcatcacaagccaccaaaaagaacagggataaaaataatatacaatattttctcatgataaatgatgattaaaaagttggactaatcgtaaaattgtaccctttactataaggataagccgtacctcgctcatacttcacggttgacattcttaacacatccgaaaatccaaccccgattcttaatttattcaacccgattttctttacccattctcgtttaaattcatacgagaaattcaatgaagaaagaaaaacttcatttttccgttctataaatcgttctgaatgaacgtaactcttggtatccgtaagtgcagtataatgaacaacatctccgggtttcttccatctctcggtaaaagcacgtacatccacattttcctgaggattaatccgctccactttactagcccgagttgtattataaatatctccaccgaaagtaaacgtcattgccgccgaaatactaaatcccttataccccacggaagttgttaaagctccctgcaaaaaaggaacagtatttcccaacgcaactttatcctttacatcataagagaacgtgtaagaaccatcttttttaatgaaaatctcctgtcccgtcgcggggtctattcccagtgaaggcacggcataaattgccgttgatgattccccctcttccaactgcactttaggcgcagcaactcccgtctcccgcatcgcactgtcattttgacgtttcatcgaattactgattttcttcaatttattctccgtatgatgcccggaaagccccattcgccaatacaattgattcgattttatcaataaacccgataatgaccactcgtacccccagtttcctgtctcacccaaattatccatcacgtttgtcactcccatagaaggaggcgttgaaatcgaaagtaacaaatctttcgtgtcttccttataaatatcaaaattagcacttaatcgtccttcccacatttctaatgtcgctcctacattatattttaccgtcgtctgccatttcaaacgatcgtttcccatagtaatcggtaaagctcccatactaatcagataattattatcctgtttatacagataagtcgtgatcgcttggtaatcggaaaaatttacactaccagtatatcctacactacctcgaattctaaaaatatcaaaccatcccaagtcggacaaaaacgattcattgtgcgcattccaccctatcccaacagaccagaaaggagcaaatcgtcgatcttttccaaatttcgaagaaccggaaacacggtaagatccatctacaaaataacgattcagaaaaattatattcaaattaccaaacacaccaacagaagaactcaaggattcactcccactcggctgcccattagtcgggtaactattggcaaaagccatatctgtcaaattccctttcaaaaaaccaattccagaaaaactattactattgctattgctcttattcgcattagcacccacattcaatgtcaatatcgaaccgttatcactcaaagttttgctgtatgttaatccaatacgtgcctgccagcttttccctctcatattggagataaaataacttcctcgtttacctggatctgtttccgtctcgaaggaactatgatcgggtgacacaaatttatctgattgcgaatctgataacgagtaactaaaagatccggtcaaataaaaacctttccagatatcccaacgtaatgtcagattattcgtgatcgtcttactctccgatttatcaaaactactcgtcgaggcatcatataacggattcctgaaatcataagaaagtttcttattccactcaccataagcattaaatggagtatcataaggattaattttcacgaattctgtaaaactgccataaggcgaagctttcgtatctgtcttgtttatatcggcacgataagtaatcgtaaggcgatctaccaaccggtaagaaaaataaaaagacaaaccataattattccggtaatcccctttcattactcctcgtttatccgaaaaattagctgttaccccataatccattcccgcacctcgtccagtcatactcaacgaatgactaaaagaagtcgaatttctcaaaggctttgccatccaatccgtatcagcacctttttgtatacgcttgaacttttcattataactttcatccagactaccatcagccgtattatataaaccagctaaacgttccaattccaacttttgagccgcattacaataatcgtaagaatcaacatccggaaactcaaaaccgggaacaaaattataacgaacccgaatatttttgtccgtaacttttttccgctctataacaataactccattggcagccttttctccatatattgaagtagctgaagcgtctttcaaaacatccacccgctcaatctcataaatatccaaatcatacaactgagtaatagaaatctccacaccatccaaaataattaatggagtattcaacccatattctccctgactggcgatagaggtcgtacctcgaataataatttccggaatataattcggattcgatcccatttcattattttcaacaagtcgcaagccaggagaaagcacagaaattgccttcaataaatttgtattcgacacggccaagatatcttctcccttcatcgttgtcaccgatccggtataactattcctattttgagtaaacattccattcacaatgacttcttccatctccgtcacttcctcttccaatgtcaccgaaagaaatttgcctcgtgtaaaagccactcgtttagtcttaaaaccaataaaactaaaaaccaaatgacctttatcctgtcttaaagttaattcaaactctccatccacattcgaagaacaacctaaactcgtactatccactcggattgtcactcctggaagcggttttccatgaacatctacaactttccctttgatcacattttcttgttcctgttctactccaatttttcttaaaggacgaatgacaatagtcttctcgataaattcataggaatactttcctttaagaatttctttcaacaccccctcaacattcatttttctagcagacaactgaattttttgatgagtatccagttcctcgttactataaaaaatatcatactgtaattgttttcggatcgtcgtaaagatctcttccaaagtcatcgcatcacgtgaaaatgttacggtttcccgttgtccaaaagccgttgcactcacctgacataatcccgcaaaaaggaaaaaagcaatcaatttcataagaaataaccatttttttactttaccccaagggtaaaaaaattctctgcaatcattttttttcatatatttgatcattgaagtttgtaattgtctttaactgccatgccaatgaatagttaaagacgttgacaatcattggggataggagccgcaacctcttatcccttttttattttactcacggttatattctttccggaaatttcaaaatgaatatctgtcgttttttccaaaaattgtaacacttcatttaaaggacgatgtttattaatcgttccggaaaaatgcatccgtttaatctcctcgtcttgataattcatggtaaaatcataccaacgctctaactttctaactatatcctcgaaagcataagcactaaagtaaaatttcccatctacccatgaggtatacaattcc

SEQ ID NO: 10894 - DNA, 8634 bp, Unknown
  gut microbiota DNA sequence
tttacatttgcgtgtagatgaacttattagtataattgataaaattcgtggtgtgaaaatttgtttgttagtgataggaaagacagatgcggagtttgtacgggcggggattgccgagtacgagaaacgtttgaaatattatatcccttacgaaatgaaggtgattccggatgtgcggaacacgaaaaacatgagtgagatacaacaaaaagaacgtgagggagaattgttgttggggcagttggaggcggcggattacgtgattttgttggatgagaaaggaaacgagtatacttcgaaggcttttgcggactttttggcacagaagatgctgacaagtatgaaacgacttgtatttattatcggggggccttacggtttttcggaagaagtatataaacgtgcaaacatgaaaatatcactatccaagatgactttttctcaccaaatggtgagaatgattttcacggagcaattatatagggcaatgactatattgaaaggagaaccttatcatcatgaataaagcgagggtgaaaagcatgaagaagttttggcttgtactatcacttgccatgttctgtttgatcgtgggctctttgtgggagttttctctgaatgattggtctgcggacaagaaaatatttctttttcaagaacggttgaaattcgaggagaaacggcttgacgagcagttgcggaaactggatcacgaggcagagcggaaaaagccggaatggaaaggtaagcagtcagtgctggttggctttaaggggagtaagttagtttactggagtaacgagagagtgggggcgcctcgtttgtacgagatattgtctgcggggagtgacttcgtgaaaattaataatctttattttgatgttcgtaaacatgccgtcggggatacggtttattatgcgctcctgtttataaaggaggattacccgtattcgagtaattacgtgaaaagtcattttaacccgtcgttaggtgagaacttggatgatgcgagtaaggtgattattcgggaaacgtgggaaaaaggaggacagctcgtgtacaaccgggacgggaggccgttgttcaagatcgagagtcaggtggagcgtggggatgttgtacccacttattttctgttgattccttacatcatgttccttctcctgctgttctatgcttacgaaatatccttggaccgggcccggtcgttccggatgcaattattccacgtgttcggtttcttttttctcattgtgttgttgcgttccttgatggttgattacaaggttccgcaagtgctttattctctgcctattttcacgacgagtcagattgggggacggttaattgtgtcggtgggggatttgtttgtcacaatgttctgtctggcacattatttttttattacctttaacaagctgaaaataaagtatgacgagcctcgtttggtgcgttataaatatatattccttgtgggattcgtgataggcgtgtttttctacacgaatttgttacacttttcgattaacgcattaatcgagagtacgcaggtcagcttgaatatagcccgtcttattaatgtcgatttctcgtcgatcgtggcttttatcacgttgattattgccgggatgggatttatcgtgctgatcaacagttctgtgcgttattttcagaatttattctctatcagtcaagcgttttggggggtaactggtgtacttgttttttgtgcagcgctttgctatttttttaatttctctctgtccccgttggagtgtctttttccgttatcgctttacctgttgtttattctgggggtgtatttgatgaaacaggatgcccaaaagagtatttttatgatcgcactcgtggtggtctgtatttatatcatttttctggcaaagagtagcgagatccatcgggaacaaggggtgagggcaagttttgcgaacgagattatcaaggaaagagatccgattttcgagcataaattactagaagtcaatgatgagataaagcaaagccagaaggcggattcgctggtgaaggtgggagatgtggatttgttgtcggcttatatttcaagcgagttgctggatatgacgggattctactatacttgtaaggcgataatatgtgatcctcgggattcgatattgttgacgcctatctccgaaaagtatggttgtgacgagtattacgataagctgattgatagtttgggaactcgtatcggttacacgtcgtttttctacataaaggattttgacggggtagttgagtatctcggtcgtttttctttctctacacctcggggtggtagttgcgtatatatccgtttcgagtcgaaaaatcggcatgaagggatagggtatgcccaaattttatcgagggagatcggtgtggagaaagaggtgcgttatccttattcttatgcgaagtacaagaatgggatactggtggattccaaaggggactttagttacccacgtaatttggagcgtttcgggaagatcgaacacgcccgtattatgaataaagacgggttttcgcacatggtgattcccgtggagaatgatggggtttgtattgtgagtttgggggatgacgtgtttgcactctactacctgaacctgttgtacgctatttttgtcagtggtatcttgacttcttacgggatgtttttccgatttgacgggggatggggaagttttcggcagacgagtctcacgttgagaattaaaaagaatattatcacgttgattggtgcgttgttcttgatcatgacaatcatgagtattatcgtgaatgccgagagtttcgaacgtcggcatagttcgaaggtgatagagttatctcggtatataacagatgaattggagcataatgattgtgtggatgctgcgaagtgtccccagatattgaagaagttgaaagatatgtccgaggttctttgggtagatattaatatctataactgggatggagttctcgtggcgacttctcgtcccgtgatatttgagaaggggtttgacggggctttgttgaacccaaaggcttttgaacagattgttaaaaaagaacaaattaattttgttcaagatgagaaaatcgtggagttgacatatatggccgtgtatatgccattggtgctggaaaatggggagaggtatgtgttgagtatcccgtattttacccgtggggaggagctgaataaggatattttgctgatcgtgattattgcggtgaatattgccatgattgtgatggtgcttgcttttatcctgtcgagtatcgtagccgagcggatcacgaaaccgctacaagtggtgaatgagaaactgcgtcagatgagggtggggggaaagaacgagaagatcgtgtaccacgagcgggatgaaatcggtatgctggtgaaggagtataacgagatggttgataagctggaggcgaacgtgaagaagttagcgaagtcggaacgggagagtgcttggcgggaaatggcccggcagattgctcacgaaatcaaaaacccgttgaccccgatgaagttaaatttgcagttcatgcaacgcacgttgcagaaaggggatatggaggaagtgcgccagcggtttaaggatatttcagctgtgttgatcgaacagattgatcatatggcatcgattgcctcggcattctctgattttgccaagttacaggaggcgaataacgagtggttcgacctgagtgaactggtaaacggctgtgcaaaattgttccatgagaacgtggattccatggaatgtgatattgagccgaatgtttccgtgtatggtgatcgagatcaagtgaaccgggtgatcgtgaatttattaaagaacgcagagcagagtatcccggaaggacgggaagggcacgtgttggtacgactgaaaacggtgttaggcaagatcatattgcttgttaaagataacggttgcgggatatcggaaagtatccgggatcgaatttccgagcctaatttcacgacgaagtccggaggtacgggactaggattagcgatgtcttacaagattatagaagcgatgggaggttcgatcacttttgagagtgtggagaatgaagggacaacgttctatgtagtgctgaaacaaagcaattgaaaatggagaattgaaagttgaaaatgaatatatacggttaaaagagtgtttgattgtgggatgaaatctaaaatttaagatttaaaatctaaaattcttaaggcggtgtcgactactcgtttggggaggatgtcgaccatgcatttctgccaggtggattgcttgcatttgccgtgaccgtctttggtacaagggcggcaaggaaggtcgacttcgatgacttcggcttgtttgcccgtggggtaaccgaaggcagtcggacccatcaaggcgatagctttcgtgtggaacaggtctgcggcgtgaagaaaaccagtatccccgctgatcacgaggttggattgcttcacgaggtaacaggattccaatagactggtttttcctgctaggttgttaactctttcaggtgcgatggcctggatggtctcgcagaacgtgtcgcttgggcctgccagaatgataaaacggtagtcgggcataagttggatcacttgttgccagttactgaccggccaacgtttcatttcccagttggcggaagggacgagcgtgatagttttcggggtaagcgtacggtgaaaacgttcctcgtattctgccggaaaattccaatcactgtaatcggattcaaaattcgtgattccccatgtggctagtggtttttggtaagaaatgattccccggaacggcttgtcgaatttgtttatccgtagtttaaaaagcaagaatcgtttccagcggtctttgtggcgcaaggtgtagcgtggtcctcttggaaaaaggtagtaaaggggtgggagcaacacggctttcaagatgttggagcgtatgttgctgtgagcatcgtagatataatcgaatttctcggctttcagttgacgggccatttgtagtaaacctttgaatcccgttttcttatcgaatccccatacccggttgatgcgtttatccatgttaagaaaggaacccatgtcttttcgggcaatccagtggatttcagcattggggaaatggttcttgatgccgtttacgacattcatgcattggatgatgtctccgatggagctgaacctgataatgagaaatttagccatatttaaaacgaatttgcaacaaaagtaataaaaatgtagtttatctatcgtaaaaagaactattttcgtgttcagatcataaaaagtaatatcatgaagaaacacatacctaacttgattacctgtatgaacgttacgtccggtacggtggccatttatgccgcttttcacgggcatttgtatcttgctgcctggctcgtgattctggcgatggtattcgatttctttgatggtttcgctgctcgtttgttgcacgtgaagtcggaaatgggcaaggaactggattccttggccgacatggttagtttcggggtgatgccttccgtgatggcttttttcttgattcgcgatctggggtatagtggtggtggattgtttaccgtaaattcttggcagggagcgtttatgtacgtgccgtttctggttccggctttctcggcttatcgcttggctaagttcaatctggatgtgcgacaaactcattcgtttatcggtttgccgaccccgtcgaacgcattgttttgggtgatgttggtatttacccgttattatcaggaagagtttttcacggcgatgtggggtaagccgtggttgttggctcttttcgccttagtgctggccattttgctgatcagtgaaatcccgatgttctcgttgaagttaaccagcttttcgtggaacgggaatgctcttttatattgtttcttgggagctgtaataatcggttttgtcgtttggggtgtgaaagcgttatcttgtatgatacccgtttatatcttgatttcttgttatgatttcaagagggtgtggaattggagattttgggggatacttgtggtgcttttcctgttactgaattgggcggcagcgtttatcgttttcccggcttatttgattgtgcttatcgtgaaattgacagcccgggcagatcaatagccgggtcataatccacgaagtcatagttcggggagatcacggcaggggcttccacgatgattgttttgtttttcaccggggagggttgtatgtttgtcatgttcgtcattccgtctccttggaatatgtcctgttgggagatcaccacgattccggctacgacggctgccgataaaccgaatttgaataaacgggtaacgaggttaccggattcggtgttaatcagttcattttgagttttacggatctttttcccgttgatagttaccaaaggcaaggattccataccgatcacgtccggcaggaagttgtggttcttggattcgaagagaacgttgaaccggcggtcgaccgaaaaggttccgattgttccgaagtctactttttgtttctggttcaagcgtaccttgatttcttcacaaaatagagccagacgtcgttgcgctttctcgtaatcaatctgttctttacgtgcgatccaatcaatcagaagaccgtcattttgtttcaggtgcttgttgaacatgacttttttagacgggggaacgatggttcccgttttctcgttgatgcttgcggacgtgtagtcacaaatgaaccctccgaatcccggaacgatcacgcaatcatgtagatagagtaattcttcgatatgttcaacatatttattcataccgcaaaggtaagaaaaaacgtaaggttgtcaaactcattttaggcatttcggattattattatttactttgctgtgtctattgcagacactcagaatgttataaattgagataaaattattggcgtatgaaaatttttgtgacaggaggtacagggtatataggttcccacacggtagtcgaacttcagaaaaatggttatgatgtaattattgctgacaatctcgtgaattcgagtatggacgtgctggatggaatagaaaagatctcggggatacgtcccgagtttgaagagatagaccttactgatggggaggttacacgggatttctttgcccgtcattcggatatacgggccgtgattcattttgctgctttgaaggccgtgggagagtctgtgaacaagcctttggagtattatttcaataatttgaactctttgatgaacgtgttgacttgtatgcgggaatttaaggtgccgaatttggtgttttcttcttcctgtacggtgtatgggcaggccgatgtgttgccagtaacggaaaaaacacctcgtcatgaggctgaatctccttacgggaacacgaaggtgatgagtgaagatattattcgggatttgatgcgagtggaacctgacatgaaagctctggcattgcgctattttaacccgatcggggctcatccgacagcgtttatcggagagttacccaatggagttcccaataatttgattccttatttgacacaaacggctatcgggattcgtgagcaattgagcgtgttcggtgacgattacaacacgccggatggttctccgttacgcgactatattgacgtggtggatctggctcaggcgcacgtggtagctatccgtcggttgttggaagggaagaataagaagaattacgagtttttcaatatcggtacgggaaaggcgctttccgtgctggaaattattcacgcttttgaacgtgcaaccggagtaaaagtgaattacaaggtcgtgggacgccgtgctggggacatcgagaaggtttgggccgatacgactttggccaataatgagctgggatggaaggctgtcacgccgatcgaggagactctggcaaatgcttggaaatggcagaaagcattggataagtaaaaaaggtgggatttccccaccttttttagtctttattctaccgtcacggatttagccaagttccttggcatatccacgttgcaacctcgcatcacagcaatgtgataggagatgagttgtaacggaatcacgttcagaagtggggaaagatattccagtgtttcaggaatttcgatcacgtgttccgccagttttttcacttgtgcatcgttatcgttgacaagagcgatcacgtgtcctttacgggactggatctctttgatgttggaaacgatcttgtcgtaatagttgtcattcgtggcgatggcaaaaaccggcatgttctcgtcgattaaagcgatcgggccgtgtttcatttccgctgccgggtaaccttccgcatggatataagaaatctccttcagttttagcgcaccttctagggcaaccgggaattgacaacctcttcctaggtaaatggcgttcgtagagtccttgtaaatagctgctatctccttgatcttgtcattcttttccagaatcgctttcaccttgtccggtaagttatacagttcgttgatatattttttgtacagttcgtcggataatgttcccttgcggtggccgatctgtaaggccatcatggccaacacggatatttg

SEQ ID NO: 10895 - DNA, 1982 bp, Unknown
  gut microbiota DNA sequence
gaacttcgacttataacattgaattggaatattcgttgtttaataacaagttggtaggaaattttagttattattatcgccatacgacggatgcattcatgtctaaaactgtttcaagaattaatggtgttagtagttataccgtgaaccggggaacgttgaataatcaaggatttgagtttgatattaattttacgcccattgaaaatcttggagcaggtggagaaaaacgtggttttgtgtggcgtataaatccaaatttcggttctgtatttaatcagttggtagataaaataaagtccaaagacaaagttttgcaggatgaaattaggtatggagattatttggacggtcgggtgcaagttgccggacgtcccgtgaatacattttattcttataaatttaagggtttggatcctaaggatggacgtcctactttttatggaacggatgcgaacgaaattgttggaacggataaaaatgggaatgagattacccgtcaaaaatcatacgagttgatgacgttgggagatgtttgtatggaagtgatggaacattccggttgtagagaaccttttttacagggaagtatcagtaactatttgggttggagaaattgggggttatctttcaatttagcttatagcgtgggggcgaagatccgtttgttacagatgtatggaagtaataattcggcagtaccggctccggtgatgaatatgagaggtgaatttgttcatcgttggcgacgtcccggtgatgaagaatttacgaatgttccgggtttgttggatgctaagagttacgaaaaaacgaggactccctggtggaatgataagccatatgaatttgccggaacaatttggaatatgtatgacaattctaatgtgcgtgttgtttcgggagattatttgaaattgacaagtttgtcgttacgttatattgttccggagagaatttgtcataaaatgtatatgaagtcggcttatttgaatgtaagtggaacgaatctatttaccttatgcagtaaaaagctgaaagggcaagatccgtctcaatcggggtcttccgaattgataaacatatctgttcgacctacttatagtcttagtttgaatgtaacattttaataagtaaaaagatgaaaaggtatttaatcttaatattttgtgtgttattgtttaattcctgtgggaaatttttggaagaattttctcaagatttagcttatgctgaaagttgtaccgatttggacgagattcttattggtaatggatacatggaacaaccgttatattttgcagaagcgggtgtttatggtaatggatactatccttatattcatgtgatggatgatgatgttgcaatgacgatatttagaaaggatggttctatagatgttattaacaatgtggcttctttcaaaaatttctatgattggtctgaccagttaacgattaatccaaaaacagacgaggagtgggaagacaaagattgggaaaaaatatatagccatattgcctatttgaatgtcattattgctcatgtgaaaaagtttacgcatgactctgttgaagtgcggaacagaatagagggagaggctcgttttttgcgaggggcttattactatctgttgatcaatctttatgcaaatccttacgtgaaagaaacggcgtctagtgacatgggggtacctttaaatcttacagaggatattgtggatgaatattataaacgtaattccatggaagagtgctatcgtgtgattgtcgaggatctgaaaagtgctgctgataagttgaaaggtgttactcaaccgacgatctacagggtgaatgagcttgctgtacgaattttgttaagtagagtgtatctatatatgggggaatggcaattcgctttagatgaatgtcaaaaggcgttggcattggaaggggtggaattgatggatttgaaatcttttccgggaagagaagaagacc

SEQ ID NO: 10896 - DNA, 1223 bp, Unknown
  gut microbiota DNA sequence
ggcaaatatgagtgaattttccactattgagacggattacacttatgcggaatcttataaaatcgtggaacaagcatttaagtcaattttttacaagaagtcaagtattttgacggaagaagcaaaaaaatgttaaattcggcagaaatgagaatttacttattaggtggggacgggcaatcaggagttcagacggtgaacggatatcaagattttattcaccatatatctgaaggaggaacgtttagttcttcggctccaggagtaccaatttactgtggttttgcttacttgactgataattctcctgtgaagattaaatttaaaattaacatctcttcagatcctgtttatgcgaggatagaatatcataattataggaaggactatttcgatagagtttgctttgcaaggtacggagatgcttatctttcattttattctgatataaatgggacaataaagacggttcccgctgagtttatcaaatttaaatataggcttgcatatagatattatgaatgttatgatgcgaactgggatgaactcacaaaggatatatttgagatcaaggatgaaggaattatagaaaatatctatcatgaaaactctatactgttgaagaagaatttgtgtttggaacagctaaaagattatatagagtatgtaggagagaaaacatggtgtcaagaatctggttatcagttgacgaatggagattattataaacttttattgcctaaagttattgatcattcgtatgtttctgtatggccagaagagaattattaataattgaacttggaaattgaaatgatgtaaatgaatggttgaccactatccactaaatatattcagtgaaattcaattttataggttgtctttgtatatcagttattttcagatgttttcatttggtttgaatactcacggaatttcacggttttagaaaatattggtactatttgatactatatttcgggatatattttgtacctttgcatcacagtaaccaagatatatcgcgtatggatttcatcttcatcaaatcatccaaggccggaaaggaggactacggttccatctatgcccgtgtgcgcagcggaaaggcgaacatgaaagtcgtgacgggcttcaccatcaaacagcttgaatgggaaaagtaccgcagcctgcaatacacctcgtcagccctgatgtcgagcatcgggataaagtatggg

SEQ ID NO: 10897 - DNA, 66773 bp, Unknown
  gut microbiota DNA sequence
accactggattttgttgctactgacataagtttacttgttgaacaagtcaacttttttaggataagacacaccaactatatatccgttaactatctttttgtcaatacttggctcgtggttaggctatcctttccctataccataaacatagcatgaacatagtaacaacataacaacaacatagatttgtgttcacgttctgtacgcggtatgtttgagatgactttatgtggtagaggaaccatagaaaaaggatagggaaaggcgggatcaaatcaaaaaataaaacgagttttaatacttgtaataaaaattttatcacatatatttgcgagacgtatctttaatccttactatgcaagagaaagaattcgaacatattttcaaatgctattatagtgatatatataattttatatatcattatataatggatggagatgatgcggaagatctagcccaggatgtttttatccgttttttcgagaaatacaagtccttgccggaagaagtcaattccaaacaatacctcttgtctattgccaaaaaccagtgtattagtttcctacgccacaagaatgtcattgaccgaaataacctcaaatactttgaaaccttattattcagtgccacctcagagtacgacaccacgtatgatgatttgtttttaaaattaaatattgccatggacaaactttccgagctgcaaaagcaaattgtccaaatgaaattgaccggaaaagattactccgaaatgtctgaagaactaggcgtaactcactctcagatccataaaaacatcaaaaaagcctatgataaaatcagacattacgttagaaaaaatgaaacgctcatgcttattctatcacctctattttcacttttacatcattagcagtacatccatccgttttgaattctatgatcatcccagtatgagtccacatcgtctggaaatcccgatctttcagttctcctgcttttaatggaaacgagcgacgggaacgaatcccactagtttcaccgtcctctcttatggtcaaaatagcatcacaatccaaggtaccttttaccgtgatatgtaacctttgaggagtttctgtttccgtgttatagacgaaagtggctaattgcttattattaatagtaaacgtctgttcctcaacaactccaccggatgattgcatccacatgacaactcccaataccaacatgattaaaatcgcaaaaacatatagaattcttttcaatttcttactcgtcataagtacctatttttgttatcaatgattattacaaaactagcaatttaaggtcaaatacccaaaaaataattattactcgcaaaactgcaagatgtaacttgcagttttattaaattattgcttgttatatcatgcaatttttattagatttgcagaaatgacctgaaaaacattaatatatggaaaatctatttagaacatttagattacttttgaacaacaccacaacagatttcatacgttatctacacgatcaaatttcatggaacagccgtctggtagctatacttggagcaagaggagtcggcaaaaccaccttgctattacaacatataaaactccatgataacattaatgaaactctttttgtcacggcagatgacctctatttttctacaaatacactttacgatcttgcactgaaattttatcagcaagggggaaaaaagttatatattgacgaaatccataaatatcaagcatggtccagagagattaaaaatatatatgatcaaattcccgaactaaacgtaatatacacgggttcttctattcttgatctggaacaaggaggagccgatctcagccgtcgcaaattagaatatcacatgacaggattgtcattcagggaatatctgaatatagccaaaaatataaaattacctttacattcattcgaagacatattatctaataaaatacaattcccatacgataaggaacgcccattacaattatttaaagagtacttgcaacagggttattacccgttttttaaagaagacggttattacattcgtttgaaaagtgttttaaatcaaacacttgaaaatgatattccccattttgcacaaatgaatatttccacggcacaaaagctaaaaagattactatatatcgtggcacaaagtgttccctttaaaccgaatttctcgaaactttcaagagatttagatgtgaaccgtaattttgtacccgacttgatgttctatctcgaaaaagcaggagtaatcaaccaattacggaatgataccaaaggaataaaactacttggtaaagtggacaaagtgtatcttaataatacaaatcttgcatacgccatttcagacactataccagatattggaaacgtgagggaaacggtgttcttttctttgatgcgaaccacccaagaagtcaccacatcatccgttgcagatttcaatattggtaaatatacctttgaaattggcggcaaaaataaagcacaaaagcaaattgaaggaatagaaaatgcttatgtcgtaaaagatgatatcgaatacggatacaaaaacattattcctctttgggcattcggattaacctactgaaaaaactaaaagataaaagttggaggaatgctttcatcagcttttaacttttagtttttatctttcatcttcctagtattcatcccaactcttaatcgcaatctcggtagggtctaccttgcaaatagcatagatgaaagcactggccaaacgggcattcgtgatcaacgggatgttgtaatccacggcagcacgacggattttatagccattatccagttcccgcttcgtgtgatttttcgggatattaataaccagatctatcttccgatcatgtaaatattccatgatatttggttccttatcttcatccggccagtaaaggatttgagtatcaattccattctctttaaaaaatttagccgttcctgccgtgctgtaaatattataccctttttcgatcagcatccgggtagagttcagcaactctactttggaacgagtcggaccggaagaaatcaaaatgttcttcttcgggatacgatggccgacagaaagcatacttttcaatatggcctcgtaataattctcccctatacagcctacttctcccgtggatgccatatccactcccaacacaggatcagccttcaaaagccgggcaaaagagaattgtgaggccttcactcccacgtaatccagatcaaataccgatttattcaaggattcaactttctcgcccaacataattcgagtggccatatcgataaagttatatttcaatactttcgacacgaaggggaaacttctcgatgcccgcaaattacactcgatgacctttatatcattgtctttcgccaaaaactgcatattaaacggaccggatatgttcagttctttagcgatggaacgggcaatctttttaattcgacggattgtctccacataaagtttctgtgccggaaaaacaatagtcgcatcaccggaatgtactccggcaaattccacgtgttcactgatagcgtaagccttcacctccccctcttgtgccacggcatcaatctctacctctttcgcctgttcgataaactcggacaccacaacaggatggtctttcgatacctctgccgctaactccaagaaatgtaacaactcatctttatttgacaccacgttcatcgcagccccggatagcacgtaagaaggacgaatcaacacgggaaaacccacggtatccacgaaatgataaatgtcctctatactagttaactcactccaacgaggctggtcgatacccaactcgtcacacatggtagagaacttctgacggtcttctgcccgatcgatggattcgggagaagtccctagaatattcacgtgttggctgtgtaaccgcatagccaagttattcggaatctggccacccgtggaaacaattactcctttcgattcttcaagttcgacaatgtccatcacccgttcgaacgacaattcatcaaaatagaggcgatcgcaagtatcgtaatccgtgctgaccgtttcggggttatagttaatcatcaccgaacgataaccggctttccggatcgtattcaaagcactcacgccacaccaatcgaattccacgctactacctatgcgataagcccccgaccccaatacgatcacggaacgcccgtcatgttcgtatttcacgtcattttcgaacccgttgtaggtgacatacaagtaatttgtcatagccggatattcacccgccagcgtgtcaatttgtttcacacagggcaacactcccagttttttccgataatcccgaaccttcaacattttctcatggtgagataacgaggtattcttcacggtcaatcgtccgatttggaaatcagagaaaccatattgttttgccttacgcaataaactttcactgacatccgtttctttatcaaacttacttaattcttcttttaataagtgaatgttttccaatcgttgcaagaaccaatgatcaattttcgtcaattcatgaattttctccacgctatatcccttgtcgaaagccccggcaatggcaaatatccgggaatctgtcggattcactaactcttcatcaatatcttttattttcaacacgttaccgacaaaaccatgcattccttgcccgatcatccggattcctttttgaattgcctcctcaaaagaccgtccgatagccatgatttctcccacacttttcatggaagaaccaatcactttggaaactccctcgaatttattcaaatcccaacgaggtattttgcaaaccacgtaatctaatgccggctcgaaacatgcggtggtgactttggttaccgagtttttgatctcgtgtaacccgtatcccatacccaatttcgcggcaacaaaagccaaagggtacccggttgccttggatgccaatgcactggaccgtgaaagacgagcgtttacctctattacccgataatcttccgagttcggatccagagcatactgcacgttacattcacccacgatgcctatatgccggattatttttatagctatcgatctcaatttatggtattcactattacttaaagtctgtgatggagcaactactatactctccccggtatgaattcccaacggatcgaagttttccatgttacagacggtaatacagttatcgtatttatcacgcactacttcatattctacctccttccatcctttcaaagattcttccactaaaacctgaggagaataagagaaagcactcgtagccaaccgttccaactcttctttattcgaacaaaaaccggaacccaatcctcccagcgtgtaagcagcccgaataatcaccggaaaacctagtttatccaccgcagcgaatgcttcttccatgtcactggcagcaatactttttggtgttttcacgttaatttctgccaatttcccagcaaagatttcccggtcttcggtatctatgatggcttgtacaggcgttccgagtacttgcacgttatacttttctaaaacacccgatttataaagagccactccacaattcaatgcagtttgtcccccgaaagaaagaagaataccatccggacgttccttttcgatcacctgttccacgaattccggtgtcacgggtaaatagtatatcttgtcggctaccccttccgatgtctgtaccgtggctatattcggatttatcaacacgctgtaaataccttcttcccgaagtgctttcaaagcctgtgatcctgaataatcaaactctccggcctcccctattttcaacgctcccgatcccagaagcaatacctttgctatacccattcttattttagatttaaaattttagattataacccactaatcaccccgcttttactcataaatcgtaattaatcaatcgtaaattaatttgttttcaattacttttttgatgttttcattgcagcaataaaattgtcaaaaagaaactccgtatccacaggaccactcgatgcctccgggtgaaattgagccgagaaaaaaagttttttcttatgccggatgccctcgtttgtgccgtcattcacgttcacgaacagcggttcccagtcagtgggaagtgttgtctcatctatcgcaaatccatgattctgggaagtaatataacaacgggttccaccggggttcatgaccggttgattgtgacttctatgaccgtattttaatttataggtagaggccccggcagcccttgccatgagttgatttcccaaacaaatacccatgataggggtatttcctttcaatgctttccgtatatgctctatcgtttcctcgcaacgagagggatctcccggcccattagaaagaaaaataccatcgaatttttccttcgtgaaatcgtaattccacggaactcgtttcacggtaacatcccgttttaacaagcatcgcaatatattgttttttaccccgcaatccaccaaaaccactttatatttcccattcccgtattccataatctttttcgtggaaacctcggcaacgatattgtctttgttcggatcgtaaaagggtatgtcttcatcatcaaacagtatcttacccagcatcgctccatgatcccttaatttttgggttaatgctcgggtatctataccaaaaagccccggaatctgttgttcttttaaccaatctccgagacttttttgtgaattccaatgactataccgggaagagtaatccgaaatgaccaaagctttacaatgaatcttatccgactcgaagaacttggatattccgtctcgttcgtcatcgaccgggaccccgtaatttccaatcatgggataagtcggaaccagaatttgccccctataagaagggtctgttaaactctctggataaccggtcattgccgtataaaaaacaacttccccggacaccgatttctcgtaaccaaaggaagttccctcataaactgtcccgtcttctaaaacgagacgggctttctttaattcatgcatatttattcaatcaatcaactataaattaaattttatgcaaaaatacagtgaatatatgaatttacaaagcatatttatgaaaataaatatttttaagattacaggaatatcaacacactgtattcaaaaacttattaaaccgtgatgacaggtatcgactttattctcatcgtgccacttccaaatgcctcgcatccgcataatataccctgctattaaggttgtaatatcctctctttattttatattcccatattgaatataaaacaaatttccctaactttgtgaggcgtaatataaacacctatgagaaataaaacgaaacgcctattggccattcgaaaacttattgagaacgaacagatctgctcgcaggaagaactattgttcagactaaaagaactaaatgtagaggcaacgcaaagtacgttatcacgcgatcttaaatttatgagagtagctaaaatacctcacaaagataaaggttacatatatattattccggacagtattcagaatgaacaaaccgatgaaaaagcatccaccatcgtgacggacgccatttcaagcattgatttttcagggaatattgccgtgatgaaaactcttcccggatatgcgaaagccgtgaccgttctaattgataatgaaaattattttgaggtactaggaactatcggcggtgacgatacagttcttattgtcatgcgggaaggcgttacccataacgagttactggatgctctctcgtctatacacgctaatattcattcactatttaaataatcattttgaattttcaactttcaattttgcattatatcgaaaatagtttgtaaacttgcaccccgtattttcaagaatataagcatgaatattataactaagaaaacggaattaagcaccgttatcgagaagttgaagagtgagggaaaaacggtgggtttagtgccaacaatgggtgcacttcacgaaggtcacatatccctcgtgaaagcgtgtaaaaaaggaaatgatattgccgtggtcagcgtattcgtgaacccgacgcagtttaatgataaagaagatttgaaacgttatccccgtacgctggacaaagatgtagctttactagaaaaaaacggatgtgattacgtgttcgctcccagcgtggaggagatgtacccggaagaagatacacgtgtatttaacttcggatacgtggaaagtgttatggaaggagcaaaacgtccgggacattttaatggcgtgggacaaatcgtaagcaaattattcgacattgtacggccacaccgggcatatttcggaatgaaggatttccagcaaatcgcagtgattaaaaacatggtgaaacaattacattatgatctcgaaattgtttcatgccctatcatccgggaaacagacgggctggccatgagttccagaaatactttactggaaccggaatacaggaaaaatgccccgcatattcataaagtactcgaagaagctactcacttaacttcccaaatgaacgtggaagaattaaaaaaatgggtagtagacgaaatcaataaaaacccttatctggaaactgaatattttgagatcgtggacgacacagaactgaaaactattcaagactggagtgaaaacaatgtaaaagttggatgcattgcggtttatgccggtaaaatccgattaattgataatattgtattttaaactaacacgaagatgtttatagaagtagtaaaatctaaacttcataaggttaccgttactgatgctaaccttcagtacgtgggcagtatcactattgatgaagctctgttagaggcagctaacatgatcgaaaacgaaaaagttcagatcgtgaacattaacaatggtgagagattcgatacctatatcatcaaaggagaacgtaattcgggtattatttgcctgaatggtccggcagcacgtaaatgtgccgtgggtgacgtgatcattattatctcatacgcttcaatggattttgaagaggctaaatcacacaaacctacgttggttttcccggacaccgcaactaataaacttatttgacatatcatggattatttatcacttatcgagaaaaaaatcgcatatacgacaaaagaagctgaaaatacactgagtatgtggagattcaaaaatgataagatcgttttcacaaacggttgctttgatattctccataaaggacatatagaatacttggctaaagcggcttctctggggactaaattggtgatcggattgaacactgatgcttctgtaaagcgattgaaaggagattccagacctgtaaacgacgagaatgctcgagcattattattagcttctcttgtattcgttgatgaagtgatctttttcgatacggacactcctcgtgatctgattgattttgttcaaccagacgtgttggtaaaagggggagattataaacctgaagaaattgtaggtcacgatatagtaaaagccaaagggggagaagtgatcactattgattttatcgaaggatattcaactaccgctacaatcgaaaagatgaaaaaataatcgtgtatttctttttaagagataacacattctgtcataataaattggaaatagaattttattatattctatttccaattttttatattctacctgttagtaactgttaatatctcgtgtatttatggtggaataaaaaagaactaaaaagaataactttattttgatttctcgatttcgaattcaagtaataatagaattaaaaaatgcaagaatagttattcaaattattccaattcctttctacaaaatactaacatcaattcacgagaatttcaccaaatactttttcaaagtctattttactaacaattgtggataacttaaaaatagatctcattatcaagtattaataaaattataacctgtgaataactctccactccataaataataacgattaaaacaaaagaatcgcctattttttataccaaaaactcacagtctatcataatactcatatttctttttaaaaaaataaaagataatatatatatgatattgttgttgggaacttgttacttttgtctgttgaatcacatttaatgaagacaaagttattatgaatcctttaaagaaactaatgggggaaaccgtgatttatggtttctcgacaatacttggacggtttataaattggttgctggttccactgtataccagggtactttctccggtcgataatggtatatttacgaatttaatggggtatgtcgctttattagttgtattgttgacttatggtacggagacaggattcttccgctttgcaactaaagataataaagaccgggtgttttcaaccttattgacttctttactttttacttcgactttgtttttattactctgtttttcgtttctcccgcaaattgtcagttttcttgaggtggggaaccacccgatttacttcgttttattgattgtaacgatcgcgattgacgtggtgagtactttgcctttcgccctattgagaatggaaggaaaagcccttcgtttcggggttattaaattcgtgaatataatcattaacgtggggttgaatttatttttctatttgctttgtccgtttttggagaagaaagggatttctgttcctttctatcaggctgatggtggagttgtttatattttcatttcctatttggtttcttctatttgtacgctagtgatgttgtttccttatattttccggtttaaatttgttttctcgttttctttgttgaaagatattttgaaatattcatacccgatcttgattgtaagtgttgcgggaatgattaatttacagggggataagattttaatgcctaaaattttaggagatggggaagaggctttggctattaccggaatatacggggctagttataaactagctttggtaatgtatattttcacacaaggtttccgctttgctttcgaacctttctttttcaattatgccaaacatagcgattccaagaaaatatatcaggatgtactgctctattttaccggattcggtttaatgatatttttaggggttatgtactttttggatgtattaaaatatttcttaggatcagaatatttcagcgggttgacgatattgccttgggtattgatggctaatttgttccaaggaatttactattcgttgtccttgtggtataaattgacggataaaacgatatacggagcttatatggcgattatcggttgcgtgatcacgataggaggaaacgtggttttcttgccgaaaataggttttatggcttctgcctactccgttttcacgtgttttttagttatgacgattttatcttttatcctgggaagacatttttacaagatcaattatgatatacctaagattattttctattttgcgatttgtttattgttctatattgtcggtggctatataaaatttgacaataacttggtgacttgtttggctcgtttaccgttattcgtactcttcgtgtatatttttataaaaaaagagatgagttttttactgacaaaagattttatgtacaagttaattcataaaaaatagctatcttagcgcaatttatggaagtagttaaaatgtgattaacatacaaatttacagagagaatgaagattaaaatagtgaataaatcgaagcatccgcttccggaatataagacaaaattatctgccggtttagatatacgggctaatattgatgaacctatcatgttgaaatcgttggaaaggaaacttgttccgactggtttatttatcgaattacctgatggttacgaggctcagatgcgtccgcggagtggattggctttaaacgaaggaatcactttgttgaatactccgggaacgattgacgctgattatagaggggaaatcggggttattttagtgaatttgtctcatgaagtaacacagattaatgacggggacagaatttgccagatggtgattaataaggttgaacaggctgaattaattgaagtggaggaattgggcgaaacggagagagggagaggaggtttcggtcacacgggtaaacaataaatcatttataatgactaaactaggtcgattattatttgtttttttattgcttttgtgtactactcagctttttgctgataaaaagaaagtggtagaacctactttagaaggtgaggctaaagtacagtttgattatgctttcatggaaggggtacgttgtaaggttttaggtgacttgaaatctgctattgcctatttcgatcagtgtatgaaaatttataacaaaagtgccgcggtacgttatgaattatctagtatattggtattaggagaggattatacgctacctttacaactgatgcgggaggctgtggaattggagccgacaaatatttggtataatttattgttggctaatattttgcagagaaaatcgatgattgaagaggcctgtaaggtatatgataaattgatattattgcatcccgagagagaggatttttatatcgtggagactgatttatattcttctgttgagaagtgggataaggctataaacgtgttggaccgttacgagaaacagtttggaataagtgagccggctattattgaaaaggctaaattatattccaagatggatgatgtaaagaatgcttcggcggaaatcatgaagttggtgaagaaatatcctgaaaaaacagattatttgggtttattagccgaactgtatttgtcacatgatcaagagaagaaaggtcttcaattattgaataaaatcgtaaaaaatgatccggacaatggttttgtgcggctttatctagctgattattatcgtacaaagaatgatactttaaacacggaaaaatatattcgttcggccttgttgaatgataaggttgaaaatggattgaaggttcaatatttgctgaagttattagttaatcaaaacgatgcaaatatttctttggatcatatctattcttatgtgcaagtattgttagaaaaatatcctgaagatatagccgttaggactttaaatgctgattttttgaaacgatataataggctggaggaatgtaagggtgagctggaatttcttatttctaaggagaaaaataattatttgatttgggaagagttgttgatgttatataatcaattggaagacacgactgctatgtatcgtggtgggttggaatgtctgaaatatttcccgaatgagccgttaccttacgtgatgatcagtttgcctttactgattcgaaaagatttagagagagcaaagggatatttggaacaaggacttgacttgtctccggataattctcctattaaggctcagttttttgcctatcttggtgaagtatattataagcaggatggtgttgaacaggcttttgctatgtttgacagtactttgttgataaatccaggtgatataatgacattaaataattacagctattatctttcattgcgaaatgagcatttagataaagctgaaaaaatgatttcaacggcattgagtgctgatccgaataattcgacttttttggatacttacgcttgggtcttgtttaaaagtaaaaattattctttggctaaattttatatgcgttcagctattgagaacgagaagaacccaagtggagttttatatgaacactatggagatattttattcatgaacggagaaaaggaggaggctgtgaaaatgtggcagaaagcattggaatttagagatgaagaatgtggtgatttaaaatataagatagagaatggtttatcggtagatcatgagaagtagttgtgttttattattgattttattgtgtttcgtgtcgtgtagatccgtgaaggagattacggaaaatcgcagagatttaccgaatattaccgaaggaaaattgtttaaaaatattatttctaacgagttagattataatactatatatgcgaagaaagttgatttatctttgaaggataacaagaattcccatagtcttaaagctattttaagaatacaaagagatagttttatatgggtttcagttagtgctgctttgggagttgatgtagccagactactattaactccggatagcgttaaatttataagcccgagagagaagaaatattttgtttcggattatagctattttgcggaacgttttgacgtgggtttgacatttgattgttttcaacggatactaacaaatcaattctttgattttgaatcttgtaccacggaggctgtgcggggaaagcgttataaatttgataagtcgggtaacgattatgtattgtatagtttagaagaaaaagcattggggagaaaattgaaaaaattatacaagaaaaggagaaagaataaagaattttctttagtgttgcagaaaatacatattgatccggattgtttcagacctaatgctgtttctgtcgaggatttggaagagggtgtcggaatgagcgtgaaatacaagaatataaaggattttagtggaaaattgtttcccgggaaaataacttttaatgtattttcggataatgataattgggaagttatattgaattttgaccggttagaatttgacgtggaagtttcacctaattttaaaatacctagtaagtataaaagaatgtattagcatggatatttgtcgtaacatattaatcgtaattttcttgttttctttcactttttcttactcgcagtcgattgacgctattaaaaagaaaaatgaaaagacggagaaggaaattgcgtatttgaataagttactggaaaatgcccgtaaagataaatcttccactatacagaaagtatcgatcatcaaccagaaaatcgataagggaaaagagatgattcaatctctcacgaacgaggtgaattaccttgatggtcagattaaaaagaatgagtctgttaaatccgctttggaatccgataaacaacggatgttggaattctattctaagatggtatacgagacttggaaaaagagaaatgaatcggataaattgatctacatattttcttcttcgagttttgctcaggcttatgcccggtataaatattttgaacaggttcaggactattccaagcggcagattcagttaattgagcagacaaatgattcattgactgctattaatagagaattgagtaaattgataattctgaaaagtgaaacacagtctaaaattacttttcaaaataatcagttgatcaggcaacaaaatgaggcgaacacgtatatagcggatttgaagaaaaaggaaaaagaacttctacgaaagttgaatattgagattaaaaacagagaacgttttaaaaaagaattggagaaactcattgctgctcaggctaaaaagtcgggaagtaaaaattctacatataaattaacaccagaagagaaacttatttccgacgatttcgctaaaaatagaggaaagttaccttggcctgttgaacagggatttgtgtcggagaaattcggggtgaatgtacaccctgtttttaaacaggtgaagttaaataatgcaggaattactattacgacatcccggaatgctgatgttagagcggtatttaagggtgtagtgacggaaataatgtttatcccaggagataataacgttgtgattgtgcggcatggaaattatctgacggtgtattcgaacttggtggagatatttattaagaagggggataccgtcaatgtgaaacaaaaaattggcaagctggctgtgagtagtggtaataacagtacgttaaattttcaagtttggagagataaagacaatttagatccacaattatggttaacgccttggtagagtaggagtatgtttgaaagattaataatatactttattggtggttggtatttaaaaatattttacttacattcgctaaacggtaaatagtgagaatactgctttttatagctgcggaatatgagtaaaatggtgagtaaaaaaggcttggttatgattgcgatgatcgttattaattatttgaaaaagcgatggacaaattagagttttcgattgcctctgaaattggtaatatcgttaaagttgagaactttatcgattatttctcggatgtttataatgtcgaaccggatgtgttcggcaagataagtttgtgtgttattgaagctgttaataatgcaattctttatggaaataaactggattcttcaaagcatgttaagttttcggtttacgaagaagaaaagcgtttattcgtggccgtgaaagacgagggtgaaggttttgattattcttatatcccggaccctactttaccggataatatagaaaaagatgcaggacgtggtctttacctgatgaaaacgctttctgatgatttgatttttgaagacggtggatcaaaggtgaccatggttttcaatttataatatatagatgagcggacttcttttttttagtgaggaatgtgatattccttctttttttaatgaagagagagtgaaacaatggctacaagctgttgctgatgattattcgtttcaattaggaacgatctcttttattttttgtaatgatgattatatcttggatgtaaacaggaaatatttgaatcatgattattacaccgacgttattacttttgactactccgagagaaaaatattgtcaggtgatgtttttatcagtcttgatacagttcaatccaatgctttagaattcaatacaacttatgaagatgaattacatagggtacttgtacactctgtacttcatttgataggttttaaagataaatcagatgctgacgcgaaagagatgcgtcaaaatgaaaatcattgcttagaattgcttaaaacgatataattatgtcacaattactgcccgtgtatgatgttattgtagtaggggccggacacgctggttgtgaggcagcttgtgctgcagctaatttaggatcgaagacgctacttattacattggatatgaataagatagcgcaaatgtcttgtaatccggctatgggtggtattgctaaaggtcagattgttagagagatagatgctttaggtggtggatctggcattgtaacagataaaagtacaatccaattccgtatgctgaacctatctaaaggacctgctatgtggagtccgagggctcaatgtgatcgaatgattttttctgctgaatggagagatagggtagagcataccgataatctggatttgtggcaggatgatgtgatagaacttcttttggataaagatcgagttactggggtcaaaactagattagggatttcttttagctcccgttgtgtgattttgactaatggtacctttttaaacggtctaatgcatatcggacgagttagctttcccggtggtcgaatttcagaaccggctacttatggtttatccgatcagttgaaagaatatggttttgcagtcgggcggatgaaaacgggtactccggttcgtatagatggtcgaagtattgatttttctaaattaacccgtcaggatggagataatgattttcataaattctcttttctgagtttcgcctatacgaattcacttgagaagagaccctgttatatcgcctatacgaataaagtcgtacatgatattttgcgggaaggatttgatgatagtcctttatttaatggtacgataaaaagtataggtcctcgttattgtccgagtatagaaactaaattagatactttttcagatcgagatagtcatcatttgtttttggaaccagaaggagagaagacgaccgaatattatctgaatggattttcttcttctttaccttgggatattcaattgcgtgcattgagaaatgtggagggttttgagaatgtaaaaatttttagaccgggttatgctatcgagtatgattttttccaacctactcaattgtatccgactttagaaacaaaattaatcaagggactttattttgccggacaaataaacgggactaccggatacgaggaggcagcggctcaaggattgatggccggaataaatgcccatctttcacttcatgaaaatagagatttcgtactgaatcgagatcaggcttatattggagtactgattgatgatttagttacaaaaggggtagatgaaccttaccgtatgtttacttctcgtgcggagtatagaattttattgagacaggatgatgcggatgcccgcttgactcgtttaggatattctctaggtcttgtgaaagaagatcgttttgccgtgtttgaagataaaattttgaaacgtgatagattgatagattttgttactaattttagtatttcacctgatgaaattaatccgactttagaagttttgggatcttcacctattcggcagaaaataaaattgattgatattatttcgagaccgcaggtaactattcctaaaattgtaggttcaattccttctttgaaagaatttatttttgacaataatttgcgagaagaaatcatagaggctgccgaagttttaattaaatattcgggatatatcgagagagaaaaattaatagctgataaattgaatcggttagaaaatttagttattgcgaataaatttaattatatggagataacttctctttcttatgaagctcgtcaaaaattgacaaagattaatccgaaaactattggacaggcatcacgtattacaggagtatcaccttctgacatcaatgttttattgattttattgggaagataaaagaaatgtttcacgtggaacgttgaaaatagtgcgaagggtactattgaataaattcgggtaaaaaggtatatttgtagggtaaatattacaaacaaaaaccgaggtataaaatggaaatcattgaagggaatttaattgatatagaaaacagggaattttatccttgcgctatatctatatttgaaggaaagatcatgaatatagaaaggaattctaattcgtatgatcaatatatttcgccgggatttatagatgcgcatgtccatgtggaaagttccatgttaatgcctgtcgagttttctaaattagtaattccgaatggaacagtgggtgtaattgccgatccgcatgaaattgccaatgttttaggggtagaaggggtggaattgatggtaaataatggagaaaagacacctttaaaattcttttggggtattccttcatgtgttcctgcaactccattcgacaaaccgggatccattttatccataaaagacacggataaattagcaaaaaccggaaagtttacaatgctttctgaagtcatgaacattcctggcgttataaataatgatccggatgtcattggaaaaatagaaatagctaagaaataccgattaaaaatagatggtcatgcaccggaactcgtgggtgatccattgagtttatatattgctcatggtatagaaaccgatcatgaatcttcgaccatagaagaggcagaagaaaaaatttcgaaaggaatgcatatcatgatcagggagggaagtgctgctaaaaactataatgcattaaaatcattgattgctacacgtacggatagcgttatgttttgcacggatgattcacatgctgacgacttattaaatgaaggtcatattaataaaattgtcaaaaaagcattggctgatggctttggtatttttgatattttgcagattgcgtgtcttaatccggtacgtttttataatctaaatataggaactttgcatatcggagataatgcggatttcattatttttgatgatatagaatctttgaatatacgttccacttatattcgtggggaggtagtctatggtgaaaacagttctaaaaataatccggtttgtgatgtacctttattaaataagtttcatcatgatgaaataagtttatctgatcttcatactaatgtttttggagatgttacctgtattcaagtaaaatctgatagtcttttgacagaccgtaaaatctttcatttcgatgaaaagatagaaggttttcaatcggatttagataaagatgttttgaaaatagtttatttaaatcgttactttaactctaaaccgcagatcggttttatttcgggcgtcggtttaaaacgaggagcttttgcttcttctatatcacatgactcacataatattattgcagtgggttgtaccgatcaagatttaatgcttgcaataaatgaattgataaaagaaaaaggtggtttagtagtgaatgaagagagcaaattacactctttatctcttcctattggtggtattataagtgataaaagtgggagagaagtggcagatcgctatatgaaattgaatgaaatactttcaaaaatgggaacacctttaaaatctcctttcatgacactttcatttatggcattaattgtaatacctactttaaagataggagaaaaaggaatctttgattttgagaagtttgattttgtgaaatagtatatggcagaagatgaatttggattgaaagagaaagtcagtaaattacctacgactccgggagtgtatcaattttttgatgcaaatggagtaattatatatataggtaaggctaagaatctgaaaaacagagtttcatcttattttgtgaagacaaatcagacctctaaaacaatggttttggtccgtaaaatacgggatttgaagtacattgtggttaatacagaggaagatgcgctattactagagaataatttgatcaaaaaatacaaaccccactataatattctgttgaaagatgataaaacgtacccttggatttgtattacaaaagaggcttttccacgagtttttaccactcggaaatttatccggaacggttcagagtattttgggccttatacttcggctaaatatgctaacaccttgatttccttgataaaatcactgtataaattgagaacttgtaatttatctctcaataaatcagctgtttatagtggaaagtataaagtatgcctggaatatcacatcggaaattgtatggggccttgcgttgggtacgtgcaggaagaggaatatatggaatatattgcacagatccagaatattttgaaaggaaatatttcttccgtgatcgattttatgactcgaaaaatgaaggaatatactgtttctcttcaattcgaaaaggcacaggaaatgaaggaggccatagaagcattaaaaactcatcaaacaaaatccacgatagtaagtacctcaataaacgatatagatgtattttcttacttggaagatgaaaaatatgcctatgtgaattacttgagaattgttcatggagctgtgaatcaagtgcatactattgaattagagaaaaaattggatgaatcgaaagagtctttactttcttttgccatttttgagatccgccaattggtaaatagtcgctctagggaggttctagtacctttctacccggatgtattgatggaaggaattaactatgctatcccgcaaagaggggagaaaaaacaactattggagttatctgaacggaacgtgaaattctttaaaatggatcgggagaggcagcggggattacggcggcaggatagtaaattagatctactaaatacgataaaaaatgatctgaaattacctcgattacctcatcggatggaatgtttcgataactctaatatacaaggaaccaatcctgtagcctcttgtgtcgtttttattgacggtaaaccggcaaagcgggaatacagacgtttccacgtgaaaactgttattggggcaaatgatttcgcttcgatggaagagatattgtaccgtcgctatcaccgggtacttgaagagggtggggagttgcctgatttgattgtggtagatggtggaaaggggcaattaagttcagccgtggccacattacgtaaattggatttgttggaaagagtacctatcattggtttggccaagcaaatggaagaaatatattatcccggagataaagatccttatttgttagcgaaaacttccgtggctttaaagacattaatgcatatccgggacgaggctcaccgttttggtatcacttttcatcgtaaattacgagagaaaaaacagacaatcagtgtattaagtgaaattaaaggtataggtgagaaaacagaagtatctttattacaatattttaaatctgtaaatgctataaaagaggcatctcgtgaagagttagcaaaagccataggtccggctaaaggaaatatcgtgtatgattattttcattctgctgtttcttaataattttatatctttgtgtgtatttcagtgtaatggatgaaactaatattctgctagaaagattaaaggctaatgatgaggcggcttatcagagttgtttgagacttatttcaaacagttacatcattttgccgagtgaatggtgtttgattctgaggttgtcagtaaatatagttgctttttcccaaacagctaaaatctcagttaatttcacggaaactccactttcagaagtttttgcagaattgggaaaacaggttaaaatggttttcttgtacgaccataaattggttgaatggtaatttggtgaagctttcagattttaagggaaaacttgtttatatggatatttgggcgacatggtgtgggccgtgtgtggaagaaattcctaatatggaaaaattgtaccaacattataaagatgatccaagaattctgttagtgagcgtatcggtggatagtaaaaagaacctttgggagaaaaaattagatgaagacaaacctcaatggccgcaatatatagttgatggagctttaaaggataaattgtacaatgaatacataataaccggaatacctcgttttatgatgtttgatagtgagggtagaattatcacaatcaatgcgatgagaccttctaacggtaaactgattccgtttatagaagaacagttgtccaaaccgaaagagataaaaggtcccggtggtatgaaaatgattaaactgaagtaatctaagattaatataaactattaccccttaaaagtgtataaacttttaaggggtttattcattcataatatctgtttgtctatcgatagaggcttggtggatggctttgaacacgcgctccacgagttcttcactcaaattattcttgcgggcctcttcaagaacacgggttagaattttttcccagcgatccggttggagaatggtaatattgttttgttttttatacgtcccgatctcttcaataattttcatccggttggtaaggacttccatgatcgtgttatccagtgtatctattttttcccggagttcttcgatgattagggtactatttgagttgttaggatgttcttcccggattatcagatgggctagaatgtgatttaattgatcaggtgtaatttgttgaaaaacatcacttaatgcacaatccggattcacgtgagactcgatgattaatccgtcgaatcccaggtccattgctttttgggatatttcctgaatatattcccgatggccgctgatgtggctgggatcacagaaaagcggtaagttcttaatgcgtcgctttaactcaattggtatttgccattgaggcatattacgatagcgagtactattgtaggatgaaaaaccgcgatgaatagcgcctaattttgtaataccgcataaatagagacgttcaaaagcaccaatccatagttctatgtccggatttaccggattcttgacgagaaccggaatatcaactccttttaatgattccgcaatttcctgaacagcaaacgggtttgccgtagaacgggcaccaatccacaccatatccatcccgtatttcagtgcagcctccacgtgatgggcattggcgacttccgtggaaattttcattcccaattccttttggatattttgtaaccaaggcaatccttttactccgactccttcaaaacaattcggacgggtcctaggtttccatatcccggctcgtaaaacttctattccattggttttcaattgagttgccgtgttaaaaagttgctcttcactctcagcactgcaaggacctgcgatcattaacggacgctcttgtcgggtaaacagattccattcggaataggattgtatttctaatggcttggtcattttaactacaaaattagaattcaaagatattctttttccgcttaaaaatggagctatccctttactttttggatagctctcggcggatgatgtatttcaacaaaatgttccgtgtttgaaattgaatttggatacttttttagtgaaagtctttttacgtgcttgttttgaaactgatacatgactttgcgtgttcttgtttcctttctgaagatttgatttctgtgttttcatgatttttagattttaagtaagactaaaaaacccggctgggattagccgggttgaatgaatataatatgtgttacttacatttttacaggtaatacaaggtcatcccagctgttgttgaggtaataataatagtagtaataataacgacctgtatgtgaaaaaatagtattcatgtctatagttttaaataaaaaaggccccgaaattcggggcctgtatattttatatgatgacaatattccccctttacttttccggaaagtaataatagaaatagtaatatgaggtgtacattgtgttcattttcttttcattgtttgggacaaatataggtattctgaaatataaaacaaataagtaagcagaaaagttaggagaaaaagtctaactttgtgtggattaatttgaaaaggaaagatgatgactaacgaggagaaaaaattatacttgctggatgcttacgcgttgatttaccgttcgtattacgcgtttatcaataatccccggattacgacgacgggaataaatacatcggccactttcggtttttttaattttttactggaattgcttgaattggaaaaacctactcatctggcagtagtttttgacccggaaggtcctactttccgtcatgaaatgtacccgccctacaaggcccagcgtcccccgatgccggaggacctgagaaagtcggtgccttatattaaaagtattattgaaggattaggtattaaatcaattgttgtcagcgggtttgaggcggacgacgtgatcggtacgctggccaaacggggagagaaagaagggtttcaggtatatatgatcacgccggataaagattacgcccagttggttagcgaacgagtgttcatgtataaaccgggacgtgccggaaataagtctgaagtgtggggtattccggaagtattggatcatttcgggatcgagcgggtggaacaggtaatcgatattcttggtttgatgggtgatacggcggataacgtaccgggatgtgatggtgtcggaccgaaaagtgctgccacattgatttataaatatggaagtatagaaggggtatatcaacatatagatgaactgaaaggtaagcaaaaagagcgcttgttgtgttgccaagatacagtctttttatcaaaggaattggtgacaatcaacacagaagtacccatggaagtaaatgctgaagatttagcattgggcgagattcaagacgatgtgttaaagccgatcttcaatgaattggagcttttctctctggcaaagagagtgttcatgatagaacatgaggaaaatttggtagagaccattcacccggaagaagtcgattaccgggaaatcactaccgtggcggaacgggatgaattacttcagaagttgagagaggctcctgaatacgtgctgaacgtgatctttggagatggcacgatttacaactcttatccggactatctctgtttctcaacagccgttaatactgcttgttacctgcgattaccttcagcgaaagataaggccgaggacgtgattcgtttatttaaacctattcttgaagatcagaacaaagttttgatctcgaatgacgtgaaggactatattatttggttaaggagagccggggtagagattctaaataaaatatttgatgtcaagattgcacactacgttctacaaccggacagttctcacgaactggaacgtgttgctttggaaatgctgaattatcgcttgataaaaggagataataccgagaatcctcaattatccctatttcctgatgaaggagccaagaaagacaaggattttgcggaacgtacggatatattattccgcttgaaaggaaagttggaagaggctttacaggaagtcgggctttataagttgtatgaagaaattgaaatgcccttggtatctgttttggccgatatggagtacgagggtgtgtctatcgataaggtggcattagatgagctatccgaggatttgaaaataagaatcgctgagacagagaaaattatatatgaaatggccggtaaagaattcaatattagttctcccaagcagttgggcgagatattattcgaccagatgaatattgattccggcaacaagaaaaccaaaacaggccaacacagtacatccgaacaggtattatcaaaattggaagatgcacatccaattgtaggacatatacttaattaccggggattaaagaaattattgaccacgtatgcggaggctttacccacgtatattgatccggcaaccggaaagattcacacgcattttaaccaagcggaggcggcaaccggaagattgagtagcttgaatccgaacttgcaaaatatacctatccggacagccgaaggtcggaacattcggaaagcttttatcacgggtgatccggattacgagttcttctcagccgactattcgcaggtagagttgaggttgatggcacatttgagcggtacgccggagttgatcaatgctttcctgaaaggggaagacgtccatgcagcaacggcatctaaaatttatcatgtgcctttagaagaggtgaccccggagatgagacgacgggcgaaaacggctaatttcgggattatttacggtatttcggcttggggattggcggaacggctgaaaatttcccggaaagagggtaaggaactgattgaaggttattttgccctttatcccggagttaaacgttacatggaagaatccgtggagaaagcccggaaaaaagggtacgtggagacgatcatgggccgccgtcgttatttgagagatataaattcccggaatgcggttgtacggggtgttgccgagcgaaacgcggtgaacgctcctatccaaggatcagcagccgatattattaagaaagcgatgatatgtattcatcagaaattaaaagaacgggggttgcgttccaagatgattttgcaggtgcatgacgagttgaactttaaatgtcatcacgaggaaatcgaggaattgaagaatctcgtggtggattgtatggagcacgtcgtgagtctggcagtacctttgactgtgggcacgggctacgggaaaagctggtacgaggcacattaatgttagaatataaagatgttgttgggaatgttggacgagcaaatagattcagttataacggatagtatcgtgtcggagtcggattctgtagtgtttccgatctctttgttgagagaatctgtctcttggaaacctttcttaccttttgacacgttgacgaatcaggtggaattggtggaaggaattcctttgagcggggagaagatgaatattgaatttatttccagtattctgatttatacggttgtgtatctcgtttttatcgctttgttgcgcctgcgaggaagaggtttcctcacgacggtgtacacctattttttcaaccggaaaagaggggccagcttacaatcggaaggtgggatgccgaactatttctttgttttcttgtcggttagcctttctttctcaatcttgtccatgttgatggcttttttaatcgatcctccctttgtattctttaatgccttaatctatttcctaatcatttttggttactactttttagtcttgggacttgtgcggcttttcgggtgggcatttaatagaaggcattgtgcatcggagatcatcttgaatttgcgcacaagtgcgattgtgttgggattatccatatccccgttcgtgttggccttgttttacgtgcaaacttcggcaataaatatgttattatatgtcattttagggcttggtatcattattctggttttcagatttataagattgattaaaatattatatggatatagagtttcaattttgtatatgattttgtacctttgtgggcttgaaatattgccgattcttgtcttgtacaagctattgggataagttagagaagttagtgtaattttaaaacagaaaaagttgaaaataaagaagatactagtttcgcagccaaagccgacaaccgagaaatctccgtattttgatttggcagaagaatttggattgaaattagaattcaaatcatttataaaggtagaaggtgtcacggcaaaagaatttcgtcaggaaaggataaatattcttgattttaccgggatcgtttttaccagtcgtacggctattgaccatttcttccggatctgtaccgaaatgagggtaaccgttcccgacacgatgaagtatttctgtatatcagaggctattgctttctatcttcagaaatatatcgtgtaccgtaagagaaagattttctatggggacaagaaagtcgaggatatgacgaaaattctgttaaagcacaagaccgaaaactttttggttccggtttccgacgtgcataaagaaaatatccctgctttgatggatgaactacacttgaagtacacgaaatccgtattctataaaaccgtgtccagtgatgtagcctctgaaattccggatttgaaagagtatgatatcttggcattctacactccggctggtatcaagtcattgttccacaactacccgaattttgaacagggttcgacaattattgcggccttcggggaggcgacagccgaggcggtagaggaggctgggttgaggcttgatataaaagcccccacggaaaaagccccttcgatgaccatggcattggaacagttcattaaggcttacaacaaagaaaataaatcaaaataggaaaatggacatcaaacgatgtccattttttgtatgtttgcactcgtatatggatgaaatgataaaatacacgttttgcaaggaagaacggttatgccggaaggggggattcgaggaacttttatcctcggggtatagtttcgtgtcttatccgttacgagtggtaatccggttatacccgaggggagagaaagatttcccggcccggatagcagtgagtgtttctaagaggcgtttcaagcgagccgtgaaacgtaaccgggtaaaacgtttgattcgggagacctatcgtctgaataaaaatatattgtactcttatatcccggaggataaaacgatggatatattgttcatatatttgcatgacgaaatttttgaatatggtaaaatcgaaaaagcgataaccggtgctattaaaaaaattaggagctatattgaaaaagatggtagtggggatattgctgatacccattaaattttatcagttatgtatttccccctggactcctccgagttgccgctataccccgacctgttcacaatatgcggtggaggcgttacggaaacatggtccggtaaaaggattataccttgcgataaaacggatatgttcctgtcatccatggggaggttcgggctacgatccggtaccgtgaaatttgttattttgttggatatatactattttcgctagattgttattaaagtaagattatgagaaaaaatacacgtgtaattatcttcatttcgggagtcttgttactggctttcgggatgcttggcttgaaggaagacgataaaagattccaaattagtaagggattggatatttttgccacgctttttcgggacgtgaatcttttttacgtggatgatgtgcaaccggagaaaatggtgcaggacgggattgacgccatgttgaagaaactggatccctacacggtttattacccggaaactaagttggatgagttcaagatgatgacaacgggagaatacgccgggatcggttccgtgatcggcatgaaggatgattacgtggtgattcgcgaaccctataagggatctccttcttacaaggctggattacttccgggtgatttgattctggcagttgacggggaaaatatgaagggaaagaatgtcgagtacgtgagttcccgtctgaaagggcaacccggtaaagaggtggtgcttaaactgcaacgtgtcggggaagaaaagcctttggagaaacgggttcttcgggaagtcgtacaggtccccagtgtaccttactatggaatgttgaataacgagattgggtatatctattttaccggattcactgataaggctgcagatgacgtgagaagtgcgatcatggatttgaaaaaccgcggagcgcagtcccttgttcttgatcttcgcggtaacgggggaggattgctggatcaggcagtggagattgccaatttcttcctgccgaaaggttccttgattgtaagcacgaaaggaaagatgaaacaatgggataaagaatatcgcacgacgagaaatcccttgttaccggatatgaaactggccgtgttaatcgatcgggcttcagcttccgcatcagagatcctttccggttctttacaggattacgatcgggcagttgtaatcggcgaacgttcattcggtaaggggttggtgcagacaacccgtgatctggtctataacacgaaattaaaggtaaccacggcgaaatattatatccctagcggacgctgtattcaagcagtagattattctcaccgtaatccggatggtagcgtgggtacgattcccgattctttaatgaaaccctttaaaacgaaagccgggagaacggtgtacgacggcggtggtatcactccggatgtgaagattgagccggagaaatatgctaaagtaactcaggaactggtgttacaggatatgatttttgattttgtcaatgaatatgcggcaactcatcccacgattgcgactccttctgaatttgttttgtcggatgaattgttcaacgagttcaaggaatacttgaaaaagcgtgaatttgaatacgagacagcttcccagcttgttttggaaagattggtaaaggcaactcaagacgagaaatactatgatcaggtgtccagccaggtagagcaattgaagaagagtctcggacactctattgatcgggatttggatgttttcaagaaagagatttccgatatattgtccgaccagttaatggaacggtattacatgcaagagggtgtgatagagtatcatattcgtaatgacaaggatatagccaaggcgctggaggttttatcgaacaacgaagagtatcaaaaaatattgaagtagtacgaaaaaatagatagtagttttttgaaatcccaaaaaactactatctttgcaccgcaataaaacaattgccctattgtgtaatggtagcactacagattctggttctgtctgtctgggttcgaatcctagtggggcaacaacatgaagaaaacccttatagttggaaaactgtgagggtttgttttttttaatgaaatttgttgattagcagtgctgttactcctctttgctattttgtctgaataatttgtgatattaggattaggggataatttgaggcataagaggtatcattttaggtatcatttgttgttttggacaataaatttaggtatcatattaatgtatttattattagtgtatttattattagtgttttcttatgtatgtttggaaggaataagtaaggattgtacttgtttgtgctaaggtttattctaaatttgtaattaataggtaataactaacggattactaccgaatataatattttcattacattttataaatactttatgaaccttattatatataaggttcatataaggttactataaggtatctataaggtttataacggtaatgatccagtagtattcaatttatgacaatgtaattataattaaaactcttgttgtttaggtattaattttcatatagttacggtcctgttatgtttgaaatttctcttttttgaagaaactattttttatttttgggatttcactatcacatttctgaattctagggatgaaatgctggcccattttttgaaaaacttactgaaagaggcttgatctgagaaatgtaattcggtggcgagaaaattcggataaggcgagaaggtaaacggatttatttccggacaggagaaatttagggccgatgtcagaggtgaacacggtgatttccccttgtaggattctccttttttgaaggtctcgatttcttggatgttgacaatattgtaagactccatgctggagggttattttatgataatggagcgaagtttgtgtaatgttttttgtgtcatgattttttggttcagaaagctgaccaggtaacccgttatgcaggctgcgatgatggaaccttctcgcacgccttctacacgttggctcaagatgagggaaaggatgacggctgacgtgactagggtaacgtcgaaatacactttgaattttccgaattctttgttacaactgcgggaggcatatttcacgaatccctcggcactcatcatggcaacatggggttttatttcgaggacaacaccgatggattgcacgaggcagccaacgagtagcaaggcgatggacatcccgtaattcgaggggtgtacaccatttgtcaaaagcatattcagatcaataaatgccgagaatatgaaagaaaaaggtaactggagtagaatttcgattatgtctcgtttacttttattgttccggatcaaccagaattgtccgataatcaatagcatattgatgatgaacgtgcaggtccccaaggatagagagctgttcaggctcaacacgtagtttacgctggaaataggagtggttcctagtgcagaacggataattgatacgattcctgcggctagaaaatacaatccgataacgaatatcaaatacttttttaaaagttccttcatgattaattctctctctgtaaaaaacgtacgaagatacttttttccgatgaaaataggaataattgcgggtgggtagtttcaaataaaacaaattctctcgattttcgaacatccgattgttgtagcttttttaggaattttgcagcgtcttaaagaaagagaaacaagatgagtaggaagaaaattgtgacaggattattgtgtattttcttttggctaacttttagccaggtagattgttttacgttgggaaatactatatatttgtgttaaataatacatttatggtatggatgattgcgtgatccgggtgaccggtttgaaaaagagttttcccaaggggaaagaggttttatgcgtgttgaagggtatcgatatggagatccggccgggagaggtgatcggttaccttggaagtaacggggcgggaaagtccacgaccgtgaagattatgtgcgggttactggaagatttcgaagggaaggtgagtgtgctggggtatgatgtccgggaaaatgatatagaggtgaagaaacgaatcgggtatatcccggagaatgccgtgatgtacgagcatttgaccccgatggagtacttggagtttatcggggccatgtacgggctggaccgaaaggaggtgagccggaaggctgacgagttgctctcgttgttcgagatgagggagaaccgggacgagagaatggtgaatttttcgaaggggatgaaacagaaggtacatattatttcgggattgctgcataacccggaagtgattttcatggatgaacctttgaatgggttggatgctaatgcggtgattatcgtgaaggaggtcattgctcgtttggcaaaagaggggaaaacgatcttttattgttcacatctgatggatgtggtggagaaaatagccagtcgggtgatcttgattaaccaaggtacgattatcgctaacggttcggtgcgggagttgatggaagaggcgggggtgagttctttggagggattgttcacgaaattaatagggaccacggggcagtcggagaaggcggaactgattgtaaacgcttttgaaaacagggagtcatgattaaggtggtgacacaaattttatggttcttccaagggttgtttacccgtatgggtgttgatttcgaccggatgctggccatcgtgacggtgaaactgactgtggataaccggattgatcggagtggacggggcaagaaaaatacgtcgaatgcgttgatgaggcaggggattttactcggaatctgtgggccgatctttttcttgacagggatagcgtcgggagctttcggggtgtcgcttttgttatttcagtcgtacctgttcctgatgttgttaatgagttttatgatggaatattcccggattctttttgacgggaacgataatcatatattgcggcatttgcccgtgaattccaaaacgatactggttgctcgtctcgtgtcgatgctggtgtatatgttttttctttccggttgtatgtcggtgatcccgttggtgattgtctgtttttggaaaggggtgatgtctggggcttttttcattatttccgtgtttctgaacacgattttcacattgctttttgctaatgttatttatctcgtggtgatgcgctttatttccgtggagaagttccagcgggtgatgagttatgttcaggtggtattgatagccggggtggctttgagctaccagttggtcgggcagttaatttataatattcaattggatatgtttcagccggggacttggatgtattttacgccaccttgttattttatgtctttgacggtgatggttaaacaaccgacgggacccgccttgttgctggcgttgatcggggtagggcttgttgtcgtgcttggttatatcacggtggcttatcttgctccttattttgcggcaaaagtgggggtgttgaattcgtactcacccgtgagcaagaaacataagggaggaaaggagggatggctttacggtttagcacgggtgtttggtcggagtccgatgcaggtgaccgggtttgttttgggatggcgtatgacccgtgataatttgaagtttagacaaggtgttttgcccatgatgatttatacgatgtttttggcagttttctttttatatcagggacggcaggaggaaactggtggcattgtttattatatgcctctttacatgatggcaatgattagtatcgggatccagatgaatatgtcgatcacggataagggaaatttattttggctttatcgctctaaaccattggtgcgtccgggagctttgattcttgggtgttttaaggctctgtttgtgaagtattatcttccggcttacgtgttgctttgcgggatttttatcgtgatgctggactgggtgattcttccggacctgttgtttattctggttgtgagtacgttggtaagttacatttatctttggttttccggaatgctttttcccttttcgaaagaaaaaagttctatggattccgggcgaaatatgttgcgagttattgttctaatgttaatgctggctcttgtcgggggaacacatgtgctagccatgcggttgtcgtggtttggtatttggggggcgattgtggtaatctccttccttgttttcttgatggaatttgtgatatgccgtgtttcttggcgaaaagtgatttctaactattaatctttttgggttttgacgaacggcggcaggatgcttttgtcatgattaatgtcaacgccccgtctcccgtgatgttgcaggccgttccgaaactatcctgtaaagcgaatatggttagtagaagggctgttccggcttcatcgaatccgagaatggagattacgattcccagggaggcaatcacggttcctccgggaactcccggagccccgatggcgaagattccgagtaggatgatgaacaggatcatgacggttaatgacgggagcgagccgtaaagcatgagtgatacggtcatcacgaagaaaacttccgttaggatggagccgcataaatggatattcgagaataggggaacggcgaaatcaataacatcgtcttttaataccgggcttttcttggcacatttcaacgcgacagccagcgtggcggccgatgacatcgtgccgacggctgtgaggtaggcggggccgtagtacttcaatacctgccaaggattctttttcgaaacggccccagcgagggcgtacaggaaagaaagccatacgaactgggagatgatgacaataaccataacaccaaggaatacggggagttgtttcgtgatggctccctcgtaacttaatgcgcagaaattggccgctatgaagaaggggaggatgggtataagaattcggttgatgagtaacaacaccatcttttggaaattgtccagtaggttttcgaatacttccgatttggtccacacggtggccagaccgatcatgatggccagtacgagggctgtcatcacgctgacaacagggggtatgtcaaggcggaagattaattctggtaactgtcgtaaggtttccttcacgggttcgatggagaggtgtgggatcagggtgtacccggaaaccatagcaaagaaggctgcaccaatggaggaaagataagcgatgatgagagccagagacaacattttggaggcgttatctttcattttggcgatcgagtaggaaacaaatcctaaaataatgagtggaaccatgaagaagatcagttgcccgaggatgtatttcacggtaacaacaaagttcatgaagttctcgttagcgacgaatccgagcagaatcccgataatgacggcgatgattaatttgaatatagtactggaaaataatttcttcatgtttcttttttcgtttatatcgtcgtgaagagccgtttagttacaggggaaatggttatttcccaatagaaaccgtaaaagtggttatttttacagtaatttgtatacaatccataccggttgaatatcatacctttacatcataagatcagaagtaatggatatgaaatttaaaattgaaatagtatgagtataaagacaattgtagtaacaggaatgttattccttgccggaacaatcgtaagcggccaaacaagtacaaatcaagtaaaagagaagaatatggaaaagttagaattagtgaaagaatgggataaggtatttccacagagcaacaaggttgttcacgagaaagtgacattccgtaatcgttacggtatcacgcttgctgcggatatgtatataccgaaaaatgccaagggaaagttggctgccattgcggtgagcggtcctttcggggctgttaaggaacaatcgtccgggctttatgcgcaaacgctggcggaacgtggttttttgacgatcgctttcgatccttcttacacgggtgaaagtggaggtcagccccggtatgtggcctcgccggacattaacacggaagacttctgtgctgccgttgattttctttcgactctcgatgatgttgaccctgaacgtattggaattttaggtatttgcgggtggggtggaatggctcttaacgctgccgccatggacacgcgtattaaagctacggttacttccacgatgtatgacatgagtcgtgtgaatgctaacgggtattttgatgcgatggatgctgaccaacggtatgaacttcgtcggcaacttaatgcccagcgtacacttgatgctaagaaaggcacgtatgaattagccgggggagtggtcgatccattaccggatgatgccccgcagttcgtgaaggattattacgcttactacaaaacgccgcgtggttaccacaaacgttcacttaattccaataatggctggaataagacatcgtcactttcatttatcaatatgcccttgttggcttacagcgatgaaatacgcggtgccgtgttaatgattcatggtgaaaaggctcattctcgctattttagtgaagatgcattcaaaaaattgaaaggtgacaataaggaacttttgattattcccggggcaagtcatgtggatttgtacgataatcaggcaaatgttattccttttgacaagatagaatctttctttcgtgaatatttgaaataataaaaatacccaagttcatgttgattttgaacttgggtattttgtataatatcattccagattataaccctagaactttggttccttgtttgaagaaaatatctttcgggatgttagctcctgcaatacgatccaagtctttctgtaaagtcgggggaacgatacctttttctgccactaatttagtagctttctggatgtcaccgtctccttcgatcgtgatgtactctccggcaattacttcgatgtcttttttcatcttttcgaaatctacggtgtagtatcccgtggtttcatccttgctgatggctccgctttccatgaaatgggcgaactgcatcatgttggcttttccgtgggcgctggcagcaccgaaacgaacggaacggaagattccggcgatgaaggtcacgtaattatccatgaggtctttgttttccaatacaccccattccgcgagttttgtcacgcagaataaccctagaatgtcggctttaccttcctcgatagaggtatagtagttttgtagggcagaacgaacgtcttgtttgccattcagcgtgtatttgattcccagtccgtgagcaacttcgtggaacataacgttctcgaagaatgcgtcgaagttgatatgtttctgttgttccggattgataactaatttcgagattggaactacaattttgtcgaatttagcttgcatggagtttttcaattgcaatttgcgacttcctttagcagcgtgtactctcgggtcgttcggcaggttaatagcaatatttttacttccggcattgcagtctccggcataataaatcacgtcgtaagcgttcatgtccgggttagcatttgctttttcctttttgtatttggccggaaccggtaagttttcctgtaatttgggtaagtattgagcgtattcggacaggcgtttgctccattctttgtctttcacgaggatttgtccggagtgtgcggctttgtatccgtaaagttggtcttcgtaagtttcgatggggcctaccacgaagtccagcgtgttattctgcatatccatccaggctaaatcgctggccaggtaatcgtcatctaaaagtgcttttgatcttaatgccaagtagttcttcaatcccgggtcttcagcaagctcggcggcttcttcgagtaatttagaggcttttgctacttcttccgggtaagcttcgtggaatgaaagtacgatgagtttgccggcggcatcccgacggataacactataccagtctgttttacgaggatcatccagcgagtcgaattcttcttttgtcatgtcagccgggtagaagtttgccccgagaggttttgcgcccacgccgtcgataaaaggtttgttatcgtttaatctgtcccaaggaccatagttaatggaaagatatttcaacgcggcagagtcttgggcgaattgagccatcagtgcattcttgtccccgtatgcgttttgccagaagatgtcttccataatattggctacttcgataagtatgggaagcattttcttttcgttttcggttaattggttcaaatccgttgttaacgggaattcagcgtactgatctgcaagcggttgataagggcttggcttcgtttctttcttgacctctttacaagagaacaagaaaatacctaaagatagaaataggaatagttttctcatttttatataatttgtgtttgagtatttgaggcacgaatttataaaaaatcctttacctatatgaaggtaaaggagatattttgtgaattggaacttagaaatttaccccaaacccgattgtatacgggtggatttccggagctttattcttttccatcatgttagtaagggtatagcttccccataatgcaaatttgtaatacccgatacgaaccacggcatcagctttcaccggattcatgctataattgccggaatttttcatacgacgggtgtttccgttttcatttttgtaaacgacttttgttttggtatgtaatcttaaaccacccatcactccggttgccacgtaggcacgttggtatttcttagccgggaattgccattcaaagataagaggtacggttaagtaaaggttcttaaaagagctctttttgacattttcgacttccatcgggtagatttgcccgccttcgcctcgttcgatactatttttgttggcgaaacggaatcgttgatattctaatcccagaccggtaactaaaccgatgttgtttagtttattgaggcgcatactatactggaacatgttgaattgcataacgagcgaattcttacgttccagttctaaatagtctcctgccccatttagtcgttcgttactgatagagaaatcggcaaagcctaggttgaaaccactccagtggcctcgaaaacgtggattttggctacgttgataaaccctactatggagaggatcacttagtacttgcgttttccaaacttctcctttttcctgaagatgtacgttctttatggtatcggcctgattttgtttttctgcttgagaaaaaaagggaaagctgcataataatgtcaaggagatgataatacttttcatgatattatattgtaatctgtttatttacgcgtgttttggtcaaattttacagaattgaaaaacttatctcgttgactgttgagttcttccaagtcctcggttttgccacctatggtgagttggtacatacagttatcccggaagatgaatcgtttgaaataggtcatttcttccccgtctttcatgatcgtgtatgatatttcccggatgtctatgtccgcgttgggaatccttttctccccggtaagttttgccgtgggcatggaaacggattcttttttcatggatatatatagttggttgatcgtgtactcgtccagcactcctttttctttcgttagctgggtacaaacggcgccgaacacgcaggtaatatttttggtttggaatatccatgatcgcatattgtttacctctttcttaaagcgttctccgcgactggggaacgaaaacgagatataattatccccgtttattcttacccaaccgtctttttccggagctaggcagaggatcccaataagtataattttaagtatcgacatatccattctctttatttcgtgagttaaagatagaaattattatttttgtggcaaaacttatttaattgaagatgattgtcggaggaaaagatgtaggagatcggccgttgattctggccccgatggaagaggttaccaatcccccttttcggaaattctgtaaacgttacggggctgactggctctattcggaattcgtgtcggcagatgcattggtgcgctctataaacaagacggttaagaagttgacgatagaagagaatgaacgtccggtgacgatacagatttacgggcggtttattgattccatggtcgaggcggcaaaaatagttgaagaggttcaacctgattttatcgatataaattttggttgtccggtgaaacgggtggcggcaaaaggagctggggcgggaatgctccgggatgtacctttgatggtggagatggccaaacagatcgtgcaggccgtgaaaattccggtgacggcaaagactcgtttgggatgggattgcgagaatattattattgatgacgtggcggaacgtttgcaagatgtcgggattagtgcgttggctatacacgggcgtactcgttcgcaaatgtataaaggagaggctgactgggagcctattgcccgggtaaagcaaaatcctcgtatcaagattccaattatcgggaacggggatatagattcaccccagaaggccaaagaggctttcgagcgttatggtgttgacggggtgatgatcggacgagccacgatcgggaagccttggatttttgagcaaatcaaacattatttagcgacaggagaggtattatcggaattgtctgtcccggcccagatagagattatcaaggaacagattctgttgtccatggaatggttggatgaggtgagaggtttgtttcatatgcggcgtcacatggcttgtatgtttaaaggcttacctcattttcgggacttgcggattcaaatgttgcaagctcctaatatagaaacattgtggggtgtgtttgatcagattgcagaacgctacggttcgatggatcccaacgataggatggaagagtaaggttcataaagttttagtatgttttactttatgaaccttatagcccttataaactgatatacaggagtgcagcaacgagcgatcccgctaatggtcctacgacgggaatccacgcgtaatcccagccactattgcctttgcccggaatgggcaggatggcgtgcatgattctcgggccgagatcccgggcgggattgatggcataaccggtgactccccctaaagaaagaccgatgacccaaacaataaatgatacgggaatggctccgatggaaccgaggccgatcggggtggttgagtccacgtctgacatgagttctgccccggtaatatagaagacggagaacatgagtacgaacgtggcaatcagttcgcatccgaaattcacgatgttatggcgaatttcaggagcggtgcagaatacccctagcttgactccggaatcttccgtggctttaaaatgatcgtaatagatgatccataccagaaaagctcccagtgtggcacctagcatttgggcaatgatataaggccctacgctggcccatgggaatttttcagcgatagcaaaacctatcgtgatggcaggattcaggtgagcaccactgtaagggccagcgatcactactcctgtaaatacggcaagcgcccaagctgtggtgatggtgatccatccggcttggtatcctttggttttcttaagtacgacgttagctactacaccgtctcccaaaaggatcatgaccattgttccaagtaactctgcgataaaaggggacatgatttgagataaaagttaaaaactaaaagataaaagtttgaagttaaaaactaaaatattattcttcacctagttcttcccaggctcttgcacgctcgatggctttatgccatttgtggagcatggcgttcacatgttcttccgtgtcaatgggggtaaattcccgatcgatactccattgttggcgtaattcttccgtgtctcgccagtatccggtggctaatccggccagatatgcggctcctagagctgttgtttcaagaatctttggacgaatcacggtttcccggcaaatgtcactttggaactgcatcaagaagttattagccacggctcctccgtctactcgcatttctggagaggtacgtttcgtatcgtgttccatggctttcaaaatgtcatagacttggaaagcgatgccttcaagagtggcccgggtaatatgtgcgggagttgttcctctcgtgagacccaacatagctccacgggcgtactggtcccagtaaggagctcccattcccgtgagtgcggggacgaaatagactccgccgttatccggaacagaagttgctaaagcctcactttgagcggcattttgaattaagttaataccatcgcgtaaccattgtatggcagcacctcccacgaaaacacttccttcgagagcataggtcatcgtatttccaatcttccaagcaatcgtgctcaataagttattttcggaagtgatcacctcgtttccggtgttcatcaccatgaagcatcctgttccataggtggttttcgtcatgcccggttcgatacagagttggccgaatagggcggcttgttggtctcctgcgatgcctgcgattggaattttagttgaaaataacgtagttgcggtttctgaataaatctcgctactactttttacttccggtaacatggattctgggatgttgaacagatcaagaagttctttatcccatttctgggtatgtatgttgaaaagcatggtacgcgatgcgttgctgacatcggtaacgtgtactcgtccgtgagtgaatttccaaactagccagctatcaacggttccgaaacatagttttcctttttcggctctttcccgtactccttcgatattgtcgagaatccatttgattttggtggcggagaaataggcgtcaatgatcaaacctgttttctcacggatcatatcggtatatccgttttcttgtaattcacggcaaatatccgctgtacgtcggtcttgccacacgattgcacgataaaccggaagggaagtctcccgatcccacacgatggtggtttcacgttgattcgtgatcccgatacaagcaatgtcaagtcctgtaaggtttgctttggcaacagcttcagccgcaacagacgattgcgagtaccagatctcgttcgggtcatgttccacccaagcagggtgaggataatgttgctcgatcggtttttgagccatggcgatgatattgccatcatgattgaatagcacggcccgggaagaagttgttccttggtctagtgcaagtacatatttgtctgctttcatttgatagttattatagtgtatactttgtgtttatttactttgttacatttcaaatggcttgtgtttagtacttttttcaaactttatacatacaaaaagctaaccaaaataactaattcaaaccttaattcagtatacgatttacaaatagaaatgttttttatataaattcaaaaataaggggaagagtatttttcttatcttcgaggtaatgaatttagaatgaaatttatattgaagaaaatgaagaaatggaataccttttacctgttgcttgtcgtagtattggcaattgtaattttgaaaacatcgtgtatggaagatcagaaacaagatgaggctactttgaaatcaaaggctgttctggaaaatatctccgagcggaaaagtgttcggaagtatttgagtaagagtgtagaggaagataagatcgatgctatgttgaaggccggaatggcggcaccttctggcatggatagacgtccgtgggaatttgttgtcgtgacggatcgagtggcacttgattccatggcagcgaaattgccttatgctaaaatgttgacaagtgttccgttggctattgttgtttgtggagacacgacgctttcttcctattggtacttggattgttcggcggcaacgcagaatatattgctggcagctgaggctttggggcttggtgctgtgtggacggcggcttatccttatgaagatcgaattgatgttgtacgacagaatacgggattaccagagaatatagtgcctctttgcgtgattccgatcggttatccggatggtccgcaaaaagcaaaagataaatttgattcgaaacgggtacataggaatacatactaaacctttgctttatcattgcgctaggatacatacagatttcttaccttgcatagataaagcatgtacatacatgagtgtttatcctgtgttcttgctatgtttatgatatgtacatgatcaaaggaggggatagcttaatgttaaatcagggataggttatttaataaaaagagagcaagtcaaaacgacatgctctctctttgttttattgtcttcagagttatttcagtgttgatataatacgatgaagacgtgttaaagtttcttctttttctagaatttcaataatatcaaacatatgcgggccatcggcagaaccgataatggccagtcggaaaggattcatgattttaccgaacccgatttctttgcctgcaacccattctttcacggcttcttccgtgttgggagaggtgaaatcagtcactttttccagcacttcgatcaattcctgcatgagcaccggagtttcttctttccagcttttcttcacgcctttttcatcgtaagcttgaggggcgtgatagaaatactgggatgaattgtaaatgtctgcaacgaagttggctctttctttcaaaaggcgacaaatcttttccagtttcgttatgtcataagaaatcccgtcttttactaggaattcatttaactgaacggctagttccgtgtcgcttttttgtactagatatttgtgattaaaccatttggctttatccgggttgaagcgggctccggatttgttcacacgttctagcgagaattgatcacacaattcctgtaacgtgaagatttcctgttccgttccgggattccatcctaatagagccagcatattgatgaacgcttctggcaagtaaccgtcttccttgtacccgtgccatttttctccggtttcgggatctgtgaattccatcgggaataccgggaatcccattttgtttccatcgcgcttgcttagctttccgttgcccacgggtttcagaattaatggtaagtgagcgaattcaggcattgtatcttcccagccgaaagcacggtataataaaacgtgtaatgggagagaaggtagccattcttctccgcggatcacgtgggatattttcatcaaatgatcgtcaacgatgtttgccaagtgataagtaggcattccgtcagccttgaacaaaactttatcgtcaagtagagaggtgttaaaatgtacttcaccccggataatatcatgtagataaagatcttcgttttccggcattttgaaacgaatcacgtagtttgccccgctatccaacaatgttttcacttcttcagcgctcatggttagcgagttcttcatgtttttccggctgatggcgttgtacatgaatgtttcgccttttgcctcgcaggctgcccgttgtgcgttaagttcttctgcggtgtcaaaagaatagtaagcattccctgattccacgagttgtagggcgtattgtttataaagcggtttacgctcgctttgacgataggggccgtattctccacccacgccgacaccttcatcgacggtgagaccgcaccattttaatgattcgataatatattcttcggcacccggcacgtagcgggtttgatccgtgtcttcaattcgtaataaaaaatcacccccgtgatgacgggcaaataaataattgaaaagagctgttctcacacctcctagatggagggctcctgtaggactgggagcaaatcttactcgtacttttctatccattgtttattgattttgaatattatgcctgttcgttcgtttcctgtttgttgtcgaaatcagaatcctcgtctgaagatgcttccgtatctttcggagctttttcctgttctagtaattgatgtaacaggtctttggcatatttaatggcataacgttccgcctcacttttggagtgtatgccactctttatttgttccgcataactgaacgggctatccggcccttctgtaagaagatacagggtaaaattactatgccgatcccgacttttactggtcagtccaaaccacatttcgatcgtgcgatcttccaaatatatgttgcgcttgaacttgtacattaccttctgtttttaggcggatttttgaaattcagaataccaacggctacagctagagaagccatggctcccacgttaacatatactgccgtgcgatctccaccatgatacatgctgagtacactggaaatcatgatcaagaaagcggctagaattaataagtatctggctattcgcatattggtgatgaataattgtgttcaatggagtttttaaccgggttggcataaatttcaaggaagatattgttcaggatagaacggttcccttctaatttttccaatttttctgccatcacacgaataaagttttctttttcttcctcgttgtatttggaagcgaatttattcgtgctgtgaagtaaatcgtaggcgatataattgttcggccacaatttgaaattaccttgaatgcgagcatccatgaatgcggctaactctgcgatccggtctccgttattggcttgttcgtcgatctcgattagttcgtgatcaatgggaggggtgatggcaaaatgaacccgccctttgaacccggataaaccttgttgcatacttcgcatatcggctgccggggttttcacgtattcacccacggttttctggtataattcatctgttttcagatcgtcacaaggttcccattcgtaggaaatagacaccggaacaacccggagttctttaaagttttccacgaaatctttgggaccactcatgcggaacattttcaacaggctatgttgtgtccggtcatcaccattctttgtacgtccttctttttgtgcaatccagacagaatctttattttcataaatgacatcccgcaagtagtgggaacgtagattggcgctggtaatcatatctctcaccggaaggccgcgttcaatgatgaaacaagcatccagtttaaccaaatcggtcacccatttattgatcaatagattactcccgatggcagcctcgcagtaatggcagcctcgctcgcacaatagcacgttgaggatggcagagtctaggatgatgtcccggtggttggatacgaaaagataactcttatctttctcaatgtattccaatccggtagctgtaactccttgggttgttccggcgattaaccgttgaatcgtcgggccaaagaattgagcttgaaattgctctctgctcgtgatgccttttaattgttcttgtattttgcttttatcaacccttgtcatttgggagaaaagagtcaaaaattcttctgcttggctcaggcgctctacagctgctggaatttcttctccgatatagggtctgattgcgttaaattgggaatccgaagtcatgtcgtaattttagttattagaaatcacgaaacaaagatagacaagaaaattgacatttgaaaattgacggttgaaaatgaggggggaaagccctagtttatatgggttatccattgggatataaataaaaactgtgatttagccgttcttgatgtcaaggtttaatggctaaatcacaggatttttagcttatagttatattatactcttccgggatatacctcgagtgctttggctaatgtttccatggcacctttcaactcctcgattttgagtacgtaagcgatacgaacttcatttttcccaagtcctggggtagaatagaatccactggctggggcaaccattacggtttgtttgttgtattcaaactcttccagtaaccattttgcaaatgtatcggcatcgtccacgggaagttttaccacggcgtagaaagctcctctgggtttcgggcaaacaactcccggcattttgtttagggcttccaccatgaaatctcgtctttcgatatactcgttgtacacgctttcgaaatattcggccggggtatccagcgatgcttcggcaatgatctgtccgatagccggggcgcacaggcgagccataccgaacttcaaggcagcaaccataacatctttgttgcgggttactaaagctcccacgcgtaatccacattcgctatatctctttgaaacggaatccaataggataacgttttgctcgatacctgccaactgcatggtcgagaagtgcttgtacccgtcataacagaattcacgatacacctcatcagcatacaagtacaaatcatgttttttcacgataaccgctaattgttccaattcttctttggaatacaggtagcctgtcgggttattcgggttcacgatcacgatacctttcgtgcggggagtgattactttctcgatttcactgattgggggcaaggcgaagttattctcgatagaagaagtaactgtttttacctttacaccgcacatcaaggcgaaagccgtgtagtttgcgtagaatggttcggggataataatttcgtcacccgggttcaatgtagacatgaaagcgatcgtaatggcttcagagcctccggtcgtgatcatgatgttattttcatcgatgttgataccgatgttctggtaatatttggctaatttttttctgtaagaaatatttcctgcagaatgtgtgtattcgatcactttttcgttacaggttttcaatgcctgcaatgcaacatcgggagtctgaatgtccggttgtccgatgttcaagtggtatactttgatacctctttctttagctttgtccgcgaacggaacgagtttacgaatgggcgaagaaggcatcgccattcctttttctgagatctgtggcataagttatttgagtttaaatttatcctgtacaaatataggcatattgagtgattttaaatcaatatgcctatatttatttgttgaaaggtaatgtctaatttaaaataaagagactaaaatatagagccaatgtgccgtgactcctgcgacgagacctccgacagtgtgcgacaagatggcttttgaggtaagttctcgatagccaagcgagtcgagcatggctgtatgagtactgagatagccactccaacacattccgatggcagtaaatacagcaatggcgtttccgtctatccaaccttccgtcaaaaaattggggactagaccgagggcggctcctactgcacccaaagccgtgatggggaatgctactaagtgtggatctgtgaatccgaacagccagcggaaaatgaaatcaactttatttgctaaccaagggagggcctcaactccttggtaagcagcacccgtatatccgtcggtgcctgggccgaaagtcaagatcattaccagcgtagagatgatcaacactcccggaatgatggcaataccgatgtcaaccccggttcgtcccccatcaagtaatgagttaaggattcgtaaaaagagggtcttttcttctttatgttccacttctactacgattgtttcgttgcaggcattttcttccgcgtattgtgggtatgatttcagaattgctcgttgcattaggcgagtggaaacaatacaacctacaaatgctccgaatagtccgataaatggttcataataaaacccttgtcctaccatgaaaacaatgactaataatcccataccgaaagcggttccaaagttagttaaggagatgaattggtactttttgaaataactgctgaagcgtttgtcttgggacaaggaaatgatggccgggttgtctgataggaatgtcatcacggctcccaaagaagccactcccggtaaattgaataacgggcgcatcaatgggcgtaacattttttcaagcaagttgacaacgccaaattcgacaaacaatcgtccaagagcaccagttatgacacagatacccatcaaatagaacacggtatttagtaataaatcatgggccgttttcatgatggtgttcagcatattcggagtccccatgacagaagcaatatacccgaacagggcaaagattacggcaaggcaaacgattccgctaggaatagcttgccagcaccggcgaagaaaatttacaatcatatctatatactaattaaaatttatttttttattcttgagagagaggaagtcgactttccattttattcctatatttaggatattttgctcggggggaatggctccttccgtattcccgttatgaccgaaagcataagaatagaatgcgtgtaaacgtagattcttgttgttttttagcgggtaaaattctaccccaccgcccacgtgagtaagttccgtgccgggatgcacacaatagtctgccttcacttgggtcctgtttacgtcataggtcactttcccgaataagttgaagctttccgatggacgataggagagttcacccattaccgagcaattcttgaaaaagtaagtttgatgatcggcagcccggttcatgaaatcgagttccaaggcggttttcccgaagtccaaatgatggcctaaggcgatgtagttgatatatttgtcgggttgatactcgatcatattcacggaatagatggtattaaaccagccgtgagagccgtaccacataagattataggaatatatatcgtctgcgtcggcacggaaggggctttggcagagttgaaacattaccttgtctttcttgcggttaaaggtgtaatctgcgctaattcccatttgataacagggaatgttattccaatattccgaacagaaatagagatctataggagcacggtcatattcgtagcccccgatgcctacaacctgtttaccgaccgataggccccagtgttcatcgggacgataggttaaatacagccaatccgtggcatcaaaaaaactttggtccgagtgagctttgtttagacgttgcctgtaggaataggaaaactgttttgcgatagttccgctgataatgacatttaaatattttcctttgaatccggaattagaatggatagaccttccgtctacgtactcgcgctgatagtctatacgcgtttctgcctgtaactttagtaactcttcttgagcttgtacaacaaaaaaacaagtaccccaaagtaaagtgaggagtattttcttcataccttttaaatagtgatttaatttggcggccaaataacaaaaaaagagtaaatttaccaaagaaaaagagaaaaaaacaatttttgtatacgtaatgattatcagctgtttatgatttgttgtaatttatctcgctgtaataattttatttttctcccttttatctcgacgagtccttcgttttttaagtcagagagtagccggataagtgtttccgtggcagtccccacgaaattactcaagtcttctcgcgagacgttgagttttaacgtgccgtcttcttcaaccccaaaatccgaggctattagtagcaggatttctgccaaccgggctttcacggatttttgggcgatatcccggatgtagtgattggcagcccccagctctttgcaggcaatttgcatcatttcgtaagcgaaactgggactgtgggtaatcatgtgcattaaagaggcgttggggatataacataagatacagtcagacatggtttccacagaagtacaggctgcttcattgcggatgacagaacggaacccgaaaatatctccttctttcccgaaacggatgatctggtcttttccggcaatcccggtttgaaaaatcttcacgatacctgaaaaaagaaaatagcagcccttgatacgggctccctcgttatagatataatctccttttttgtgaaatttaatggtagtgtcgacaaacaaggcctcgatttccgagtcgatcacgtttttaaatgtcagcttgaatttactgatacattcgcttacgtctggtaataaagcctcttctttcataataaatcagctgttgtttatatcgaacagattgtctggaggatcgattcacaatcatacccgcattcgtgataaagctgctgttggcttccatgttccacgaaatgatccggaattccgagccgcacgattttagccgaatagccgtggtccgccataaattcgacaactgcactacctagtccaccgacaatagttccgtcctctaaggtaatgatttttttgaatttgtgaaagattccgtgaagtaattcttcatctagcggtttgagaaatcgcatatcgtaaaaagcgacggatcggcctgtcgttttttgtatcgcttttaaggcttcgttcccgatagctccaatagaaataatggcaatgtcgtcaccttcaatgaggcaacggcctttgccgatggttaattctttaaaaggtgtacgccattctaccatggttccacagcctctcgggtaacggatagaaaaaggtccccggtccggtagttgggccgtgtacatcatatttcgtaactcttcctcgttcagaggggaggcgatcgtcatgtttgggatacaccggaagcttgccagatcaaatgtaccgtggtgcgtggctccatcggctccaaccaaaccgccccggtcgagacagaatacgacgttaagcttttgaagagccacgtcatgaatgacttgatcgaatgcgcgttgcatgaaagaagaatatatgttacagaacgggacgtggccttgtgcggctaacccggctgaaaaagtaacagcgtgttgctcggcaatccccacgtcgaaacaccgatccggcatttctttcatcatgatgttcaaggaacatccgctcggcatggctggcgttatacccacgattttggggttcctgtgtgccagttccaatatggtatgtccgaacacgtcttgaaatttaggtggagtgttgggtttactctctttgatgatttccccggtttctttattgaatttccccggggcgtgccatgttgtttggtctatctcggcctgtttgaagccttttcctttcaccgtgatacagtgtaaaagttttgggccttttatatctttcagatcccgcaggactttgatgaggtggttcacatcgtggccgtccacggggccgaagtaccggaagccaagagcctcgaacaggttactttgacgtaacatgagtgatttgatactattatctattttctggataaaattccgggcaccaggactgatcttgttaatccgtccaagaatgtgccagatgtcatccttgagtttgttgtaagtctttgaggtcgtgatgtccagcaaatactcgtttatcccgcctacattcgggtcgatggccatgttattatcatttagaatgactaacaagttggcgttgttaatgccggcattattcaaaccttcaaaagccaatcctccggtcatggcgccatctccgataatggcaaccgactgtcggtcctcctccccgttcatcttggctgcaactgccatacctaaagcggcagaaatagatgtcgaggagtgtcctgttccgaaagcgtcgtatttactttcacttcttttcgggaacccactaagacctttatattgtcggttggtagagaaattatcccgtcttccggtcagaattttatgaggataagcctgatggccgacatcccatacgatattgtcataaggggcattaaatacgtagtgtaatgctaccgtcagttcaacaactcccagtccggcaccaaaatgtcccgggtgttccgaacactcgtcaatgattttctctcgtaactccttgcataattgaatcaggtcgtcttccggcacctttttcaaatcatcgggagaatttatagtgtctagtatatttcttttttcctcactcatgattatgtattgaaaacaataggggaatttgtcttcttaattctccattttcaattagtacacgattgttcctatgttttctcccagaatgacctttttaaggtttcccggctgatccatattgaatacgatgatcggtaaacgattctctttacacatggttgttgctgtcagatccatgactttaagtccccggttgtatatttcatcatacgtgatcttgtcaaatttcgttgctgccgggtccttttccggatctgccgtgtagattccgtccacgcgggtccctttaaacatggcatctgcctcgatttcgattgcccgtaaactactggccgtgtctgtcgtgaagtaaggatttcccgtacccccgctgatgattgtcacgtgtccggatttcaaatattccatggctttagctttcgagtaaaattccccgataggctccatgcgaatggcagttagtactttgtttttacagccttcattgtctaaggcggagcttaaagccaaactattgataacggttgccaacattcccatgctgtccccttttacccggtcaaaacctttatttgtgccactcagtcctctaaaaatatttccacctccgatgacgattccgatctggattcccatctctgcgatttcatgaatttggcgggcatagctttccagacaccgggtgtcaataccatatttttgttcgcccattaaagattctccactgagttttaacaaaattcggttatattgcatatctttgttcgtttaaattttataacaaaaaccagaaaaaaacgttgtttctgtacgtaaaaacgtaacaacaaagctagtgatttttgttataactataatttaaattcataatataaatttttcggcagatgaataagaccgcaaactatcaattaactatcattgttccagtgtataacgaagaggggaatatcttgaggttagagaaagaattgggagagtttttaaaggatgcgaaggtggcttcttgcgtgttattcgtgaatgacggttcgaaagatgatagcgaacgtttgattcgggaagtttgtggacgtaacgaagcatttttctttttaaacttggctcgaaacgggggattgagtgctgccatgaaagccggaatcgacaatagcttctcaagatgggtcggctacattgatgcagaccttcagacaactccacaggattttaataaattgctggagttcgtggatcaatacgagatggttatgggtattcgtaccggacggaaggatagtttcgtcaagaatatgtcttctcgcatagcgaatggatttcgccgaatgatgacgcacgacggggttgaggatacaggttgtccactgaaggttttaaggacggattatgcgaaaagaattcctttcttcacggggatgcaccgtttcctaccggctttgattcaattgcaggaaggacaagtgaaacaggttccagttcgtcattttccccgtattgccgggaagtcgaagtataatctggccaatcgcttgatcggcccttttaaagattgttttgcttaccgctggatgagaaaaaggtatatcaattaccaagtcgccgagaataatttgaattcttgagatatagttcctagcttttagtttttatctttaaacttttagtttacaaaatgatttatgttataggatttcttgctcaggtgtttttttctgcccggattcttttacaatggatcttatctgaacgggctaaaaaagtgatctctccggctattttttggcagttgagtattgtgggttcctatctgctatttgtatatgggtggttgagggatgactttgcgattattttgggacaaatcatatcttattatatttatatttggaacttggacaaaaagcaccaatggaagaaattaccgtttatcatccggacactattacttctgaccccggtggcggcgattttatacatgcttaaagatgcaagcgcttttgttgatcagttctttcggaacgaaaagatacctttgtggctcttgatctacgggtcgatggggcagattatttttactctgcgttttgtttaccagtggatctattccaagcgaaaagatgaatcgctcctgccgataggcttttgggtgatcagtctattgggggctctgatcatcgtttcctatgctatctatcggcgtgatcccgtgttaattttagggcagtcaaccgggttaatcgcatacagtcggaatatttatttgtctaggagagccggaaactaaaacaggttgtaaacttcctgcttattttcaagagttgaatataatttacaacctgttagaaagaataaactttatggttttaattcattcattttttcaatgatttgttctcgttcatcttgtagtttctgtttttgggaatcatcacttgatcttatcgcttggtcaatccatttcagtgcatagctcagagcttcgtaattatccgagtaccagcaaatttgtcgggacatcataatcatgtaagtttgtttatcctttcctttgggaatattgaagtcaatggcgtggtcgatagccttaaccattgccatccagtctttgaatttatactgggcgggcatcaagtaaataagccattcggtagacttcgggtagtcggtattttgaaggcattctaaaatgtctctatactcttttgattcaatgggaggtgtttgtccgtacgtgtatgtgcggagtttcccgttaaacatttggtcaatttttccattgacgatttgttctccaaacaatttattgaattcttctcgatgtttgaatacataacttccttcctggctgacaggagactcgttgtagcgtaagaacacattccagtatttgggtgtttttaaagaatctacatgaaacgagagcgagaaaatattatgcaatactgagtctctttgggtccttaaaccagcaatatgcagagtttccagatagttgatcaggaattctgaagatcggttcccgttgtcatacattaatttttgtgcggttagattatttttcacgtctaggccttggcgtaggcgggccatcatttcgcctgcggtacattttccttccatccggtgcatgaccctaccattcgcatcgcagatcagaagcacgggttccgtgtagacctcgtaaatcttacttagtcgtttcttttcggggccttcggtgtaatcaacgctcacgaaacgttcgttgataaaatcagcgatactatcgatcgtgaatattttgtttttgataaataggcaaggagaacatcttggagagccgaaatccaataatacatgtttcttttgttttttcgctttttttagaatgtcctgtaaagggatatttttgggtaaatccacttgtcggttttgtccgtgtactcccgttagcaagatggctgctaacaggagtaagaaatactttttgatcataacaacattatttttggaggcgaattccatccagacagaaccaggcgggaatcaaactctgctggttgttatctcggtatgagcactctacgttgaaaacgaccttatcaacaacacccaaagattgcaaatcggcttttatccagtctgaacggaggaaattgaatgttggatttgccgaatcggctcctttacggcagcacaagtaaaattcaaccgttcccgtgtggctatctcccaaaaaacctttaatgatcaatttaaaataatccccgtcaaggttcaatgcccgttccactccgggtgcataagtttgccaaatacccttgggagcggaaggaacattgggattagcgataggagtggggcctgtatctttgccataattcattgcgaaataagcataggtcgtgtttgccacaaggatatactctacaacagttgctttatctagcgtgaaataaacatcatcatctttcacacacgcaacagcatatacttccgtctggttgggacggggcgtgtaaacgctaaaacggttagaatctaaggccgcatcagtgccactccaagtaaatgaacgattacttcggcgggaatatgcgaatccgctaaaagttccgtctgaattctttttcgtattgaatgttattcctccggatttgaaaccgccatctgggatgacatgagtaaatttttctagctgtaattcattcaacgtaatatcattgggttctttgaccagtttgtcatagtcatcttcacatgctgtaaaaagcattataacccctgcgaataaaatatagattaattttttcatcacttcaagtttttaattatcgaaaccgggattgggctttatttgattgttcacgttggtttccacggcaggaatcggccaacaatatttatttgtactgacttcagatacatctggctttaatgttttaaaccaaggattcccgtctttttcgaaacgcagtgaagcaaaccattcacttccgttttctacaaataattccagacaatattctttaaagataatatccatcaattcatcacgggttgcaggttccgggatttggggtaatatgggattggtccggttgtttcggagtgtattgatcggggcaagagcctctgcaatagtagctcctgttctagctcttaattcggcttgcatcaatagtaattccgggtaacggaaataatacgtggtaaatttgtcattcatatcggcacgtccgcctctggcaactttggtcgggcaaaaatattgttgtccggtagcatttaggcgtctggcccaccccatcgttacgtcgtatcgaggatcagtctctagccatgaattgaattccggatagaatgatttcagggacgatggttcttgaccaactaccaaaagatctcccgtttgtatgatagtctgcgtgtacgcgaattcggagtatgcccgtccgctaccgtcttcaagataacgggcccataaaacttcttttgaatcccatgcttcgtcgtacatatttttcatatccgggtccatcttgaaatcggccggaagagaggccatcgtttcattcagtaacaataaagcgttttcgtagtcgccttcccagcctcggtttagcaataatttgacttttaatgcctgtgccagttgacgggataggcgtttggaggttgtataatcacccaggtctttgatcgccgcatccagatcatcaaatatcttttgataactatcttttacgctcaaacgatcccgatgcacgttaatcatgtcactcagctcttctctatacaaaatcccgtattcatcatctgtttggaaatgcccgaaacaccataacaagtgggcgttcacccatgctcggaaacaacgggcttctgcaatcattcgacttttttcttttgtatcggggaatttgttatctgctaatgccgagatagaaatgatagcggcgtttgcggcgttcacgcaggcataccattgttgccagtaagtagcaattccattcgtcgtagaagtatatgacattgaataaaatgttgttcccccggcacgggatactcctgcctgagaagatagggcacaggctagactacctccgaaaaagtcacttccggaagtgccacttcccagtgttaatgaggcatacattccattgataatgttttgtgccccgtcataatccactacggcattttcgagggtttgtttatgcacaggctcttctgttaggaaatcatcacaggatgataggatgaatccaaagatcaaaatatatatgattcttttcatggtgcaggatttatttgaatgtaaatttaataccaaggctataagttctcgctgatggataagtgctgtaatcaacaccttgtgccacagttatcacgtcattggctgttgcggacgtcgaggtcgaaccgaagttcccttgtgggtcaaagcccggatatttcgtgatggtgaataagttggatgcggagaaagataattccacgttattcacgaacgttccggtaaaccagttcgctggtaaacgataatttaaattcaatgagttcatccgtaggaacgaggcatcatgaatatacaggtcgcacaatgcattggctacggttcccgtataggctaaccttggaaataaagcatcgccacctttgaaattgtaactatcaaatatcgagttatacacgttgtaggttcccacgccggacgttttctcgtattgataataccacattctttttgccccgtatgagtaagtgaacacggcggttgcgtatagatttttccaaccgagtgaaaggttaaaaccaccaaaaaatttggggttaaaattacccaatttcactttgtcttttgccgtgatctttccatctccgtcctgatcaatcaggtatgcgtcacccggagaattgtaactaccgaaatagttttcctgtaccccagtagatgacaccggttttagtgcaataatttcctcttgagtccggaataatcgaccggcatatttataaccgtaccagtctccgatgtgtccgccttcaaccaaacgaacatattcataataataaggcattttcaactccttcacgattccatccagtttttttacttttccggagtttgtggcgatattaaagccgatttcaaagttcactttatccgtccggataacgtcaccccggatgtcaaattcccatccgacattggcaattgttccaacattctggttgaccgttgtgtaggatgaatttgcgggtacagacccgtcgtagatcagattgttgatttgtttattgtagtatccgattgttccgcgaaggcgttcgtttaacaaaccgaaatcaagacccacgtcgatagaggtagtttcttcccattgaaggaccggatttcccaaagaagttggttttgttcctggttgtccgtcataggatgcggctcccataagggagatataatcatagttacccaagttctgagaaccgatctttccgacagaagcccgtagttttaaataaggaatatacaatttcaagggggacataaactcttcttcagagatcacccaagcgagagccccggaagggaaatatccccagcgcttgtcgggtccgaacttcgaggaaccgtctgtccggaaagtaaaggttgccagataacggttattgtatttgtaattcacacgggcaatggctgatacgagcgtgttcccggcttcatcactatccgcccaagagtcagctccgctgcctaggttaattaatacctcttcatccgggaattcttccgcaccaccggaaagcattctggatttgtatttttcgattgaatgtccgaccatggcaaccaaattgtgtttgccgaaagtcttcatccaagttagcgtgttatcccacacgtaagtgttgttctcactattgcctaagttacggctattgtaggccgtggcatatcctcgtgtcccttttttagagaaaatgtcggtttgcgaatttgtgtaattaaccgttccggtagatttgaatttcaaaccgtccaaaattgtccattccagaaaagctgaaccggagaaagttaaacctcgtccatcgtttcggttagccagagttaaatgcgggttttcgatcaccgtgcttgttgttacgaggttaatacttccgtcttcattatatgccgggaagtccggacggaatcggatgatattgtcaataagattatccttgttattggtttttctggatgatccggataaattgacacctagtttgacctgtttcccgattaatgtttcaaaattcaaacgtcctgttaataatttactgcgtcctccttttacaacacctttttgatcattgtacccgaaagagataaagtagttagagttctgtgtaccacctcgtacggaaatgtcgcattgcgtggtcaaagcattctgggtcatttcatcccaccagtcggtatctccgtccatgaaagcatcggggagtaattccagcatactaccgtcccattggctcgtgttcaattgattgaatttggattcattgaaaaaaagtcgggtgttgtaatcgaatccggcaatttcaatggattgacgaccgactgtctctacgaaacgcttgtattctgccgcattcaaggcgttcagcttgtttgaattgatggtctggattccggctcggagagaaaggtctacggtcggttgcattcccagtttgccccgtttggttgttacgatgatgacaccattggcggcccgggaaccatagattgctgttgcggatacgtcttttaatatatcaatgctttcgatgtctgataaattcaagttgaataaagcattagttacgtctcccgtggaactttgtgaataatcgggaaccccgtcaataacccataacggttgagtgtttcctgttaacgttgaaattcctcgaatcataacatttaccggggaagtgggagaggccgattgaatcatgacgtttactccgggagcccgtccttgcaacatactttgcacgcttgctcctgccggagacatggcaatatccttttctccgagtcgggatacggctccggtagcatcttttaccttggtagttccgtaaccgacgataaccacctcgtcaacgaagctcacgctatctttcagttgaatgatattcagtttatcaaaaacattcgagtttaatacaaaccgatatttagcataaccgatgctactgatgatgagtgttttcgcatcttctggaatgttgattgaaaattcgccttccacgtctgtggcaacccctaaagtcgtgccttctaagataacagtggccccgataataggttctttgtctttttccgaaatcactcgtcctttcacgaccagttgtttctcctcttcagcttttaccgtattattcttgcgtcttagcaccacaatacggtcttcttttatctgataagcgaggggtgtgtctttaaatacggcatctaaaattgttacgatgtccgcatccttcaacgagacggttattttaacaccttccttatccgtgtcgttgtacacgaacgtgtagtccgttgccgattccagatactcgataacaaaatcaatcgaggcgttgttgaagtgaacatccattttcttgttttggctcactccgtacgagtaagtgcaaaatgtcatgaagataaaaagagcaaatagtttcccgaacattctcgggtcaggccgaaaaagtctgaatcccgctttggggattgatgaattttttttcatggttattggtttttaaacgtactaaagtctttgttttaattgtctctttacatgtataacagagtcttgttgtataaaatcgatttttcctgtagcttttaatattcctaaaatgacattaccgttatcgtattttttcatctttccggagaagattaagtcttttaatctttcttcttcgtacacgaatttaacatcataccaacgggacaattgtttaagaacagtctctaagcgagtggacttgaaaattaatcgtccttctctccatgccgtgaagagttccgtgtcaaccgtttcaacttgtacttctcgtgttgctttgttgtaagtggcctgttccccggggtgtagaatagtcttgtcggatgataattgcacggcaccttcgactagtgttgttatgatttcatgctcatcggaataattctggatattaaactgagtacctaataccgttaaattcaaatccttgttccgaacgataaatggttttgttttatcttttctgacatcgaaataagcctctccggaaaccaattccacttgtcgcttgtccccggtaaaagcacggggaaattttaattctgtctctgaattcatccagacacgtgttccgtcagctaacacaagttcgaactctcctcctttgggtacataaattcgcaggatttcagatgtttcaagctgttttttatgacgggtactatcttttatcgaatagcactgacccggcagggatatgcgtacgtcttgttcgttttgtagaatagccttggaagaaatgggttctaagaacaactcggcaatttcgatcttttcttccggtttgtcgggatataggaaatatacgctgacacagataaagcaaatgaacacggctgcataccgtaaaaaattggtatatagcattttgctttttcggtaagtcttttgtgaaatctttgcccaagctctttgctggttgaataataaaaatacttcttgttccgagcggattcgttcgtgatccatgattgtctggtacaaatcatcgtgatgtttatcctctttcaaccaacgggataactcctcttgctggtcgggacttgcctcccccgtgtaagctaggaaaagcaaatgggcgatatgttcacaatctttaggtgtcattgctatctcttttatagtataacaatcgactccttctaacgtactatgcgggatttatttttttgtaaattattttgcaccaagtgatatgaaaatgtaaaataggattgtaagatattcatccttatatagttccttgagaattttaaatcctttgaccttctgattttttactgtgttaatggaaatatttagggctttggcgatttcgtcatttttcattccggaaacagacatatcgataatcttgcggcattccgtgggcagggactctaaccagtggtttaatttctggtcgaactcagccataatgatataatcatcgtaaacggcttcatctgtttgggcaacaaattctttcagttttgccgctttcatttgttcatgtttggcatgattaaagcaagcgttacgtgtggagacaaaaagaaaagaactgattttttcgatacaatcaaatttttcccgtctgttccatagggccacgaaaatgtcctgcacaatatcgtcaacagcgtaaggcgtgcggataaaatggtaggtgtaggaacacaaaatcttataatagcgatcgaatatgaccttgaaagccatgggatccccttcattgaaagatttaattaatgttgtgtccttgattgttaccatgggacaaatatacgtaaactcgctcacatacggatggatttc

SEQ ID NO: 10898 - DNA, 32883 bp, Unknown
  gut microbiota DNA sequence
aatcgtatttttcaagatataaggataaagtatgtaaatggatagaaatacttctaaggttgattatataaagacgatgtatttaaagtggggtggataagataaaagtttccgatcttctcgtgatgggtttgttgaatccagttcgagagtgccggggaacgcataacgttcttttctttgacaaaaatcatgcagtcgcctttccggtagatattgaataatgaatcctcggtcgagatcttcgtggcctcttcgtgtaaataaacatccatattttctccgccacggaatttataatagtaataatgatgaatattctcttcttcgcgtatgtgattcgcttcggttgccatggcggtaaaaccgatgtatggattaatctggggtaaagcgaaagctcccgtgaacaacgtggcaaggatacccagtgcggtacaattgatcgcccggaatatttgcttgcgatatagtaaataacaggctgttacactgaaaataaacaatgttatgatggcgacgtaaataaatggcgagtcgggaacattaaatttattgcggatgaaaaatgccgcgatgggagcgatggtaagggctgccacgggaatatgcacggaaaatgcaatccatttctccttgatcttgggtagtaacaggatcgtcaagtatgtgaagaacgggaacagaggcagcatatagatgtccagttttccgctgaacatggaaagaatgacgaaagtcgagactattgccgagaggaaaagtttttctttatctgtcgtgagtagtttcttttttatcgcgataacgattgtcgtgatgtacaggatagaccagggagccacggagtaccagaacgtcaccccgtaataccagaatgcttttttgtggtcgaacgaatcaatcgcccggtttatggtttgatggaaaagaagattattcaggtaagttgatcctccttcgagataaataccgagaaaccatatggtacagaatcccgataaaataccccattctctccagccgaaataccggcagaaagaacggacgtctcttttcaccagcagaaagacgagcatagttatcaagggaacgataaaaccgacaggtcctttcgagaaaatagccatgaaaatatagaagggcagcaagaaacggtctttcggttggcccttgcccgaatagcgtttataaaacgtgtacagggcaagaagaatgaacatgcacatcagcatatccatccgcaggacaaggcccgaaccgataaagaacgcacttgtgaaaagcattagcgagccgctccatctcagggatgcggtggtgtcttcttcaacccatttattcatgatataaatggaaatcagggccggaatgatagaaaaaagtgaaagaccaaacatattatattctccccagatccatttgctcaacatgagtaaccagaaataaaggggcgttttatctgcgtaaagttctccttgatggtagaaagtaaagaaatgcccgtcccgcagggcttcgtcaacgatgctgaggtatttcagttcgttgtttggagtgaaatcccgtaggatcaacacgggaatcaccaaaataagcaatataaaatatcgtccaattttcatgattatagtatgtaaatccttttcgtgcaaaacacatccaaaatgtataccagaaatgtttcttttttgttacatccggagaaaaaattcttcctgcattatttgaaggatatgctcttgaaaatagttttattattataaatttgcactttaatctaaacgtgtacatgagattatgcagaaaaactacattcattatctttttattcttatcgtttgttggttcgcttttttcgtgaataatggttctgtttatgaggatattatggagtcccgtaatttggttacggcgcatgaaatgattgaatatgacaattggttggtgcccacgatgaacggtgaattacgtttggagaaaccgcctcttccgacatgggtcgccgcgggaatcgagtatttacaaccggacaatatatctttgcagcgtgctgccgctggaatcatggccacgttgatggcttttttcctctacttctttgcttcggccttaagtggcaacaagctattgggattactttccgccttggtgctggcaaccagctttaatgtcatcatggccggacgggtagcgacatgggatatttattgtcatagttttatgctgggagctatattcttcttttatcgggggatagtgagtgtgcgaacaagttgggctaattttatctgggccggggtatttttgggactgtctttccttggcaaaggacctgtggcattctatgctttattgttgcctttcttgatttcttatgcatggatctatcgtccttctctcagaagaaaaggttggcctattgtcgtcatgctactattatttatcgttatcagtttttggtggccgctttacttgtatgtattccaccgggatacagctttgttcgtgctggcgaaagaatcgacggcatggatcgagagaaatgttcgtccctggtattattattggttgttctttgccgagtcgggaatctgggctttgttcctcttgactgggttatgttggccgtggttaaaaaagaaaataagaatgcgtaaggaatacacgtttgctgttttatggaccgtggttaccttggtattgctttctcttttcccggagaaaaaaactcgttatctattgccgttattgatcccggcagcgatggtcgtggcacattatatcgtttatatattcatggcggcgaaggagaaaacgcttaccgccagtgatcgcatggtgttccgtgtaaatgcttttatcccggcattaattgctttaggaatgccggttgccgtctatcttttattttatcgggaaggagaagtcggattgactcttttgattatcgtttcgatcctgttcttgcttgcagcctattctatttttgcgggaggagtgaggataaaatcaatgaaagtattcacgggggtggtattgctgttaattcttgtggaaactctgttgatgtctcgtgttgccaatatgttcaataacacggagatcaagagtatcaaagctgttcgccagattgaagagttacaacatgtaccgttctattatccggccgatgaggaattgagaatcgagttggtgtatgaggcaggccgtcgcatattaccttgggatgtaaaaagcgatacgacacttttgaacactctgcctatcgtgctggtttccggtaaacctgcaacggaggttcttcctgctgcgatgcaggagaaagtgaatctacgtctaatagatgtctacgacaataataatcgtccgaaaacagataaaaaacgctattcccctaaattcgttcgctacgtgacaatcttggagaagaaataaaggacaggtcatatcaaagatgtggaaacgaagacagattttattgattataccgggggttttggggtaataacgcctgttttaattcctctacggatgccacaatctgtttagctccagcttgggttaattcctcccgatccccgtaaccgtacaaaaccccgatacagtcaattccggcatttcgggccccgataatgtcgtgcttccggtctccaatcatgaccactttactcaactcccggatgtcattattttccagtacgtggcggattacctcttctttatgggacaacgagccgtcaagcccgcttcccccgacgaatttgaaataatgactcaagtggaaatgatcaagtatcttttcggcgtaataagccggttttccggtagccagcatcacttgcttttcggcctcgtttaattcttgcaagagacgttccattccgggataaacggcgttttcgtatatacccgtgtcggcaaatctttcccggtacttccggatgccttcctcggcctgatctgcgctgaaatggcagaattccatcaaggattctttcaacgggggacccacgaatttacgtagttcgtttaagtcattcacttctattccgaaatgtttcaaggcgtaccggattgatttggtgattccttccatggaatcggtgaccgtaccgtcaaggtctaaaagaatgtgggtgtattcttgctgcatatagtgggtgtgagtggataaaaaaacaggcctattgctaagcctgtttctatatttcaaagatttatttcctgtattaggcattcaacgtgaaacgtaagaaagcggtaacagttaaatctttatctacgctcttcaagtactctcttacagacattttaccgtcttgctcgaaaacttggtttaacaaggtagactcttggaagaatttgttcaagcgaccttgagcaattttatccaacatgttttccggtttaccttcttcacgagctttttcgcgaccgatctcgaattcgtgatcgataacgttttgagggataccgtctttatccacggcaacaggagccatggcagccacttgcatggcgatatttttcttcacttgggtatcggctgctttgttgaaaccaacaacggttgccaacatgtttcccgggtgaatatagatcacgcaatcttcagcttttacaaaaccgtagtagcttaattccagtttttcaccgataacaccagtttgttctgcaatctggtctgcgatgcttctaccatccagttggatagccaacaaatcttcggtagttgcgggcatgttagctaaagcggcgtcaagaatcttggttgtgaaagcaatgaatccctcgtttttagccacgaagtcagtttcgcagttcaaggaaaccataactgcattctttccatcggttttggccaaaacgcatccttcttttgcttctctgtctgcacgtttgcttgcaacaacaagacctttcttgcggatgatgtcaacggctttgtcgaaatctccttcagcttcttgtaatgcatgcttgcagtccatcattccggcgtttgttgctttacgcaacttcatcacgtctgctgcttttatttccatatgctttaaatctccatgttaattcaatttcagaagtcagatcattcaatcttaaatctgaaattgaaagtctaaaattaattattcttcagaagcggtttcgcttacttcagctacttcatcctgaacttcagctttctcggcatttttcttgtctccttctttctctctctcggcttttctttcagtcagaccctctttgatggctccggctaccttgtcgataattaaagaaatagaagttgatgcgtcgtcgttagctgggattacgaaatcaattccttccgggtttgagttcgtatccacgatagcgaataccggaattcccagcgtgttagcctcttttacagcgatatactccttcatcacgtcaaccacgaaaagagctgccggaagacgagtcaggtcagcgatgctacccaagttcttttccaattttgctctttgacgagagatttgaagtttttcccgctttgaaaggtgagcgaaagtaccgtctttttccatcttgtcgatggtggtcattttcttcacggctttacggatagtcgggaagttggtcaacataccacccggccatctttcagtcacgaacggcatgttgatattagaaattttttcagcaacaatgtccttagcctgtttttttgttgcaacaaacagaattcttctacctgatttagcgatctgtttcaaagctgcacttgccttgtccaacatgatggctgttttgttcaggtcaataatgtggatatcattacgctccatgaaaatatacggagccattttaggattccatttacgggtaaggtgtccaaagtgacaacctgcatttaataattcgtcgaaatttgtatttgacattttgtgtctcctttaaagtttacattcttaaatttaatcaattgccgggtagttctccacagaagtcccgtcaatttagatactaaactcctattaacgtttagagaattggaatctcttacgagcgccaggacgtcccggtttcttacgttccacttcacgtgggtctctggtcatgaaccctgctgctcttaattttgatttatcctctgcgtttactttcaccaacgctctggcaattcctaaacgtaaagcttcagcttgtccgttgaaacctccacctacaaggtttaccttgatgtcatattgtcccaacacacctaataattcaagcggttgttttacaatatactggagggtaggcaacgtgaaatattcttccaggcttttcttgttgatcgtaatattgccttttccttcgttaagataaacgcgggctaccgctgtttttcttctacctactgcatttactacttccataccttgttatttaagtgcgtttatatcaattactttaggctgttgtgattcatggttgtgttccggtcctacgaacaggtgcatgttcttgaatacagctcttccaaggcgatttttaggaagcatacctctaacagcatgttccagaattctttccgggaatcttttcatttcttctgccggggtagaaatccgttgacctccaggatactgggtgtgtctacgatactgtttgtctgttaatttgttacccgtgaagataactttttctacgttgataatgattacattgtctccacaatccacgtggggagtgtaactgggtttgtacttgcctctcaatagtttcgcaactttagcggcaagacgtcccacaacttgattctctgcgtcaatcaaaacccattctttctgtgcagtggctttgttgacataagttgttttgtaactaatctgatccactttttttttaattaaatattaaacttctgtttgtatttcttcgtggggactctaggcattctatccggttgaaaataacgaggtttatcgggcaaactgatataattttcaacggagacaggtgcattgtaatgagcatggctaaggtatcccttacaatttagcgagtactccactccaaaatgaggggcaaaattacacattaatacgtgaattccaaaacattccgcaaaaagatttgttccagagcgttttgatgggcttctgaatcatacgtttgggggcaaatggtaggtgtatatttttcgatagtatgggtgttcgtaccctgttttcgctgtggaactagggtaataagctgataattagttaacttattcggattgtatccggatcacttccgtgtaaaacgctattagaacgctattaaaaccctattaaaacactatacttaaaatagcgttttaaaagcattttaaaagtactttttgaattctttatccggatttgattaggaagtgattatgaagtaatcagcaaatgatgacttaaatcagcttgacatcctgatttcttgggttaaaagaaacttgtgagatgagatatattattggaaatttttgcggggtacgaatttgtaatcttccgtgtagcaggtgaatatccctaatgctccctgtatatttccgatgagcgggaccggcgaggtgatgctgccttggttggcgctgttggcctcgtagagggagatttggtagttgtagcaattttcggtgatacgtaaaaggagaatgacaacggcttccgcctcttcgatttcttggcatttgatggttcgttcgatcgtggcacctcctgtatggtgggacaggtcaagatagctggtctcttttttcaacaggttatcatccccggctccttcttttcttgcctgcacgctgtatatgtagtaattctgcatgggattgggtgaggtttggaaactgatcgtgacggagtttgtcgctttggaaacgaaataggaagagatcgttatatggtccggtatagcggttttggccgtgatgtgttctttctcgggcgtgtatatgctcaagtaaagcgagtcgagcccgaattgattgaacttggtatcgtgcctgaaatttccgaggaacgagggactgaacgtggggataagtttgatgatagagtcggcttttatggagacatccaggttgatcgggtcattcaggtcaatgatctcgtggatcggggagacttttgccgcattcagcgtgtagaattcacccggtttgcagtaacattcgatgaaataaccggaaatctcacccatgtctttcatgggaagttcctcttccggcatacaggagaggagcgtgaggaacaggagggtaaagattccatttttcatatgattaccagtttattcgaagtgaaacatatgggatgaagggtaacatgactttagatttcgggataatcttggtcaagttgtccgtgctttctgcttgaaagtaaacgaacgagggattcgattggttgtatacattgtatgcgccgacgctgagtttgaataaaaggttcttgccgccgaatttatagtcaaggctggcatccagccggtggttgttgggtaatttgtagttatagcgatccgtgtacacggggataagaatgggtctgtcatcgttgaattccgtgatgttccgtgcgatgaccattcctttgggaaaggtcgtgtagaccccggacgagaaagtccaaagggtgttcaacaggaggcggggggaaatctggtaggaaaagttgatcacgacattgtgttttacgtcgtacggggggttaaaggctttcccgttgttgatctctgcgaatttgcgcttggattcggagagcgtgtagttggctcgcatgtagagagcgtgatggttgagcgtgaggtcgaattccagacctttggcgtggccctttccttgaatctggcgattactcaaggcagagtattcggtttgaatgtccgaggcgaagtctttcacgttacgcatatccttgtaaaaaatacccgcataaaaagatagtaattgcccgatctcttggtttatcccgatggagtactggtggcaagtggcgggttgggttccttttgccagagggtaccagatgtcgatcggggttttaaccgtgaaatagggatagaggcttaaatattgaaccgtcttggcgtaatctgcccagatggagaatttgttgaccgtgtagctgattttcgcccggggtgagaaggtgtgttcacgggtttctcccgagtagaattgataattccctcccacgtttatggagaagtagtgattcaaatggtaggcaatatctaggtataattcatatagattgaagtctttgtccgaactttttatcaggagattttggctttcgtcgcttttattggctgtttcaaaccgggagtattcgaatttcaccccactgttcaggcttaatttgtccgaaaattgacgggaataggttgcttgcccgagaagggcgtagttacggtttccgcctcccatgggtacgctgccgaaggcatcgccctcgctgtacgtgtttttcccgccaaattggaaatcccattgctctttggcatcgggcgtgtaggaggcattcacgttaccggaaaaggtgtgccaatcgaaaatgtattgcacgtgttcgctgattttcattttcatgtgatcaagagagaatagcccgaaggcggtcattctccatttgtcggaaagacgtgaatcaatggttgcggtaatatcactgaacgagtactccggcatgtagttaggatttgtcttgtcatccatggatcggttgtataaccgggaaatgtgttgtaagtaagaggtccgggcagaggcggcaaaggacgtgtgatttttgatgattgggcctttggctttcagagcggaagagacaagtccgatggtcagctctccttcgtgttcatgcttgtttcccggctcaggacgcatattaatgtaggaggataaaaaactgttgtaccgggcgggaaagccgcttttaaagagggtggaattgttcagtatgtacgggtcgaacgtggacagtattcccgtgaggtggtccgggtaggcgatgggcatgttgttgatgagaaaaccgttctcgttgctgtttccgccacggacgtagatgccggaattgagcgcattcgtggtcacgatgccgggtatggtggccaggtattttagcacgtcctgttcgccgaggatggccgggatccgttcgattcctttgatggaggagaggattcgcccgctggccggaagggccgtgacgacgacttctttcaggttgttctgtttgttgcgcagggtgatgacgaacggtgcgtcacttttgttgagcttgtaagtttcttttttatagttgatgtgtgaaaattccaatgtacagggaataggacattccaaccggaagagacccagggagtcggtggtagtgcctttttcgctctcgatgcagtagatgtgtaccctgttaaccggtttgccggagtgggcaataactttccccacgatgaccgtttgggcgtcaagtgatatggagatgaataaaagtaagattgcaaccaatttgcccatatacacgcgttgtgagttcgaaattttacaaatgtagtaaacaaatcccgttaagccttatggttcatgtgaataattgttgttattttgcaggacatctattaaaatttagttatgggaatctacgtgcatgtacctttttgccggagtaaatgtttttattgcgggttttattcggtcgcttcgttgaagttgaaggaggcgtatctgggggctatcgggcgggagattgatttgcgtcggggatatttacagcagcaggaaatgcatactttgtacttcgggggaggtacgccttcttacttggagcgtggggagctggaacgaatcatacggaaattggaggaaaattattcgttcgtccctggtatggagcgaaccatcgagttgaatcccgaagatttggtgccggaaaaattgcaaggaataaaggatttaggctttaatcggttgagtatcggggtacagtctttctcggatgaacaactgaaacgaatcaaccggacacattctgcccgtcaggcgatggatggaatcacgtttgctgctggcatgggatttgataatataagcatggatttgattattggcttaccgggacagacggaagctgagttgttagatgatgtggagagggcaagtggtttgccaatagctcatttatccgtgtacatgttaagcattgattcaaatacagtattcgaacacatggtgaaacggggagagttccggttggaggatgaggaggtgatggccgggcgttatcagcgggtgtgtgagcggttgaaagagttgggttttgaacattatgaaatttccaattttgcccggaacgggagatactcccggcacaatacatcttactggcaacaaaagtcatacatcggtttcggcccttcggctcattcttatgacctgtattccagacaatggaatacggcgaatttaaaaacttatatagatcatttaaatgaaggaacgctttcatttgaaaaagaggaattaaaacctattgatttgtataatgaatacgtgatgacgagtttgcggacgatgtgggggatggaaaagcaaaaattggagggagagtatgccgagttttgggaacaggtgcgggagcaagtccggaaatacgaggattccggggatttgatcgaggaaggagggagatggagaattagcgaggccggatgggtaatttcagatacgattttgagtgatttattcgtggtctagttttttacatgaaaaaatactatttttgcggttgtaagtttaataattaaatgtttttcagatgaaaacgagtagaatgtcagtcaaagaactgttgcagtcagaagattgcggtaaagaggttgaggttaaaggttgggtaagaaccaaacgcggtaataaacaggtgaattttattgccttgaatgacggctctacgatcaataatatacaggtggtggttgatatggagaaggtggccgaggaggtgatgaagaaagttacgaccggggcggctgttcacgtgaaaggagtgctcgtggaaagtacgggtagtgggcaggctcgtgagattcaagcgaaggaggtgatcgtaacgggtgaggctgatccggagaaatacccgatacaaccgaaaaagcacagcttggagttcttgcgcgaggtggctcatttgagattccgcacgaatattttcggggctgttttccgtattcgtcacgcgatggcttttgctattcatcaatattttaacgatcatgggttctattatttacataccccgttgatcacggcttcggattgcgagggagcgggtgagatgtttcgggtgacgacgcttgacccgaagaatccacccttgttggaggacggaagtgttgatttcagacaggactttttcggaaaatcaaccaacttgacggtgagcggtcagctggaaggtgagctaggggccatgtcgctgggtaagatttacacgttcgggcctactttccgggcagagaattcaaatactacgcgccatttgtcggagttctggatgatcgagccagaagttgctttcaatgatttggaagataacatggatttggcggaggactttttgaaatatttgatccgttacgctttggagcattgcatggatgatttgttgttcttgagcaagcgtttgcaggaggaggagaaggacaagaaagccgaggagcgttccatggagttgatcgaaaagttgcaattcgtattgaatcatgattttgaacgggttacttacacggaggctattgatatattgaaaaacagcaagcaaaataagaacggtaagttccagtatccggtgacgggttggggggtggatttacagagtgaacacgagcgttacttggtagagaaacatttcaagaaaccggtgattttgacgggttacccgaaggaaatcaaggctttctatatgaaacagaacccggacggaaagacggttgccgcgatggacgtgcttttcccgcaaatcggagagattattgggggatcgcagcgtgaggaagactataacaagctggtgactcgtatgcaggaggtaggaataccggtttctgcgatgtcttggtatctggatacgagaaggtttggttctgcggagcatagcggattcggacttggatttgaacgtttgttgttgttcgtgaccggaatggggaatatacgtgacgtgatcccgttcccgcggacaccgaaaaatgccgagttttaagaataatttgaaataaatagaaggatgctcaagcaaaatttacaacagaaattggggttgaaaatcaatccgttgcaaatacagctgatcaagctgcttgagcttcctacctatcaacttgaacagaggattaaggaggagttggagtcaaacccgcttttggaagagggggaggagaaaccggaaccggaagttgatattaaggaggacggggatgaggtggattatgatgagaattcgcaggaagaagataattacgagtcttcggaggatgaattttctttagatgattatatcagtgatgaggatgatattccggactataagttgacagcatcgaatgcctcgaaggatgatgatgcacgggagttcgtgctttccggagggatttctttccgggagaatctggtggaacagttgggaacgcagcacttgggagagatggatcgtaagatctgcgagtatatcattggtaatattgatgatgatggttatctgcgtcgggacgtggagaatatcgtggatgatctcgcttttggggcggggatcgaggtggacgatgagaaaattgaatccttgttgcgtgtcgtgcagcgtttcgatccggcaggagtaggggcgagagatttgagggagtgtctgttgctgcaggtgaaacgacgcttggcggagacttctacgccggctttggtaaatgcccggatcatattggagagttatttcgaggaattctcgaagaaacattacgagaagatttctaaacggatgaggatttcagatgaggagttgaaagaggcggtggacgaaattttgaaattgaatcccaagccgggcggacagatttccgattcttcggttccgggagccgagaagattattcctgattttaacttggatattgtagacggggagttgcagttgagcttgaacacgggggatattcccgagttgaggttgaacaaatcatacgtcaatatgttggaggattaccaaaagaactcgaattcccgcgagaagaaagatgtggtgtctttcgtgaaatataagctgagttctgcccgttcgtttattgatgccgtgcaacagcgaaataacacgctgatgctgacgatgacggctatcgtgcagttccagaaaccatttttccaaacgggggacgagagcaagttgaaaccgatgattctccgggatattgccgatattaccggattggatgtttctactatttcgagggtttctaattctaagtatatacagacttggttcggtatctactctttaaaacaattcttttcgggaagtatgccgacgagtagtggagaggaagttagcacgggcgagttgaagaatgtgttgaaggaaatcgtggacggcgaggataaacgcaaaccttacacggatgatgagttggtggaattaatgaataaaaaaggttaccagattgcccgccggacgattgcaaagtatcgtcagttgctggatattccggtggcccgacttcgtagagaagtttaaaagccataattttaaaatatgaaagtacttgcttttgccgtatccatgctgtttcatcctttgttgttgcctttgtacgtgttgtttatcacatttaatacaggaactgtttttacttatattccggcgtacacgcaaaatatgtcttatttgttgaccctgctgggggtgacgttaattccattgctttgcttgccgttgttgaagtggttggggttaattgagggttaccgtctggtgcagaaacaagatcgggtgttcccggtgctggtgacgatcgtgggggcttttatagtgttttatttttcccgtaatttgccttattctaatatcgtgaggcagttttacctgattatggtgatcatgctctccggctttatgatcgtgacgattcgctggaagatcagtatgcacatgacggctatcggggctttgtgtggcttcgtttttattctgggaatgaagtatttgggggatgtgattaacttgttgcctttgttgattctggcttccggtcttgtggcctccgcccgcttgtatctaaaacaacatactcctgcccaagtatatgtcgggtatatttatggtgctgctgccgtggtggctatcatgtattaataaagcatgatccatatatcgctttgtcccagttgggtggcgagtagatccctttgtttcgtggcctcttgtttatccgtgtaatttgcgatactgacacgataacgttgatctttggtaatgatctgtgcctccgggaaacctttggcttttagttgtgtcacgtctttttctgctagattttcccggggatggctggccacgatgatatggtaacttcttgtatttgttttcttgatgttttgttccgttccttgttgctttcctgtttcttgtcgggatggggaaagcttcacgtttgatgcaatagttgtgttattggcatcttgcgatggattttgcttaatggtgtcaagggagacatggttttctggaagagaggccggaaggctccttttcacattagtggtggttagattcttggaattcattttatcccgttgacaaccgatgaatggtaacatcaggacgaatgataggaacaatgcgagtttcatgttatttgtgtttattttatttgatagatccaagtctcttctttaccggggattttatgaatttttcttacggctgtaatagcttctttctcggttttgtatccttcgtaagcgacgaggtaaagatctcggctatagggcatgatgatggcgtttgtataaccttctttgtgtagtttgtcatacatacggtctgcattgtctttgatgcggaaacagccaccaacaaggagatattccggagcttcttttaccacggtggtcgcagttgccgtttttgtttccattacttgagtggtgtcttttataaggacagccttggtttctactttaaccgtttctttttgcgtattggtgtttattaccttctttttgtcttgacatccggagattgcaaccgctaggatgacgagtgtaaatagtagaatcgttttcatgtttgacaacgttttggttaatcatgccaagatacaaacaaatttattgttagtaaagtattttcttctatttttgtggtgaaagtgtcgaattgtaactagaaaaagagttattatgaataaatttatcggagtattattgattttggtgcttgccgcttcgtgtaaaaatgaaacggaacctatcgtgaaaattaccacggagtacggggatataaagattcgtttgtatgataaaacacccaagcatcgggataattttttgaagttggtggaagagaaattttatgatggtttgttgtttcatcgggtgattaatcattttatgatacaggggggagatccaacatcaaagaatgcgggaccggatgtgctgttgggtgagggggatgtggattatcggatcgatgcggagttcgtaccggagtatttccacaagaaaggggtgcttgctgccgcacgggaaggagatgacaccaatccggagcgtaagtctagcggggcgcagttctatatcgttcaaggaaacgtgtattctccggaacagttagagaatacggtaaagagcatcaatgaaaggcgtaagatggcgttgtatgggcggttgaagaatcaatacaagaatgaatttgcccgtttacaggaggctaatgattcggaggctttggatgaattgtcggagaaattgacccgggaatgtgatagtctgttcgtgaatgaagagttagtgttaacagaggcgcaaaaacaggcttatactacagttggcggaacgccccatttggacggacagtacacggtgtatggggaggtgattgaaggattggatgtactggataagattgctgccgtgaaaacaaattctttcgatagaccggtggaggatgttgtgattgagaaggttagaagataaatagttgtttgtaacgggaatttatagattaaattcccgttatcttttttatctcattcagtttgttcaatgcttcaagtggggtcaggctgttgatgtccagcccggctatttcatcccgaatctgtaatagcacgggatcttctagttgaaagaagctaagttgaatgccttccctttcgtttcctattttagcgacattcttttgtatggctccgcttgaattacggtcgttttcgagttgctttaatatctcagatgaacgtttgatgacggattgcggcaagcctgccattttaccgacctgtataccgaacgagtggttggaacctccttttaccagtttgcgaaggaatacgactttgttgtttacctcttttaccgacacgttgaaattcttgattttcgagtaggtgtgttccatttcgttcagttcgtggtaatgggtggcgaaaagggtttttgccctgcttttcgggttttcgtgtaaaaactcgacaatggcccaagcgatggaaataccgtcgtacgtggaggtgcctcgtccaagttcgtcgaataatacaagacttcgatcggaaatgttgttcaggatgttggccgcctcgttcatctcaaccatgaaggtggattctcccaaagagatgttgtcggatgccccgacacgggtgaaaattttgtcgacatacccgatctttgccgacactgcaggaacaaaacatccggcttctgccatgatcacgataagtgcggtttggcgtaaaagcgctgatttacccgccatgttgggtcccgtgataatgatgatttgttgcttgtcgttatcgaggtagagatcattggcgatgtagttttctcccggaggtaactggcgttcaatgactgggtggcgtcctccttttatgtcgattacgaaggattcgttgatctccggtcgatggtaattgttcgtgactgctatgttggcaaacgagattagcgcgtcaatgtgggagatgatgcgggcatccaactgtatcggtttgatataagaggctgccgctgccagcaaggtattgtatatatcgctttccaattcttgaatccggtcttcggctccgagaatcttttcttcatattcttttagttcgggagtaatgtaacgttccgcattgacaagggtttgtttacgaatccaggtgtcgggaaccttgttcacgtgagttttggtcacctcgatgtaatagccgaaaacattattaaagctaatcttcaatgtaggtattcctgtattctctatttcacgttgttgcatctttaatagcaattccttcccgtgagaagagatttcccgtaattcatccagttcggtgttgactccgggggcgatgacattccctttgttgagcatcgagggggcatctttcctgatctcgtgatctattctttggcttaatacttcgcaatcatccaattgttgcgtccatttggcaagaacttcgttttcggtagataaacattgttctttcaatggcttaatggcttgtaacgcaatttttagttgtaccatttctcttggagagatacggccgacggcaatcttggaggctaggcgttccagatctccgatggtacggagaatttgttccagttccaagcgttctgtttcgtgatgcacgaaacattccacgatgtccaagcgttcgtttatgtctgccggtttcttcaagggcatacacagccagcggcgcaaggtacgtgctcccattggggtaatggtacgatcaataatgtcagctagagagcgtccaccctcgtggagggtgtccaagatttcaaggttacgtagcgtgaaacgatccagcaggacacaggtcgactcgtcgatacgggagatcgaggtgatgtgtcccacgagctcatgttttgtcatgtcgaggtagtacaaaacagctcctgcggcggaaataccgcagtccattttatcaatcccgaatccttttaatgatgatacttcgaaatgttttttgagacgatctgctgcggattctgtctcgaagaaccattcttcgatcgggtaagtatagtattttgtcccgaagagttcgttaaatcgggcttccgagcctttagggtaaagtacttctttgggttggaaactgtttaatattttgtccatggtagcgggtgttccctctgttgccaggaattctcccgtggaaaggtccaacagggacaacccggctttggttttcgtgaaatacacggcagccagaaagacgttgtttttgttgtcgatggtgttttcgttataggaaacaccgggggtgacgagttcgataacccctctttttaccagtttcttggtttttttcgggtcttccagttgttcacaaatggctacccgttggccggctcgtaccagtttgggtaggtacgtgtcgatggcatgataagggaaaccggcaagttccacgtctccgggagagccgtgggagcgcttggtaagcgtgatgcctagtattttggatgttagaatggcatcttcgccgaaggtttcgtaaaagtcacccattcgatataataaaatcgcatcggggtatttagcttttgccgaataatattgttgcataagcggtgtctgttcttctgactttgttgccattatgttgtatttattgtctgttattaaattttaattacgtgttttcgcctcccaaaaataaatattttgatcgagatttgctttaaaacttcgcaaacattgtgtaattttgcctaggctaaaaaggggaatgacgaaatttagtgagtgtagaagaataacctgtcgtgtattttttcgtattgaatatggagatgggtaggggatagccgattaataaaataatgtatatggaaaatatattggatgcattggcaatttacgggtattcaaatttagaggatcggatcgaatttgagctggatggggtgatagagaaggaaattgctccggcttattgcaatgaaaattttgaattgtgtgtttcatgtatggattatacttcgctgaaggtgacggatacggagaaatcaatcatgactttcgtttctgaattattgaagaaattgaagaaaaacacgttgccggatgtggcatcagtatgcgtgtttccccggtttacttctcttgtgaaggaaaatctggtcgggacacagattaaaacgacggtcgtgggagcttgtttcccggctgcgcagacgtttttggacgtgaagttggctgaatgtaaggctgctattgcggcgggagcggatgaggtggacgtcgtgatttccgtgggggatgttttggaacgtaattacgagaaggtgtataaggagttggttgctattcgcgaggcttgtgccggggttattttgaaggtgatcttggaaacgggtgagctgaagactatcgagagcgtattcaatgcttcattgattggggcttatgcgggtgctgattttattaaaacgtctaccgggaaggttccggtaaatgctacgccggagacggtttacgtgatttgtgaggccttgcgtcagttccatgcacagaccgggaagatggtcggaattaaggtggccggtggtattaccaagattcagaacgcaattcgttatttgacgatcgtgaaacatattttaggcgagcaatggcttacacctgcttatttcagaatcgggacatcccaattactggaagatgttctgaaagagatgaaaacggtgaaaattaatggctgaaagtgaaaactttcagctaattatttgctaagtgagagtgatcttttaagatggtttccacaaattccagtggaatcatggatgtctcaattcctgttacttctttaatctttttcgtgaggggggctagtaaggcgtaagtgttgtttttgtatacttcccgcagtacatccttgatgatcttgatgtctttatcggataaaagagcggcttgctgaaagacgacctgatattcttccggggtctcgaattcactgatttgttttaacgtgactgctttttcgagttttattacagtggttcctgccgccatgtctccgagtctttgcattcgtttagaggcgatgatcgagatgacggcgacggcaccgcttgagatggaaatgtctattaagcggaagacccaacggagcatacagtcccaaaaggtgagttttttgccgtttagtttcacgacttggatacgcatggtgtatttgccaaggctacggccgttaaagactgcctcgcagaatagatggtaggaagcgatgatcaccgcaagaatgacgaaaaaccaagtcggggagtctgccatgctgaaaaggccgataaacatgagacccaacatgagtagtccaaactgaaaggcactatcaatcaaggttgctaggatgcggtctagaacgcccgcgggaatataatcaatgtcaacgttgtgagctgtactgatagaaatgttcatgataagtataaatattttcacaaacatacattttttttgaataaatgcattatttttatcacaggaaaaaagtgtggtatttagaatgaaagaggctagatttgtaagtcagaataaggaaaaatggggaaaaatggaaaatgtaaaccatctggatacagatactcttgcctctaattacgtgattctttctgatgatctctcttatgccaaaacgttttacccgggcagtgacgtggtgaagtatttgaatcaactgatttctgtttaccagatcaatatttacgggcaggagcgatcggaaaaaaagggaattctttccttttgggtgcgggagtttccgttgttactctatcgagagaggcggacgttgttgtttgcttttcttttttttctgtttgctgctttgatcgggattttctccacggcaaaagatgatactttcgtacgtttgattctgggtgatgcttacgtggacaagaccttggaaaacattgaaaacggaacgcctatggggatttattcgtcctcgaacgaggtggatatgttttttatgattactgcgaataatattaaggtggctttcgtggcgtttgttttcggaatctttttttctgcgggaactttatggattcttttctcgaacggggttatgttgggggctttccaatacttctttttccagcacgggcttttattacattcggtaatgtccgtgtgggcgcatgggacttttgagataacatctattattatagccgggggagcggggctggtgatgggaaatagttttttgttcccggggacgtacaagcgctcgtactcgtttcggaatggggccttgcgaggcataaagattgttaccgggctaattccgttttttattatcgctgggtggattgaaagtttcatcacgcgttatgccgatacttacccggtggtaggggctgtagcaatcatcctttcgctgggaggtgttatcgggtattttgttgtttatccttattatttacataaaacagagaccaatggaaaagattaatttgagtgtgcagcgttctttttcggatttgattaccgtgacgattaatttcatgaaacaagagtttgttccttttatccgggcttttgccgtgatcgggtttcccatgattttgctgatgctttttttcatgaaggatctgttgatgggggtttttgatatgtctttgcacccggaggcttattacgacgtgaataattttggagacacgatgttacgaaccctgttcacgtcgctgtttggggtgctgatgatgctgtgggtacagttgtttgctatatcttatttgcgggtttactgggatcattatcaggcggggattgaggaacggatcacgattattgaggtttttagagttatgttgaggaaattcggggtatatcttgtgtggtctgttttctgtggtttggttgtttttatcggtttcttgttcttgtttattcccggaatatatattggaatttcgtttactttcggatcatatttgttgatattaagagataacggactcggaaagattatcacggaatcaatggctatggtaaaggggaattggtggaagactttcgggtttattcttgtgatgtacttgttggttggtgttgtggcttatctgtttggcattccctatatgttcgtgatgatgtcgtcggctttcacgggggcgattcctaatatttacgagattactttctcgttgctactttcttatctgggacaatatacgttatacacggttttgtttgtcggggtcgggatgcttttcttttcccgttcggaagagatggaacacacgactttattaagccagattgaccagttgggggttcaacccgagaaaaaggcggatgaagaggctaattaaatatattattctattcgtgtttgtttgtgtcgggaacgtgacatgggcggaagaaggggagcgggagtcttcgctctctccggattcttcttacgttttgcgagctccgaaagctgatttcttggagaaatataggaaagatgcggcttttgattacacgacgaatattgaagattcgcctagtatttgggactggataaaacgttggattctggagcgtttgttccggatcaaggtttcggaggggtcaatgcagacaatggatattattttaaaaattgtgttgggtctttttgccttgggtatcgtttacctgctcgtgaggaatagggataagtttcttttctgcaggcggaagaccgattttttcccggaggattccgtggagtacaccggggaacaggaagcggattctttcgtgcgattactggcgaaagcggagcaggagaatgattatgtgctggcaatacgggtgaattattcagccctattgcaaatgctggataaagaagaggtgattcgttgggatgtttccaaaacgaatcagcattatatttacgagataaagaatgaagcgtggagccgtgattttgaggagataagtcgtatatttgattgcgtttgttatggcgagtttcccgtggatgaaaccgcttatcagaatatcaaacgatatttcacggaatttaggaaggaggtggaaggatgaaacggcgccaaaatgtattgattattcttttcgtgattgccgttatggctgtttatacgggatatgaggccaataagcctcaaccgatagattggagtcctaatttttctatcagcaagaagagtccttacgggacatatattattaaagatgctttaccgtatttgtttccggaagggaaggtgtcttttgcccggatgtctgtacgggaacaattgcgtgtggatagaacgcctttcttgaagacctattttttcgtgagtcccttttttaaaattgttccgggagatctggaggccgtgttggaagaggtggaagacggaggtgcgcttttggtatcggcagaatttattcccgatacattgtattcttacgtgggtgtttcaggaatgaaaaggattcagaacgggagggattatttgcggggttttgaggataaaggttatccttttagggcaactcatcgttattttgaattgaaggaatcttttgacggggagattttaggatatgtcgacacgatcaagaaccccaattttatccggataaattacggggagggggttatttacctgcattcgaacccgatggcattcacgaattttttcttgttggattcggtgcatggggattattaccagagagccctttcttttcttcctcctgccacgaacgtggtgtgggatgaatacttgaaatccggagccgaggggcaacaaactcttttccgggtgatatttaggtatcccgcattgaagtgggcgtatattttgttgatattgggggcgatactatacgttttgttccggacgaaacgggaacagcgtccgataccggagattcgtcctttggaaaaccggacattggaattcgtatcggttgtgagttctctgtattacaagcagcgggatcatgttgctatcgcaaataaacggatcaatagttttctggaagaggtacgttattattataaattgcgtacggaagaactggatacttcttttatagatttgttgtcggaacgatcgggagttgcacgggttagcgtggaaggtttgatttttctgattattcggattcggaaggcggagcatgtggatgaggaccagttgcgagagctggtgagatatatagaactgtttaaaactaaaagataggtagattatggaagatcagataaattttgagtccagaatagatttcacggatttaaacgggaagatcacccagatacgggaacggatgggtaaggtgattgtcggacaacgggaagtggccgatctgttattgacggcaatgctggctgacgggcatattttaatcgagggagttccgggaattgccaagacgttgatggcaaaggttatggcccggatgttggatgttacttttaaccggattcagtttacgccggacttgatgccgagtgatattctgggaacctctgtttttcttccggcagcagggcgttttgaataccggaaagggcctattttctcgaatatcgtgttggtggacgagatcaaccgggctccggcaaagacacaagcggctttatttgaagtgatggaggaaaggcaaattacgaatgacggggtggaataccgaatggattatcctttcgtggtggtggggacgcagaacccgatagaacatgaaggtacttatcgtttgcctgaggctcagttggatcgtttcctgtttaagattaacgtgacttatccttccgtggcggaagagataaaggtgcttgagttgcatgatcacggggctattgcccactggaaggaactggaacccgtgttgagcgtggaggcgttgaagaagttgaggacacaggttgctcaagtgcgtgtagatccgaaaataaaatcttttattgtgaatatcgttgatgctactcgtaaaagcggttggctttacctgggagcgtctccccgtgcgtcgatcgctttaatgaacggtgccaaggcatttgcggctattcaaggacgggattttgttgtcccggatgatgttttgtatttggtaaatccggtattgcggcaccgggtgcagctttcttccgaaaaggagttggaaggcgtgaccgttgatcaggtgataatgcagatagtgtctaaaatagaagttccaaggtagtgcgagtacttaaagatacatatttatctcgccgttttttcctgatattgatgttgggaatatacgctttcgtgatggcttacgttttcccgttactttttatctgggttgcgggggctttgctggctgtcctgttattgttattcttggagttatttgagttgtacaagcgtgtggatgggattgatgccttccgggtggtgacagataaactgtctaacggggaagaaaacccggtttgcctagtactaagaaatcgttatccggtgagtacttgtcttcgcgtgattgacgagattccggtaaaattccaaaaccggaatgtcttgtttcggttgaaggtgaatgccggagagcagcgagagattcattacacgttatgtcctataaaacgaggttcttataatttcgggaagattcgggtattcgtgtccgtgcgtttcggtttagtcgaaaggcgttattcttttcgtgcagatcaggatgtagctgtttatccctcgtttatgatgatgcaccgttacgagttgatggcttacgggaattaccatccggagaatggaggcatccgtacccgggctctcgggggaaacatggccttcgaacagatcaagccttacgtgacgggggatgatccccgtacggtaaactggaaagccacggcgaaatataatcatttgatggtgaatacctacacggaagagcggtctcaacagatttattgtctggtggataagggacgcacgatgcaatcgccttttaataatatgacgatgctggatcacgctataaatacaatcttgactttgtcgaatattatattgaaaaaaggagatcgggccgggttgatcacattctcgaataattctcgaaattgcgtgaaggccgataaccgggtgggtcagttaaatcggataagtgaggctttgtatcgtttggaagcgcattatcaagagactgattttgagaaactatacgtgtcggtgaatcgacaaatcccgactcggagtctgctgattttgtttactaattttgataccgtatcgggattacgacgtcatttgcctgcattacagcgtttggctgcacgacatctcgtgttggtcattttatttgagaactcggaattaaacaaggctttggagtgtccggttcgcaatctaaaggatgcgtacttcgaaacgatagcagcgggatttgccacggagaaacggcaaatggtccgggaactggggcagcttggtatccgggttatcctttccaagccggaatctctgacggtgaatagtatcaatagttatttgaacttgaaagagcgaaagttaatttaaaactgccgctttttcaatatattttctaatcctttttattttcctcttcactaaggatcttgggattctggaaggtcttgtttgtcgtgtgtttgtccagcgtgagtaacaacgatgggagtaaaatcaagttcgagagcatggctgctagcaacgtgattgatacaagtattcctaatgcaaccgtaccaccgaaatcggaaagggcaaagatgccgaatccgaagaataagatgatagcattgtaaatcatactttgtcctgtttcttgtagggccagtacggcggaagatcgtatactccagtttgttccttgtagttcttgacggtatttagcaagataatggatcgttccatcgacggaaataccgaaggcaatgctgaataccaggatcgtggatgctttgatcgggataccgaaatatcccatgatggcagccgtgatgatctgtggtatgatattgggaatcagggcaaccagaaccatacgcttgcttttaaacatccaagccataaagaaagcgatgaggacaatcgctaatgcgagtgaggtaaagagattaaatacaagatattgagttcctttaaagaaaataatacttgaaccggtaacttttaccgtgtagcggtcattcgggaagtattgttcaacgatattgtatagcttgtcttccttttcttgcatcttcttggttccgatgtcttttaccctgaaactgagacggacccgttggagggtggagtcaacgaaagaatttgcctgtccgccaatctctcccgtggattgggaggcgtatttcaagataaagttcttggtcatgtttgtcgggagcttgtaataagaaggtttcccgttatagaatgcttgattggcaaatttgatcacttcaatgatagaaatcggtttagaaatatcttcgtcttttgacagttcttcagagagtttgtctaacttttgaaggttgggtaagtttaatacttgcttgggttttccaaaatcaacagttacttctaggggcattaacccgtcaaagttttcctcaaagaaactcaggtcttgtcgaatcgggtctgtttctttcaagtcgtctaccatgtaacccgtggatttcatgagggtaagtccgataattccaaggatgacaacggaaatggcaactccgtacacgacattccgacgatttaagataagttgaatgacacgttccagtgttccggttactgttttattgtgcaagtgtttgatttgtttgctatccggctccggcatgaagctaaatccacaaggaatcatgaccaaacacacaaggtacacgaatgtgataccgatggaagcggttataccgaattccacgaggatttgactagaggtcacgatgaaagttgcaaaaccggcagccgtggtcaaattgcttaggaatgaggcattcccgatcttttgaatcatacgttgcaaagccttgattttattcccgtgacggtcgtattccgcatgaaacttgttgatcatgaataccaagttcggaatacatattacgatcaacagaggcggtagcatggcggtaagtaaagtgatcttgatacctagcatggccataacaccaaccgtccaactgacacaaatcaacacgatcaataaacagaagccgataatgcggaaggaacggaaaaacaggtagaggatgaatgttgtgatcaataacgacaggatgatgaacatgtacatctctcctttgatgttttccgcgttgaccacccggatgtagggaaggcccgaatagtgcatctggaggtcatgtttttccgaaaaatgttcggtaatctctaaaatatcttttactaatcctacccgtgcaggagagttcataacttcagcggagacggaaaccatcattccatagatgtctttctttttgttgaacagcgttccgtcgtagaatggaagattttcaatgatgttcactaagctatccagttctcgttgatctttgatatggttgggaaagatgggttggatgtcaaattttttattcagcgtgtccttgtgaagattgaatgaatgggtaatatccacgagagccacgatgccatgaagggttttcaggctatcgcacatactgatccagtcattcattttgtcgagctggtaaaagtctttgtcctgtatggcaaagaccatcacgtttccttcctgtccgaatttctcgtgaaaatcaaggtagtctagatatgcgctatccgtggctggtaacaggttcgaatattcatatgacatttccactttagggatttgaaatcccatgaaaacggtgataagcaagaccccgacaataaaggccactcggttacgaagaagaatccctgcaatcttaatccacatgatatttttttatttgcgcatttgttggcaaaagtaggataaaagtgtttaatcttttaagagtttcggattttttttgtgacgattagcatctcttgccgttttttttgcaaaattattgtttacggcctcgttcaaatctactcccgtttgatttgccaagcataccaatacccaaagaacatcactcaactcttctgccaaattatccttctctccttccttgtacgattgttctccatattttcgagctattacccttgcgagttctccgacctcttcaaccagaatggtcatgtttgtcaattcgttaaaatatcttaccccgtgggtcttgatccatgcatctactgcggtttgtaattctgcgatatccattgttaccaagttaaaagttaaaaactaaaagataaaagttcattattgtctttttccatccttgtaaaattattctcgtcaatatatcctgtgtcttttaaaagattaagtcagtaattcgtttcatttgcctctttaaggctaatgtaaaacttgttaatgtaatcagcttgactttgtgcaaattcagcttcacggattaaagctcccgtggaggttccgctttttagaatttgattgctgataacaaattctttctgttctttttggagaaattgagcaagtttcacgatgcttatggcaaaaatataacttttatctcgtaaaattgaatccatgtaacttttatcttttaacttttagttgttagtttcacaatcattgtcgattcttagaatcgatgatgattgtgacggggccatcattgattaattcgactttcatgtcagctccgaattgtccggtttgaacttctttgtgaagctcctggcttagggttgttacaaatttttcatataacgggacagagatagcgggaggagctgcatcaatatacgaggggcggttgccttttttggttcgagccatgagggtaaattggctgaccgtgagaatttcgccatttgtgtctaaaacggatttgttcataactccattctcgtcatcgaagatacggagatttacaattttggaggtaagccaattaatgtcgtcatccgtgtcatcagattggatacccactaatataagcattcctttgcctatcgaagaaaacaactgttgctcgatggtaacactggcacgtgtcactcgttgaataactactttcattttgaacttagtcttaaaatttagagtgaaatatatgaattttattcatatactccactctaatattttaaatttacattctagattatttttttctagcgtatagttctttgattgcgtcggctaatctcttaacaccttcgatgttcatttcctcgctcatgtaagagaagttgattcgcatagtgtttttacctccaccgttaacaaagaacacggttccaagtacgaatgccacgttcttctcaatagcgatctggaataattcttcagcatcgtatccttccggcaaggttaagaataggaacaaaccaccttccgggcgagtccaggtgacaccttccggcatgtatttctcgaaagcacctaacatggcttccaatttaccgcgatacatatcaacaattttctttacgttggcatcgaagtagttcttctggaagaatttaaccgtgattttctgtaagaaagcagaggtacaaagatctgtgctttgttttgcttttacgaagttgtcgataaccatcggatgagcgagaacccaacccatacggaatcccggcatgaatatcttggagaaagttcctaacgtgatcacgttaccctctccattatccaaatcgtacaacatacgttgcggttttccggaaaaacgtagttcacggtaaggactatcctcaataatcatgatctcgtgttttttggcaatattcagaatttcgattcttctagcttctggcatggtcatacctgcaggattctggaagtccggaatcaagtagatgaatttcggtttttcacctttagccttcatttcggccaaagttttttccagttccacggcactcataccttgttcgtcctgaggaataccaacgcctacaccaccgtaagaattgaatgctccaagggctccaagataagaaggtaattcgcaaatatatttgtctccacggttcaagaaaatcttaccaacagtatccaaaccttgttgagaagaagtgatgatcgtgatattttcttttgtaacatagctcaagccttgatcccggtaacgttgagcaaggatttccaataattcaggaactccttcggttgaaccgtactggcaagcggcagcaccatccgtggcaattacttccgcgcaaatttcttgtaattgttctaatgggaaagattctttagcgggaagccccccggcgaaagaaataatttccggcttttgagttaatttcaacaactctctgatagcagagcgcttcatccctttggcgctgtctgatagaatttctttgtagtcgctaaccatgtttattcttatttaaagtgaatatacgctgttaagtatttgtgttgcgaagttaataataagtttttgaaataaaatttttcatatcagttttttattaaaatcgattgcggtactttcattttgtatgttttcgagcttttttagtaataatttgaatttcgagagctttgtagttgtattttg

SEQ ID NO: 10899 - DNA, 429 bp, Unknown
  gut microbiota DNA sequence
gagctgaatagaggcccttgtagttcaacggatagaacggaagtttcctaaactttaaatggcagttcgattctgcccgggggtactgaaaagataaaaaagttaaaagctaaaagttaaggtgatccggttacttttagctttttttgcttgaaaaagggaaatgggcgtggcctcttgtgataatatacgggggatagccgttgaagtcccggtgaagataggggacattttcgcttctttttcggaacaacttcggtactctttcgctcgccgggtgtaggtgaagcgagtgtgtttccaatgtatgctgggcgagaatatttatttgtatactatatcaaggggtctatttgcttattcgttatcacatttgggtagctggtaaccgatccgttttcgttcaccgatctctcgattttttacttg

SEQ ID NO: 10900 - DNA, 49017 bp, Unknown
  gut microbiota DNA sequence
gttgcattcgggtatcctcgtttatatcgttttggtcggtaaatatttaggatgttgtcctcttcctctgtttaaggtgctaaaattgcaccttaaaaaatgccattcttcttttgtcagctcaaacgtaaagtccggaggaaatcgtttcaaattattcttcacggaacgtttcaaatattttgtttctgtaccatatagttcggctaggtcaaaatcaagcatgatcctttgttctcgaatctcgtaaatcttatcttgaatgatttgcaagtccatcacggttatattattttagtaggacaaatgtagtaaaatagatatgaatcatcactatatagctgtaaagttaaagaatatgcaaatcaaaagtacgtgtttcatgaatttctattaatttagcaggcggataaacaggattgaatatgctgaaaagcttgaggtatggaaaagagttcgaagaactgtacacggggaactattcccgtttatactactatgcttatcagtttttgaatgatgcggaggtcagtcgggatgtggtgaatgatgcgttcgagtacgtgtggaaaaactacgaaaactttcggaagatgaatgtggtggcgattctttttcaaagtgtacggaataaaagcatagacaccttccggcataataaagtggaagagaattacgtggcattgtattcccggatgttttcggaagaggatgcgggactggatgaggaaaacgagaagattgaacggatatataaagtattagatagtttaaccccgcagacgaggcatatcatggaagaatgttattttaatcggaaaaaatacgcagaggttgcggagatgctaaacatcagtcctagtgcggtaaaaaagcacgttatgaaagccttgcgtttattgcgggaagaatttcatataaataatggctcggagggggtgcccgaaaataaggtctaaacgtattaatataaattaggtcgttaataaacatgaatgatcaggatatgaaaaataaaaaggatttgctggatgctttggatgatcccggctcgttgagtcaggaggagcttgatgcaattctggatgatccgaaagaactggaagatgctcgcttgctaggggattacaggcaagcgtttgcacgtcgtcatgcgtccttgaagcctgatgtgaataaagaatggaataacttccggcaaagtagaatttccggtaaaaataaaggaaaacaattgtggatcggcatctcgataggtgtggcggcctctgtgcttttatttttcagttggcagatgttcaatcggacctccttggttccggttaaccaacctatcgtggcttttaccgccagtactcaatctcaagaagttcttttgtccacgggtgacgggcgtatggtgtctttatccgcacctcaagcagatagtttgctacgagaaacaggtattaccaggggagacgaggagttggattaccagcaaacgatccgggaaacagagatacatacattgacaactcccaggtgtggggcttatcaacttcgtttggcagatggaactcaagtatggttaaatgccgagagtcgtttgaaatatcccagtcgcttcaccggagaacagcgagtggttgagttagagggggaaggttatttcaaagtaacgcccgattcaaaaagaccttttattgtaaaatccggtaatatcactacggaagtcttggggaccgagttcaatgtcagaacctacgtgtccaatgattcacacgtaaccttgttaaaagggagtgtgaaagtgaaaaatgttagttcgtcctcggaagtggtaatatgtcccggggaggatgcccatttacaaggagacgggacttttgacgtgcgagaagtcgacacggacaattactatttatggacggaagggtatttttattttgataatgaaaccgtggtcgagatcatgcgtgaattagggcggtggtataatatacgggtagaattcgagaacccgcaagcgatgaattaccgcttgcatttccttgccgaacgcgatcagaaaatagaagaagtactacaattattgaacatgcttggtaaagtacaagcgacttacgaaaacaataaaatttcggtaaaataaaaaatttttatcgtttctggtacccgatttacatctcaaaacgaaatctgaataaagaatacgtatttgagtcatgtaaaattaaattaaatgaacaaatttatgaaacaccagaaactccaattcaagccgggcagttttcgactgaacgggttattccgggttgtcttcttgatatgttgcttgttgtcggcagggctgacacaggcgcaagaaaagaaaatcacggcggaattcaaggatacacctttatccaacgtgttaaaacaactggaaaaactttctacctacaagatcctctttacatacgacgacgtgcagtcctataaagtgaccgtttcgttaaaggatgcgactatcaccgaggctttgcaaaaagtacttgatggtaaaccttttgttttctcggatgtggcgaatgggaaatatatatcggtcgtctaccaacccaagaaaaagtctgataccacgaaagagatcaagggaaaagtcgtggatagtaaaggagaaactgttatcggggcaacggttcgggttgtgaatgctacaatcggaacagccacggatattgacgggaattttaccttgcgtgttccggaaaacgtgatgacacttgaaatcggggttgtcgggatgaagacacaactagtttccatcaaagacaaaaccgaagtgcgtgttgtaatggaagaagataataccgtgctggaagacgtggtggttaccggtattttcaagaaggcgaaggagagttacacgggggcggtatccagtattaatgccgagcaattgaagatgtacaaggggcaaaacgtgttgcagacgttgaaaaatattgatgcttcgttgaatttcacggtgaataatgcggtgggaagtaatccgaatgccgttccgcagattaatatccggggaaattcttctttgccgataagcgtgcaggagtataacgagagtgcttcgaatgctgttaatactcccttgattatccgggatggtttcgagatttctcttgaacagttgatggattataatgatgacgagatcgagtcgattaatatattgaaggatgcggcagccacggcgatttacggttcacgcggttcgaatggtgtgatcgtggtgatcacgaaacaaccggaggccgggaagttgcgggtgaacgtggaggtcggtatggatttggagattccggatttgagttcttacgatttgttgaatgccgcgcagaagttggaattggagagaagtttggggttgtatgataacactgtggccccgagtaatgacgtgtggtataaagaggcttattataagagattgcgggatgtgctttcaggcacggatacggattggttgagtaaaccgttgcacacgggtgtcgggacgcattataatttgcggatggaaggtggtagcgaacagttccgctggggtgtttcagcggcttacaaggatattcagggtgcgatgaaggaatcctcccggcgtaattttaacgggtcggttactttgatgtaccagatgaagaagcttattttcaggaattatagttcttacacgacgaacgaggggaaggagagtaagtatggtaattttagtgattacgtgaagcaacaaccttataatgcagcttatgatcaaaatggtaaattggtgcgttattttgatggatttcacaaagctactggtaaatcgcaaaatccgttgtatgacgctacattgaatatttttgataaaagtggttatcaagcattgacgaataatttctcggtggaatggaagccgacggaagagttgacattgagaggacaagtggggatttccgggaaaaatacgacgaatgatgcatttttacccgcggaacattccacttttaccgaggacgagtattattcaacggatgaagggttcttgcgtagaggaacttacacgtatagcccgggacggactagcagttatgacggaaatctgacattggcttataataaggtgtttcatgataaacatcaagtgtatgtcgggttggattactctttatccgagtcgcgaagttatagttatagaatcgttgcagagggttttacaaatgaagatataaattttctggggagcgctcgtcaatatgcgaaagacgaggggcctggtggaagcaagatgaagactcggcggatgggtttgacgggaaatgcgaactatatttttgataatcgttattatgtggatttgtcttaccgtatggacggtagctcgactttcggtagtaaaaagaaatacgcccagttttggagttccggtatcggttggaatattcataacgaaaagtttttttcgaatgacgtggtgaataccttacgtttgaaggcttcttacggggaaaccggaacgcagcaaggttcttccagcggggcttctacgatttacaagtatattacggataaccgttacatgcattggaccggggctgttttgcaaggttggggaaatccttacctgacttggcagaaaacgaatgaatttaatatcggtacggagatcgggttgttgcaaggtcgcgtgaagggagaatttaatttttacacgaagcgaaccggtaatttgttatccaatatggatttacctcattcgatgggattctcttcttacgtgtctaacgtgggagaggtgaaaaacaggggatgggaagcttcggcaaccggttatttgattcgtgatacggaacgagagattaattggatgattggtgggcagttggtgtataataaaaattatatttctaaactttcggaggcggtgaaagcccagaatgaggcttatttgaaagaggacgtggatgttgctaatttgttttacgagggacgcccgcagaatgctatttatgccgtgcgttctttcgggattgacccgagtacgggtaaggaggttttcttggataagaatggcaaggagacggatatttggaatgcttctgataaagtttatttgggttcgaaggatccgaagtaccgggggaattttaacacgatgtttatgtggaagggatttactcttaatatgtcattcggtttttattggggcggtaaggtttacaaccagactttgattgaccgggttgaggttactagaaccacgttgatgagccagaacgtggatgcacgtgtatacaaggatcgttggcagaaacccggtgacgtggtttctttcaagaagttcgacaacacggcaacccgggctacttctcgtttcgtgatggatgataatgttttcgagcttcagtctgttgcccttcaatataaatgggacgagggttggttgcataagcataccccgataagttcggttatttttagtgtgaatatgtcagaccttttccatttttcaaccgtgaagatggaacggggaacgagttacccgtatgcccggaatattctgggtagtgtgaaattcttattttgatgaacgattaaaaagttacggatatgagaaaattatatttagtgttcgggatggcgttgatcttttgtttgtctggttgtaatgattggctggatgtgcgtcaggagacggagcagaaggaggaggaacagtttgccacgtacaagggattttgcgatgcgttgacgggatgttacatgacgttaggagataaggctgtttacggggagaagttgacaatgagtaatatcgagtcgttggcaaatctgtggaatccgttcacaacggatccgggaacggagcgttctgccgattattatctgtcattgcatgattacgagagtgatgccgccagggaggccatgcagtctgtttggtcgaagttgtttaatgtgatcgtgcaggctaatgtgattattaagcatgtagaggagaataaggatgtatttgatagtgaggccgctcgttcagtgattttgggagaggcttacgctattcgagcttattgtcagttggatgtgttgcgtttgttcgggcaagttcctcaaaaggcgactatacaggttcgtttgccttactcggagacaacggcttttgatgagaaaccgacgtattatgcttttgaagattatgtttccaagttgaagtatgatttaaatcaggcggagtctttattgaaagataatgatccgatttttgaatatacgttttcacagttgaattttccgacatctaatttattggatgatagttatctgtattatcgtcaagctcgttttaattattgggccgtgaaggcgttacaggcgcggacatatctttatttaggtgaaaaggagttggcttatggtgcggctatggctgttatctcggcaaagggttcggacgggaatccggttatgacgttaagcggtgcttccgatattgtagggcaggggtataaggcttgcccgaacgagtgtttgctctatttgagtaaatatgatatcaagtctgtggccaatatattgatcgggggaaatgatgttcgggctaattcgactcgtctgtacataacggcaacccagttggctgatttgttcaaaggacaggaaactgattctcataatcgttatcgttatgtttggaatcgtaatgtcaaggatgcagctaataagtcttgtgcagcgattttgaaatattattttgcggataatgcgagtaaccagatgttgtattatcaaataatcccgatgttgcggatgtctgaagtgtatttaattgctatcgagacaacgaagaatttagtggaagcgaatcaattgtacgcggattatatgcgggatcgtgatgtcgttttaaatgaaaacgctttcggttcgttagatgacgtgcaggggataatcgtggatgaatatagacgggaattttttgcggaaggacagacattttatatgtacaaacgtttaaatatcaaagatgtactttggtatacaaaggggctgacagaacaggattatgtgttgtggaaatgcgtgagtaccgagtttaatgcttaatattttaaattcaaatgattatgaaatatataaacaatatacttattgccggagcgttgattttcgggttggtggcttgtgagaaggatttgccggaatatgagacgacggtttgtcagttaaattttaagtacaggactacagatattagtaccgaagaggttactgatgatatgcgggtaggttctcattcttttaaattgaattcaggaattggggtaaatatagatacggtttgggtcagagttgccacaatgggatatttgtcaaaagaagatcggccctttgagttcgagcaggttatgacgggagagaaggatgccgtggcgggaaagcattacgtggcgtttaatgatgtggagatgcaaaattggtattctattccggccgggcaggcagaagctttagtcccgattgttgtaaagcgtgacccgtcattggaaacgagtggtgatgtcgtgttgaagtttacatttaaagaaaacggttattttaagttgggatatcctgaattttcggtttacacgattgttatttcggaccagttgacaaaaccgactatgtgggcaacctgtcatctggatagttatttcggggcttatggtgccatgaaacacgagctgatgatagcatggacgaaacaagcgtgggatgatgcttatatcgaatctcttttttatgaatatcaatatagcagtggaaccgtggcatggtttcctaaagatcgtgagtacgtgaattatttggcttcgtggtttgccgagaggttattaaaggagaatgccgaacgattagcagatccgcaaatcggggatgtttatcgggaggagaataatgatgctgtggattttacaccattggattagtaatttaaaatgatgatcatgaaaaaatatataataattctagtctgtagcttgttgggggtcgtatcttgttatgatgacgatagtcatgtggccacgaagttgcttaacgatattgtgatagatggactgaaagatacatcggcgatatcatgtagtacggttttggatctgattccggaagttagcggttattcggaagaagagttatcctatgcctggtatatttacgggggggagtttgaaaagcagacggacaaaggataccggacggttcagattgattccgtgaaaaatttgtcttgggcggtagatgtgaaaaagggagattacacgttggtgttcgaggttactaataaagaaagtggctatgccgttatggaggaggtgaaattaactgtttcgacggctttttcaagagggttttatatattgaaagaaacttctgacgggaatactgatttagatatatataacgagagaaataagcaattaatgacgaatgtcctggacgggacgcaaggggatgcgatgcgaggaaagccgagaaatttgagtgttatttacgagaaagctcatgttgatccggaaacggcagcgagcgggtatacgactacggtgtttgtgggggcaggtgaacgtgatatggcttgttttcgcacggaagatttggtgaaaatatttgatcgttcgactttgttgtatggcgagatgagcgaggaagaagttccttattgtatggcgtcggctggtgctcataacttctttttttcgagtaaagggattcgaggagattatgcgggtatgtttggttccgaatatacgacggggagattgggttatccaaaaggaaacggagcaagttctttcgtgcaggcatgtgatggtagaggcttgatgttttggaacgagcaacaacatcgtttatgttattttgcgggagatgaagttgaagaaatcgagtatatggggggagagattatttgggatgatgtgagggcgattgctacggggtggaatcatttggccggagagaatacaatgtggtatatgtttgaaagtcagaatggccagcgttatttggttttaattaaccctaaatttgaggtggttgaagtacgccgtttatcgtcttctttgcatattgccaacgctgatattattgctgggaacggcttgtcatcttattctatatattcggtacataataatcaattatatcgttatagtttgagtgaggatgcttcggaggttttattatctcttccgggttcaatagaagggcagattacttatttatcggatatttattttggaaagagctttgattatatcgtgataggaactcaagcgggtgataattatgcgttgtatatgtatgagatacagggagggcaaccttatggagaaccggttcatgttgtaaaaggaaatggaaagataaagcaagttcgttatgtttcccagtctataacatgggcgatgatacctaattattatgcatttacggattatgcttcaatgtttgggatgggaccggattttccatattagagcttggggctgaaaggtgtagtgcaaatgatagatgattaacgtattaatgaacgatttttatgaaaaagatatttttgatattactgggcttggccttgttttatccggctttggcacagacgaattttcgtgatgttacttacaaggaggctatcgctgccgctaaagcggagaagaaacaggtgtttatagatttttacacgtcttggtgcgggccgtgcaagatgatgatgaagaatgtatttccattgaaggaggtgggtgattatctgaatgccaggtttgtgtgtgtgaagattgacgcggagaaaggcgaggggccggaactggctaaacggtacaaggtgaaagcgtatccgacttttgtggcgattgatcccgacgaggaagtgttgatgacaaaggagggaggaacttttgacgggggagagtttatcggaagtattgatcggttgattaatccggacaagagtcccgaacgtttgcaacaacgttacgagggtggtgaacggtcggcagatctggtgtctgcttatgcgggaatgaaaatggaacaagtgtatcaaaatcgtcggccggatatgtcgaagaaagatgaagcttttaatatcgtgcaggattatttcaacgggttgaatgaccgggagagattaaaagaggaaaatctgtttatttatgcttctttcacggagagcccgatggatgctatcgcacaatacatgattgcaaaccgggataagtttaccccggcgatcaaagatcggattgaggatcggatcgcaacgttgtataaaatggaaatccaaaagtatattacggcacaagagccttttgatcagcaacagtatgatgcgttgaaaaaaggtgttttggatctggggttaaataaggataattattataccgaagcgtttcgtatgatcgagtgttacggaaaaggggatttgaacgcttttctatcattgttggagaaggagtatggcgagttgaatcgtgaatacaaggcttcgatgatgtataattacgctcagttgtttactaccggagatgaggctgtaaaagctcgtgctgtaaaatttttgcgtagtttactcgtggatatggatgcgggaatgctcatgtttgtcgctcagcagttactgatattggaaggcaaaatacattaaaggtaaattaatgctatcgaaatcgtttctgtatcccgacttcccttgttggaagccgggatctttctatttgaaagatatttcttagtattgatgatgggttgttggctctttttttatactttagccgaactaatttgaaaatgtgacggatatgtatactgtagatgaacttagagcgattataaaagaagagttagataagaaagagtatatacaggaaccgtattccctgttcgagccgattctgtatattttggaagatgggggaaaacgcttgaggcctcttttaacgttaatggcttacaatctttaccgggaagatattgagaaggtgttgaaatccgctatcgggatagaaatattccacaattacacgcttttgcatgatgatgtgatggatgatgcggagttgcggagaggccggccgaccgttcataaaaagtggaatagcaacgtggcaatcttgagtggtgatgcggcagcgatcacggcttaccagtgtatcgagcattgcgaggacaagtatctgcgtcgagcgatagatttttttaaccaggtagcgatggatgtgtgtcggggacagcagtacgatatgttgttcgagacccggaatgatgtttcggaggaagaatatattaagatgatttatctgaagacttcggtgttgcttgccggaagtttgcggcatggagccttgctggcggatgctccggagcatgagtataacgctttgtatgaattcgggggatacttagggctggcattccagttgcaggatgattatttggacgtgtatggcgatgtggcagaattcgggaagaatatcggaggtgatattgtggccaacaaaaagacttatatgctgatcaaggcgttggaactggccgatccggagacgaaagaagagttgtggggatggatagagcggaaagagtttgaccacgaggagaagattaaagcggtgacccggatatacgatcgtttggggattaaagagatcgcttttgcggcgattgataaatatttgaaaatgagccgggatattttagataagattgatgtaccgaaagaaagaaagatcgatttttacgagacgttggatgcgatcgggaatcggaaaaaataaaataaaaggataaatgagtaaatcgaagcaacagttactggatgagcgttatttgagaatggcccggatatgggcggagaattcgtattgcgaacgtcggcaggttggtgcgttgattgtgcggggggatgccattatatccgacgggtataacgggactccttccgggtttgaaaatatctgcgaggacgagaataacaaaacgaaaccttacgtgctgcacgccgaggcgaatgcgatcacgaaggtagcgaagtcgaataacagtagtttgggggcaacgttgtacgtgacagcctctccttgcatagagtgtgccaagttgatcatacaagccggaatccggcgggtggtgtattctgaaaattatcggagtgtcgacgggatcgaattgttgcagaaggccgggattgacgtggcgtttattgagttaagcgagaatcaggaaaataaagattaaataggaaaataatgaataagagtaatttgagggctttgttgactccgatcgtgctggctctggccatcgtgttcgggatgatgttgaaccggttcctaccggatcggactcaagtgtcagcgtcctcggaaatgtttttgcctgtgacggggagtaagctggatttgattatcagtatgatacagaattcgtacgtggataccgtggacacgaggcagatcgtggagaatacaattccggtcttgttgaaggatctggacccacacacggtatatattcccgcgaaggatatgcaacgggcgaacgaggggatcgtgggaaacttcgggggtgtcggaatccagttttacaagtatttggacacggtgaccgtcgtgaaggtggttccggggggaccttcggagaaagccgggataaaggacggagaccggattgttcgggtgaacgattctttggttgccggggtgaaaatgagccaagataagattcaggagctaatgaggggggagctgggaacgaaagtggagttgacgattgctagaagaggggaaccgaagttgatcaagaaagaggtggttcgcggaagtatcccggtgaaaagcgtggacgtggcgtatatgctgaatgacacgacggggtatttgaaaacgaatactttcggtatgcacacgtatgccgagttcatgcaggctttagtgaagttgaaggcagaggggatgagaaaaattattatcgatttgcgggagaatgaaggcggcgtgttgccgattgcgatacagatgattaacgagttcttggatgccgaccgtttgattctttacacgcagggacaggcgcaacctcgtacggattataagtctaacggcaaagggcaattcaaggatttgcgcgtggatgtgttgattagcgagtttagtgcgtcagccagcgaaatttttgccggggcgatacaggataatgatcgcgggttgattatcgggcgtcgttcgtttggtaaaggattggttcaggagcagcggatgttgcccgacggttcagccttgcgtttgacggtagcccgttattataccccttcggggcgttctatccagaaaccttataatgaagggaaagagaaatattacaatgatatttacaatcgtttagttcatggggagttctcccaaaaggacagtatcgtttttgacgagaatctgaaataccagactgtgggcgggcgtaccgtgtatggtggtggcggtatcatgccggatgtctttgtaccggcggacacgaccggggtctcccgttatctgagtgatgtgacgagaacccagttcttgtacgagtacacgtttgatttcatggaccggcatcgtccggaaatggtgaatctgaaggattacaagcagattcagaattacctgaaatcatttgacttggtgaacgagatggcgaattatgcagcccgtcgcggtttgaaacgggacgagaagggaataaagatgtcctatcagattttacgcactcggatcgaggcgtttattgcccgtcacacgatagatgacgagggattctacccgattcttggacagattgataacacgttgcaggaagcgattaaacagtaattgatgaagagtatattacacgggaggctgattttgggcctcctgtttctgtttcttgccttaggtagttttgccgatgggcgctatattccggcgtatgatgacgggatacgggtggattacaagcactattgtttgggattcaacaaggagcatcgacaggcgaactgggtgtactacgagttgggagctacgaacttgacagggaaagcgagccggaagaatgacttccgggtggacccgaagatcagtcgttggagtgccacgcctgacgattacaagcggagcggttatgaccgggggcatttgtgtcctgcggcggatatgtcgtttaatgcgaaggcgatgagcgagacgttctacatgtcgaatatgtctccccaagtgccgatgtttaaccggggaatctggaaagagctggaggaacacgtgcgtaaccgggccaggaaggagaaactttacgtggtgacaggtccgattttcaagagtaataaaggtgcgattggcaagggaaaggtgacggttccggggtattactacaagttgttttactcgccttccaagcaacagatgatcgcttacgtgttgcctaacgaggagagtaagcgtcccttgaatagttttgcagttcctgtggataaggtggagaagatgacggggattgatttcttttctcaattacccgatgatttggagcgggtgttggaggcggatacgctttcgcacgtgtcacgggatgggggacaggtatcgggaggtttatatcgtccaacaagaaatcaacagattatagcggttgtcgctgtggtcgcgatcttcttgctagtacattttttgataaaacaccagggaggtaagaagaaaaaaaagaaaccggcacgcaaaccggtcaagaaaaagaaataagccaaacggcttatttctcttttaaaagttgatcaatgactttcaccatttcctcgaattctttcgggtcgtagagacgggtgaggaaggcaatgttacctttcttatcgatgatgatgttacgggtaacgccggctccttgtgcggcgtaggtgtagaatgctttgccttccggatcaaggagtaggggataggtgattttgatgtccttggcgaacttttcggtggtttctttactttctttgaagtcgatgccgaagagagcgaatgccgggttgttcttgtatttcagccatatgtccttttcgataaagggcatttccttgcggcaaaccccgcaccaactggcggtgaattgtatcatgatgactttccctttcaggtcttttagttgttttttggttccgtcggggaacaataattcaatattcggggctttctcgcctactttcacgatataccctcggtcatcttgccgggcttttgccagcgaacaggtcatgactagtaatagtataaatgtcagatgtttcataggataatgtatttgtgttaataacgtttcaagcttttagggctgccgctccacgagcatccgagacaataaagggtttccgtgtcgaatccttccaaggaatctccctcgtggacggggactacaacgtggtcggttgtgacttgtacgagacaattatttcccttctcgtctttcacgtaaaagcggcgtattccgcatttggggcagagtaagtatctcataacgtaaaattaatttcaaggcataattagtaaatattcttgatagttgtaccgggaaaaggggagaaattgtttgtttttttcttagatttgcgggtatagttatatttggggaatagtcccttcctgtattaactgaattataatgatttttgaatctcaaaatatagaatttaaagagagttggcgagatgaatatctgaaatggatatgtggattcgctaatgctcaaggtggtaggctctatattggaatgtgtgataatggtgaagtttgtggtgtagagcatgctaaaaagttgatggaagatattcccaataaagtgcgcgatacattaggtattctagtggatgtgaatttgaaaaaaaaaggagggagagaatgtcttgagattataacagatgcttacccgtatccgattagctataagggacagtaccatgtgcggagtggtagtacgaaacaggaattgaagggtgttgctttagatcgatttttactccggcgacaagggctaacttgggatagtgtgtcattgtcctctttgaagttagaagatttggataaggctacgatagatctgtttcgtaagtatgctctgaagggaggacggatggaagaggatgatctgcaagatgataatcaatgtttacttgaaaaacttcgtttgtttgagggagaatatttgaagagagctgcggttcttttgtttcatccggatccggagaaatatattacaggagcttttgttaaaataggttattttataaatgatgctgatttaatctaccaagatgaagttcatggtaatttatttcaacaagttaatgtattaatggatttgttgactactaaatatttgaaggcattgattcgttatgaaggtattcaacgtgtggaggagttacctgttcctcgtgatgctttgcgtgaggcgattctgaatgccattgttcataaagattatgtttcagctacgcctattcagattagcgtgtatgatgataagttgatgatatggaattgtggcgtattaccggagaattggtcaatagaaacattgttgagtaaacatggtagccgtccatataatcctgatgttgccaatgtgttttttcgggcaggagaaattgaggcatggggacgtggaatagaacgaattgtatcagtttgtagggaggctgggaataaaggaccggagtttcgctatgatggtactggattgtggactatttttgaatttaaagaaactacccaagaaactacccaagaaactacccaagaaactacccaagaaactacccaagaaacacttcttaaaaggacagaacttcaagatgagataatccgttatttgaaggctcatccccacgcgacacgtaaagagttgaccggtagtataccaaatgcaacagaaaatggtgtaaaatataatttgtctcgtttacaagagattgggattttaagacgggttggaagtactagatatggttattgggaagtaatggtagataaaaagtgaattattagagttagaatatgaaaaagtataagatacattttgccccggtacaggggattaccgattggacataccggaatatacatgctgaatttttcgggggagtggatgcttattacaccccgtttatccgggtggagaaagaggattcatttcgttcgagggatatgaaggattgcgatccggaattgaatagtgtgaagttgttggtaccccaagtattgggaggggagcctgcggaattggatgtttgcttgcaaatgttggaaggacggggatacaagcaggtggatattaacatgggatgtccgttcacgatgatttcccgacggggaaagggggccggattgttgcctcacccggagagggtggaggctttgatggaggtggtgaaggattttccggagatacagtgttccgtgaagatgcggttgggatgggaagacccgggggaatgtctgaaattgttgcctttgttgaatgcggccccgctggccgccatatttcttcatgcccgggtgggcgtccaggaatacaagggagaggcggataaggaggcttttgagattttttacaaggaatgcgaacacccgttgtattataacggggacgtgttaaccttggaggatattcaggccgtgacggagcgtttccctcgtttggagggtgtgatgatcgggagaggtttgttggcgaatccggccttggcacaagagtatgcggagggtaaagtgcttgccggggaggaacgactaaggaaattcaaggcgtttcataccgaattacttgcggcttatgccgagcgattgcaaggggatcatcagttgttgatgaagatgaaaacgttctgggagtattttatgccttcgacagatcgcaaggttttaaagaaaatacataagagcaataagttgacgcagtataacgaggcggtggtaaaggcttttatgccgggtgaagaggatgagtaagtgcgaatgaaaaaaacgatatatatcatcgtcggttgtatttccgtggttttggggattattggcatttttgttcccggattaccgactacgccctttttattgttgagttcgtggttgttctataatagttcgaaacgattacatgatgctttacaccgttcgaaatggctgggaccttacctaaggcgtttccaggaacgtaaaggagtcgggtggaagacaaaagcgatgtcgatcgtgtgtatgtggacaatgatttctatttcggctttcgcggtttttgaaaactggcatgtgcgtttattgcttttaggtttgggggtgatcgggacctgcagcgtgttgtttattgttcctaatgccaggaaaaagggagaaaaaaaacttgaaaatgacaggagctaaatgagaacattctttgagggaagtttatactctcttgtagctctgataatgagcgtgaaaggaagattaagggtgtgagatggcaaagaggaaatagccctttcgggttttcgagagtgtaattcgctgcttgtcaatatattgtgggattaaaaaaacgaacgtttattgattggcaaagatacgtaattttagcttacaataatcacgtttaggattttttttatccttcataattaagatgttagatataatgtttaaaaaaagatattgcctatcaataatcgttcgtttaatgataggtgaaaatgacgcgtgcaataaaaattacgataatcgtcaccttactgctaacagtagtacgagaaatggcggcacaagagaaaaatcaaatccataaaacagaagtctcggtagattttcggtgggattgggctgtcattgactttgactacatgggaacgggcaaaacgctatccaacttgagggcgttgattcggggaatcggaatggcaaacatcgatagtttggaagtcatctcctactcttcgcccgaaggaagattcgactataacttgaatctatcgaagcgacgggcacaagcgatgatggactatctcgctaaaacatacgatagcctttttccgaagatttcggtccgcccagacggggaatcatggcatttgttccgcgtaaaagcggcaagcgacacgacgctggatgaaacgacactccacgccgtgttggaaatcgtagattccgacctgcatcccgacatcaagaaacttcgtttgaaaactattgatagcggtcgcttgtacaattatttcgtaaagacgtattttgttgatttgcgacgttcttttattcgggtgacgtggttcgagcgcgacccgctgatcacccgtgccggattaccatgtcgaatcagtgccatcgtacccgcggggatagcgttgagagatccgggtttacgaatgacaccgatactcctgcctgccacgaacaggaaaaccatcatcgccttgaaaacaaatttgctctatgacttgataaccgctctcaatttcgagatagagatcccgatcggcaataaattctcgattgccgtggaagacgtgttcccgtggtggagctggggtccccacgatcggaaatactgtttccaaatgtgggaaatgggcatcgagccgcgttggtggttccggcgcacggatgagcgggaggtgctgaccggacagttcttcggggtgtacgggatgtccgcgaaatacgacttccaatggaacatcaaggcctgttaccaaggcgaatactggtcgacgggaatcacttacgggtgcgcccggaagatcagtcgccgcttcaacttggaattctctgcctcggcaggatacatatcgagtgattaccgtcactacgttccgagcgatgactacgagcatctctaccgggatcgctataaagcgggacaagtaaactatttcgggttgacaaaactcaagatttcgctggtctgccccatcaacatcacgcgaaagaaaggagggaagactcgatgaaacagatcgtgctgctacttgcgtttctattgtccgtcagttgtcaccgccgtccgttggaagacccggccaacaacacgacattgcgcgtcgccgtgaatattaaagctatcatgaacatcacgtgcgatatatataacgaaaaaataccggtaccgaccatcgaacccgagatgatgcgggtgttgttttatgacccgacaagcaaaaaaattgcgtcggaaacgtacatctccgacatcacgtatgacgatgaaggaacacgttgcctgcaaggcgatatcagcgtacgcccgggaacctaccagatgttgatttacaatttcgataccgaatccaccctggttcgcgatgaccagactttcgaaaccatcgaggcatacaccgacaaggtaacttcctccatccggcaaagtttcctgggacgtgccggtgaagagaacgccatcgtctacgagccggaccacttggtggtggccagtaacgaacgggaagtgattccttttcacgagggggtgcatgtggtaaagaccgatgctacctccatcgtggagacctactacctgcaaatcaaggttgacggcttgcagtacgtgtctagtgcccgggcggtgctgacagggatggtcggttccaaccgcttcggacggaacgaacgcgtcacgtccaccccggtctctctctacttctcgctgcaaaaaagcgatgataaaggagtcgacgtgctcgctacggtattcaacaccttcggacgcatcgaagacatcacgaactgcctgtctgtgactttcgacatccggaccacggacgggcgcacggtgaaacgggattttgacatcacctccctcttttcgagcgaggcatgcctcaagcatcattggctgctactcgaggagactgtcaagatcgaccctcccgcctccagtggcggcggcttcgatccctcggtggatgactgggaagacgaacaccatgatataaaattgtaagctaatattatatataaatagaatgattattaatgttaattagagtatgtatgaaaaagatgattttattagcagccatagctagcataacactcgcgagctgcgtgaaaaacgaaatggaggttgtcgacaacgatgatcaagagattaccttccaaacggtgaccgggaataccggaagagccgcaattattggatctaattatcccgtggatgcatcttttggaacctgggcacgttatacctcgggggattggaattatggtgtaccatcccaagagtatataacgaataaaaaagttacatttcagactccgaactggaaagttgacggtttaatctattactggccaaaaaatggaaagttatctttcttttcttattctcctttcgaggctaacggagggatggattataatgatgcttcggggataattgctacgaattatacggtattagatgctgcagatgaagattttatgattgcagacgtgatgaaaaaccaaacgggtaatgttgacactgatgaggtgttatatgatggagtgaaaacagtgttcagacataaattgacgaaaataggatttagcttaaaaacagatatagaatctgcaagggctactattgtggtgaaaaaggtggaaattatgggggtaaataataagggaacatatgttcaaaaggatgacatatggatacttgcctctcctgcttccattgcagattataccgcttacgataatagtactggaatcacgttaacagatagttatcagaatacgaatggttccgaggaaaaaaaagatttaatgcttttgccacaaacaaaatcacaaatgggagatgatgctttaattaaaatatcttatacgttgactcttaaaaacgatggaagtgatgtcgttgaaaatgttgttgtgacaacgaagttaaatggtacatcgtttcctgattggagtatgaataaacatatcacctatcaaattaccattggtttggatgaagttctttgggatccgaatgtcaatgattgggattcggaatcaacgcctggtatcaccatctaatccttcaaagaccacccgttgcgttcgggtataaaaacgctactacctaaggtcgtggggagttggttctccccgcggtcacgaaaaaaataacaaattcaccggcaaagaaagggaaacatgaggaaaaggataatcatactattgacaggggtaggcattgcgcttgccggatgcatggaagaaaaggttgataacaattttctcccggaagagatttccttccaagtggtgcaagccccctctgcccgcggggacatgacaggcaagacggaatatccgaaaagccttcctttcggggcatacgcttatttccttcccgcgggaagtacgtgggatgccgacaaggtttctgcggaggtgtacatcaacgatgcggagatctcgtatgataacacgaatgcgaactggcacgccgcgaccacctactactggccgaagcaaggttcgttgacgttctttgcctattcgcccaaaacgatcgcctcgcatgcgggattctcttacgacaaagaggggatcactttgaacggctgggatatcaatgcgaatccaaacgtcgattttatggtggcagacatcgccaagaataaacgggggaatgaagacaattatgcctacaacggggtccccaccctgttccgccacaagcttgcacgcgtcagcgtcaaagcgaaactggacgatgcgtatgaaaataaaaccataaacttgacatcggtggaactgactaacatcaaaaccaagggaaattacgtcaataataactggatgggacagggagctccggaaaacatccaagtctataacgatgcgtcaggattgttactgaacaaggatgccgcgatagaaatcggtactcaaaaacggatcgtgatgcctcaggccctcgcccaagacgcttattttaaaatcaagtacaacttgaccacgaccatcgccggcggcggaacggatacgcaattgatcgaaaaggatatattgataaaaaacgtcaccccggcgtggtacacgaacaacgatattacctatacgctgattatcagtctcggaaccaactatatcgagttcgacacgtcggtaacggattgggtgggatacggcaacatggacttaactatcgagtaattttgttgaatcaaagagaggatgatgaataaagcgatcacacacgggttgatagcgggactggcaacagtaatcatcggttgcttcgacaaccgttgcgcttacgaggaaacgggagaactccggtttcgcgctctgttggagctaaactcgcggggagagacgggaaacacctgcacctacccgacggacatccctttcggcatttgggctctctcgttaccggtgaacaaaacgtggaacaatcacgccgacggggcgcaaacgttcctcgaagattgccgtgtgatttggaacggggagacatggattaccgacacgacacacaactggcctcccgaccggagagttacatttttcgcttattctccctatcgattccccgccacattttcgaccgaacggggaatcgagttcaaaaacttcaacacggctgcggactcaaccgatttgatgttctccggaccgatcgtcgatctggactggaaaaactcgggagggacggtacagatacccttcacgcgggccttatgcatggtggacttccgggtgcagaccccggtgccatcggatatgatcatccggttgaaaaagattgccctggaaggggtggctttcagcgggaacttccaatccctgccggaagcgacatggagcgcaacgggagacacgggggaagcggtcttcttcgaagggaatctgcccttggacgaatcggaacaacaggcaggaggaacgcgactcatgatgccacaacaaacacgggtaaccgtgaaagcgacatgcgacatcgtgacgaacggcaacacgctcgccggacaagaactggaaaccgatgccactctggagtggggcaccggaaaacattgcagctacacgctgaaaataactccggacacactggtattcacaactgacatattaaagccatgacacgtaaattttggtatatactcgtcggaggaatcctgttcgccatcggttgttcaaaaagcccggaacaatcggaggaaacgatacgggaattaaatttcagttcccaaattactgacagcgcggattccgccactacaaatgcaccggaatcaagaggcacgggaggaactctcgtcactaacggcgggctgaaaaacgagggtaatgctttcgtcgtttactcgacctactccctcggcgggctatcttcacagactttcgataaccagccgcaaacagtcacgtacacgagcggggcgtggacctactccgagaaaaagatatgggttaactcggcaaaatacaaatttcgagcatactatcccgctgtcgcggaaatcctgtccagcagttcgaatcccgacttgttgacgctagaatacaacatcgcccgcgataacttcgacttgatggtggcttacgccgagcggcaaccctccgttgaccccgagggatacggggtcgtcacgatgccgttcaaacacgccctctcggctctccgtttcgagattaaatacgatccgctcagtattgccccaggcactaccgacaaaattaccaaagcctacttgcaaaacctatgcgtggtcggtctcttgacattcaatggctccccttccaactaccaaatgaattggagtaaatcgtactccgatgccgagcaacgctatctgtgggaaggatcgaaaatattcggcgtgggcgatgccaacaaaatatccgtttatgataacgacaatatcgtgtttgccatcccgcaagagatcacggcaaagagtaccgcgtttcatttcttcacggagtcgggactcgacaaccatcatatcgcatacatcccggccataacttgggaaccgggtaaagtgtacacttatacgatcacgctatccggctcatcgattagcgtggccgtcagtataaaagaatggcagaatattagttcaaacgtggatatacaagtataactttaatatcatgaataaactgagaaacaaaatattaacatggggtacggtcatactactgtttgccggagttggttgcgaagatcaggacacggcattcccctcccaagaagaagggaggggacgtgacgcctcgctgacgcttgcgatcggcgaaaacctgtcccgcgcggcgaaagacggggatagcatgaaaaagttggtcgtgttgctcgtggatgtcaattccgaaattgtaggtcgtgatatatccaccccggatgctgtttcgcaaacggtgactttcacgggtctcctgcgaggtcaatacacgctctacatcattgctaacgctccgggggatttggacctgtcgacagcggcatacgaggttggagccacgttgcccggcacgctgaaagatcggttactggtaactctctcgggtaccgatactccctcttacgatgataccgacggaatgcccctgaccctcgtgaaagaggtagccctgtctcccggggcgaatcaaatttcagccgaactggaacgggtggtaggacgattcagcgtttccgtctataaccatatagataacaaaaaactttgcatcagtaacgtggaactatccgattttaacgctagcatcggataccttttcaaccacaataacacgataccgggagcagtcacctatcgttcattcccgcctttgaccgatatcatctccatcgctagccacggcagcgcgtctgtttttgataagtatctttacgaaaacattgcctcgacttatgaaatgaccatcgaaggggcgattttcgaagaatcggacaacccggcaacatgtgttatcaaccaaaatatcggtagcaataaaacatcaattaacagtccggatgacgtttatgttattcgcagttactcggacaacacttattacctctacacgaacggctctacattatcggccaaacaaccagccgatgacaacgagttaatcaatgataaaaactaccaatggcaattctccggaacaagttccggaacgatgaaaaatgtcgggacggaccgatatattaccatttcaggaagcgaaccaggtatcggaacgacaggttcaaacttcaattttggagtttctactggcatttattttcgatctagactctatattagccgaaacggagaaaacatctctacacgcagtatcattaataacaacagtcgttggtacctgcgtccatataccgaaaccgaagaatggaaagatgccggaggtaacacgttgaccccggtcaaaaacttttccgtcaccacacccatcaactacatcaattccttcggggcgacagcggcattgaaatatatttaccgtaacgaacatctccatacgacggcaaacgtcttctacaatgaaggtcaaggtacgtttaattttgaagtagttccgtgggaaaagaaaacggctgatattacatttgattaaaacacgatgaccatgaaaagattatccatatattgtattctactgcttgccgtgttggcaagttgttcccgggacacgatagatctcccgggagaaaaaacggcacccatgatgatcagtttcgggagcgaaagcaacgtctcgatcgtgtcgcgtagcacgttgggagactatccggagaaccggatctacaacatttatattgccgtgttcaacagttctggagaaaaagtctatacacactttttcaatgatagtaatttgaaaacggattacgctgccgtggagtcctcttctgccccctgctggtgtgtatctaacaccagtgatgcctcaacaatcacgacaaaaggttccatcaaaattcccgtgaacacaagcaccgacacgtacaagatttacggtatttccaacctggatgcagacatggtaaatgtcagcagcgaccgtttgggagcagagattgccaacgaggccgatctcttgaatttcgttgtcacgctgaatcagaatgttatttcgcgaaacgggtattttcccatgagcggggtggtctccgacgtgacaataggtgatgacaaaattatcagaggaaccgatggaaatcaagcgaatttattactataccgaatggacgccaaagtccgattcgtgttcaaaacgggcaccactccggacgctaacggacaggtgattaaaacctttacgcccgggcaatggaaagtggtaaacatcccgcacaagacgtacctcatgtcttacgcccaacgcaggaaaacagaaaccaccggacaggatgcaggcgcgaccaccgatgatttcttcacgagcaattgggcgcaatttgaagagtttccctcggatacgcaaagtgaattctcgttctacatgctcgaaaaccggatgacccccaagaagaccgcgacgactttcccggatcgggatcgccaagtaaaactagaaagcgggttgaacggcgagtgggaatacgccaataatctctcaacttatgttatcgtcaccggacgggtggagatggacctggtaaacgatgatgccggacaaacgctgggaggagaagtgcaatacatcattcacctcggagacttcggaacgggaggaaacatttccgacttctccacgctccgcaacacgtcgtacacctacaccgtcacggttaacagcgtgaataacatccgggtggaagtggatacggaaacaactgaaaaccaaccgggagcgacaggttccgttacgattgccaaagaagagatcgccctttgcgacgcgcattacgtttccaaaactctcaccttccacgccaagtacatcactgatgatctcacgtggtacgtgaaaacgcctttctgcgacgggaagccgcaaattatcgagggcgaggacgttcccacgggattggactacaaatggtgtcatttccgcctgaaccaaaaagacggggagggaaactattacgtaaagaaaagacgaaagtacaccccggaagcctataacgcgataacctgtccggacggggagatggacatcatcactctcgtaaaatatattaaagctcaaaaaaaactctatgatgacccgcaactaagttcaacaagcgatttcgacaatacctccgaagcggacgggggacccaaaatcagtgttacggtccacgtggatgagtattactacgatgcccatcccatcacgggagaacagcgttccacgttatggaaagaatttgtcaatcaacccgatcgcatgatgcatatcctctgcaactcgaatgtcagcaaggatcaggagagccgctccacgggtagcgtggtcaccatccaacaaaaatccatacaatcgatattcgatacccggacaagtaacacctctttctccacggcttggggaatggagcacaaggatgaatatccggatatatggatctacgggaaaggaattacgattgatgggaacgggacagtttcccccacgcaagacagggggaatagcgaactttacaacggccgcttgaacacgatgagggaatgggaacttgtcggagccaataacacgacttttagctctaaatcatgggaaacctacatggacgtggaggtggaaaacgaagtacccgaattatcggaagactaccgcttcttgcgttattcctgcatgacacgcaaccgggataacaacggtaacggagttatcgatcaagacgaagtacgatggtacctcgcttctatcaaacaactcgtcggtatctggatcggctccgatgtcgtttccaaggacgggcgattatacaatcgcacggcaacacagatggatagcgatgatgaaggagtatggcgccagcacgtcatttcaagcacgaagtattcgggcaatagtaacgatccgaccatcgtttggggagaagagggatcctctaccggtaacatgggaggttcataccgatggtcaaattataaagttaataaatggagcgtgcgttgcgtgcgtaatctcggaacaaccaacgagagcaaatcttcgggctatgatttgtcagaaacccctgatgattacgtgaaaatgacaacgaatgcggacggaagttacacgtttaataacatttacttgaaccagtccgttatgcgttattacacctctcgcgaactggattttgatgacgagcaatcggaacagaaccgcgtgtacaaaaaattcgaggtggccccgtcgagcagtgccaagagttttacttcaattaaattccaagcgatgaatgatgcgatctccgctcaaacgatcaacccttactgtcccgacggataccgattgcccaatcagcgcgagctgaccttgatgagatattacattaccggagatttttggtcaggtataccttttacacgtacttatttttccatggggaaattaagcgatgggaaatacaaggacaaaaccaatagaaccggttacgggtatagcggggggaatatcttccttgactcggacaataacgcaacgacaactgtccgctgtgtccgggatgtatacagcgcggattagtccacccagggcatatttgacccgtattcaaaagaagtgaggcaaatggacatccggaaagtggttaagttcaaaccgacccaagggtggatcaatgaaacccgaacccccggattcgagggctcgggtgagaatttaagctaggctttgccgatttcccgattcataacgggatcttgactatatcccggatgatttaggacgtggcacccataaccacgttcacgattttcttcgggacaatgatcatctttttgatctcttttccttctaaccattttgttgattcaggtgcagctttgactgcggcctcaatatcagcgttggttgccgtcaaaggcatggatagtttgaaacgaaccttgccgttgaaagataccgggtattcaaaggcgtcttctaccaggaatttttcttcccatttagggaatgactctttcgtgatactttgggagtgtcccaataagctccatagttcttccgccatatgtggggcgaaaggagcgagagcgatcacgagcggttcgaggactgctcgtttattacatttcaaggcagtcaattcgtttgtgcaaatcatgaatgccggaatggacgtgttgaacgagaagttctcaatgtcgtattccactttcttgatggttttgtgcagtacttttaactcttctctggaaggagtttcgtcacttacgctgaaattttcaccgacttggaacaggcgccagaatttgcgtaagaatttgtatactccgtcgatcccttgcgtatcccaaggtttactaaattccaacggtccgaggaacatctcgtacaggcgtaacgtgtccgccccgtattcttcgatgatcgtgtcgggatttaccacgttgaacatggattttgacatcttttcaatagcccatccacagatgtatttcccgttttccaagatgaactcggcattggcgtactccggcatccaagcccggaaggcgtcttgatccagcacgtcgttcttgacgatgttgacatccacgtggatttccgtggttttatattggtcttttagtccgacggaaacaaacgtgtttgtgccttgtattctgtacacgaagtttgaacgtccttgaatcattccctggttgatcagttttttgaaaggttcttcctcgcaagccacaccgaggtcatacaggaacatattccagaaacgggcgtagatcaagtgccccgtggcgtgttcggaaccaccgaggtagagatcaacgtttttccaatagttacatatttcgtgatcaactaatgtgttattgttgtggggatccatgtagcgtaagaaataagcagatgaaccggcgaaaccgggcatcgtgtttaattctaatggataaccatcttctgttttccagtttttagcccgtccaaggggtggttctccgctctcggtgggcaggtatttatcgacttccggtagttccagcggaagtttggattcatccagcatataaggaaggtcgtccttgtaatacacggggaacggttctccccagtaacgttggcgactgaagatagcatcacgcaggcggtagttgattttgcttttaccaatgcctcgtttttctacctctccggcaatgtaggcgatggcctctttgacttccatgccgttgataatgccgctattgatcattttacctgctttcgcatcgtaggagccttccgacatatcgtgtccttctccgtcatcgacaacgggtacgatgggcaggttgaagtgtttggcgaaggcgtagtcacggctatcgtgtcccggaacagccatgatggctccggttccgtagccggaaagaacgtattcactgatccagatgggtatggtttcgttggtgaacgggttgatggcgtatgatccggtaaagacgcccgtaacctttttcacttcggtctggcgttcccgttctgtacgtttggacacgtaatccaagtattcggcaacggcatcagcctgttcgggtgttgttaacggtttcacgtagtctgactcgggagctagaaccatgaaactaaccccgaagatggtgtcgggacgggtggtgaaaatctctaatttcagatcggagtctttcacgtcgaatttcacgtctgcaccttgtgaacgaccgatccagttacgctggatgtctttcagggagtcggaccaatcgatgttgtcaagcccgtcaagcaatctttgggcgtatgcggaaactcgcaatgaccattgacgcatcttcttttgtaccacgggataacctccgcgaagagataatccttccttcacttcgtcatttgccagcacggttcccagttggggacaccagtttaccatggtatcagccagataggcaagacggtagttcagcaatatttcttgttgttctttcgtactctttcttttccattcctcggcggtaaagttcatctcctcaccgcaagcgacatttaatccttgggttccgacggcctcgaatgcttttaccagttccgtgatcggcatggctttttgctcgtcgtagcaatagaaactgttgaacatctggataaaagtccattgtgtccatttgtagtattctgggtcgcaggtccggatttcacggtcccagtcgaaagagaacccgattttatccatttgttcccggtagcgacggatgtttttctccgtggtgatggccgggtgttgtccggtctggatggcatattgttccgcgggcagaccgtacgcgtcatatcccatgggatgtaggacgttgaatcctttcaagtgtttgtaacgggaatagatgtcggaagcgatgtagcctagcgggtgtcccacgtgtaaccctgccccggatgggtaaggaaacatatccaacacgtaatatttgggcttggaaggatcgacttccacccggtaagttttgttttcttgccagtagctttgccactttttttcgacttccttgaaattgtattccatgttaatccttttttagttctcgtaatgaattgcaaaggtaataaaaatcactaattcattgggaatattcttgtttggagatgagaaaaacatgaaataattgatgtaaatgttgtataactatataacatttgctatatttgtataatgaaaaagataatcgcatataagaggtatttttcggacttcatttcaaccttgtcacaagaagaacgcgggaaaataaaacgtgcgttggatttgtttaaggtggaggatcgaatgccaagacactatattaagttcattcgtgatggattgtatgaatttcgtgtaagttatgggaataatgaatttcgaattttctttatatatgatggagaagtaattgttgttttatttaatgcgtttagaaaaaagacacagaaaacaccggatagtgaaattaggaaagcgataagattaaaggaggaatattatgaaactaaaggaaatcagtaaagacatttacgatgttgatgcatggcttgatgaaagtcttggcaaggaaggtactcctgaacgagaaaaaaacagagagagggcatgggaggaatacaatgcccaaatattgcttgatgcacgaaaaaatgctgggttaacacagcaggaacttgcagaccgtatcggggcaaataaaggatatatctcacgaatcgagcgagggcttactgttcctacagttgcaacattatacaaaatagcttctgctatgggattgacgatagaacttaggcctatttaaggacgattagtgtaaagcaaaatctgattaaatgatatatttccccgcttacgagcggggattttttatttactggcattacttgatagatatttcatccctataatcaagtatgtaaagggtgttttttacccattttaagggattgtgggtgggagtgggctactttatttttgcgacactaaattgttgttaaactaaattttttaatataatgaaaaagatgaattggtttcttgtggttatcatgttgttcggtgcgtgttttgcggcttgtacggatgatgatgataacggtggttcttgggatggagagtccgttaccgtagattgtgatccatatgatgcttggtcatattttagtttcaaagaggggaaaacggtgaaaacgttgaaagtaaagagtatggaaggggctgtgactggtgtgtattacggggatttgagttctaatactcttataaagaataccgactctttattgatggtgattaatgaaggcgtcggtgataccgtggttatttcctttcctgcttgtgaagttggtggaatgagtggaacagaaacaacaagtgctagtttctctttaaaagccattgctaaaaaagagggggatgtatggcgtatttcaagtgagaagtctgttgttacgatggaaaaggaagatgaaattacaacggattattatatgtcgataaatggaacaatcggcacgacgaaagatgctgactttagtcttgccttgtatatgaatgtaaaggcaatggaagatgggggtatgcaaatgaacatgggaggaacttttgccggagaatctaccggaaaaacttatggtgtggatggtgatgaaatttctttcgattgggatattgctttccatcggtatgatataaagacgaatgacggggctgccatcatgttgcagaccacggatttggaaagtgttacttctgctagtgttaccggagaaagtttcacttcagatgtggacggggaagtcatggtggatatgtcaggaatgatgagtggttttgttgggtatcaacccacgaaggttaacgaagtgttggctaaatgggtaacggcaactcctaccggatcaatgcccccgtattcttatgagattaatggtaaagtgtttgttgtgaaaactgccagcggtgaatatgcaaaattgcgtttcacggatatgtctgatgctacgggtaagaatgaggctgctacatttgactacgagtttcctctaaaataattttgttcatgatttatcaaccgtaagaggaacagactttctcttacggttttttccgtaaaaaaaagagttttatgaggcatgatttgttgatactgttttttattcttttgtcgtcagcattgatggctgatgagcattccaatgaggctccttcttttaaagtgcaggggattgttaccgatgagaagggcgaaggattgccgggagcatccgtgtgggtaaaaggaacggtggtcggggccgggacaaatgctaaaggggagttttcttttaagttgtcatcgaagaataggtgtgtgttacgggtgagtttcacgggatatgaaccgcaagagcgggaagtgacccccggggttgacagtctgtatcatttcgtgttggaaccgagtaataatgcgttgaatgaggtcgtgatcacgggaacccgtacgttgaaaccgttgaaggatgttccggtgcttacccgcgtgatttcatcggaagatatagcacaggtgaatccattggatttgcaaagtttactggaatatgaaatgccgggcttacagttcgggctggcccacggttccggattgccggaattgaaattccaaggatctgccgggggatacgtgttatttatgattgatggagaacgtgttgccggagaggggtccagtaataatattgattataatttgattgatatggataatgtggaacgtattgagattgtcaagggcccaatgtctactctttacggttctcaagcgatggggggagtggtaaatattattacgaaagatgcgaatcgtccttttacggggaacgtttctgtgcgttatggtaataatgatgagagtaaatattctttgtctttgggggctaaacaaggacgtttttctgcattgacatctctttcctaccgtaagcgagatgcttatgccttaaaagataaagaagggcaaatcgagtattcgtattataaggatatatacgggagagattccgtggttgcggatacttcggagaaaggaatgtctagtgtaaatggattcgagatttggcaggcgaatcagaagttgagttacacgtttaacgaaaattttcggatctcattaaatgggacatattataataatgacgtgttggagtacgtggagcagaaagaacaggatcgcttttctaattacagtataaatcctcgggtttattacgctattaatgattctcatatactggatttctcgtatgtgtttgagaattacgaaaagcgttacgtttataccacttcattgccttctaaaaaggtttttggagatttaaccaataccgttcggttgaattatactggatatatccatgaaaaacataccttgacagccgggatagaagtgaatacgcagaaattgcaacattattggtttgataacggttcggggaagaagtttgatgcccagacgtatgttttgtatttgcaggaggattataaggtaagtgattcgtttagtgtgttggctggggttcgttcggattgtcattcaaaatatggttttcacgccagcccgaaaatttcgttgatgtataaatatggtgttttgacgctacgcggtggctacgggatgggatttcgtataccatctttgaaagaattgcatagtgaatatgatatgggcggacagggatttttcatgatatacggtaacgaagatttggagcctgagatcagtcaccagggaacgttttcggccgaggtgacgaaaggaatttttaatggttccgtctccggttattatacgagattctttgacgagatcgctttgggcttaacttcggacgggaaagatcagcaatattataatgcagatgatgcaacgagaacgggggttgacgtgatggcgcagttccgttttaaaagtggtttgaccctaaaaggtgcttacgcttatattgatgtacattcagaagtggatgggtataatatggctagtgatcgtccgcatagtttgacttttacggcaaattattccaaaacgttcggaaaggttggtttgtcggtggctttgaacgggcggtggatgtcttcggtggagacatggtacaagaatagtgcaggtggttacgtgaaaaatgaatatgagagccggactttctgttcgttgaattttggcgctcgtttcccaaaaggtttccgtttcatcgcaggtattgataacctgtttgatttcaaggataaaaatgtgacagccgatcaatcggtgaccccgcagagggggatcgggtttattggaacgttgtcggtgaatattgcagatttattaaaattataatccattaaagagaatactgatgagaaaaaagtggcttgcgttggggtgtcttttaattattgtcttgttggggatctgggcgtacaatgtctggttcggaactaccaagattgctttcgtgaattttcagacgattacgatgggaggtattgcgaaggcgaatgacaattcatttattaaattgcaagaggttcccgtggaggaactggataggttgtccggttttgatatggtgtttgtgaatggcatggggttgcgtgtcgtggaggaacagcggcagcagatacagaaagcggcagataaaggtgtactcgtgtacacgacaatggcgacgaatcccgcgaataatatatgtacgattgattctgttgaccaagtcgctttgcggggttatctggggagtggtggaagacggaattacaagaatatgctgaactatattcggaagaatatggataagaagttgatttccgtggaagagccgggagtcccgatcgagagatcttcggatgtgttgtatcatgtcgatgtggataagtcgggagatgagcttgattttgtttccgtggaagagtacgagaagtatttgaagagtaaacaattatataaagagggggcaaaaaagattgtggtgaccgggcagatggcagatgccacgggattgattgatacattggagcgagtggggtataatgtttacccggttttgtctttacggcgtctgcttgattttgtgcgtgaaattagcccggatgctattatcaatatggctcatggtaggttgggggatgaggtcgtgaaatatctggaggaacgtaatatcctattgtttgccccgttgacagtaaatagtctggtaaaagaatgggaacaagatccgatggggatgtccggaggatttatgtcacagagtatcgttaccccggaaattgacggggccatccggacgtcggcactctttgcccagtacgaggataaagagggattgcgtcattcttttgcagttccttcacggttgaagacatacgtggagaatattcagaagacgttggctttgaaggaaaagccgaatagcgagaaacgagttgttatttactattataaaggtccgggacaaagtgccatgaatgctgccgggatggaagtggtcccctcgttgtataatcttttgaaaaagatgaaggaagagggatatagggtagagaatcttccggcaaattccaaggagttggagaagatgatcatggcggaaggagccgtgttcggtacttacgcgaacggggtgatggatcgtttcctgaaagagggtcacccgctgctgatttcaaaagaggagtacgagagttgggtgaaacaggctttacgaccggaaaaatatgccgaggtggtagctgctttcggggagtttcccggggaatacatgagtactgccgatggtaagttaggggtatcccgaattcagtttgggaacgtggtcattatgccacagccggcagccggaggtggggataatgccttccagattgtacacgggacggatgtcgcaccccctcattcctacgtggccgcttatttgtggatgcagtacgggttcaaggcggatgctatgattcatttcggaacacatggcagtttggagtttacacccaaaaaacaggctgctttgtgtgatttggattggcctgatcgattggtggggagcgtgcctcatctttacatctattctatcggtaacgtgggtgaggggatgattgccaaacgtcgcgggtatggcgtgttgcaatcttatttgactcccccgtttatggagagtaacgtgaggggcatttatcggaatctgacggaaagaataaagatatataatcagaaagcctacccggagaaaggtacggctgatccgaaggaggtggagaaagctgccttgtcggtgaaagaactggctgtttccttgggaatgcatcgggagttggggttggatagcgtgttgaacgttccctacacggaagaagaaatattgaagatcgagaattttgcagacgagttggcggcagagaaggttaccggacaattgtacacgatgggagttccatacgaggcagcccgcattgaatcgtccgtttactcgatggcaagcgatccgatagcttacgggttgttcgggttagatcggttgagaggtaaggcggacgctgatgtgttgaaacggaaaactatttttaccgaacgttatcttgatccggccaagcgattggtggggagactgttgaatggtcaggagaaagtggatgatggttttatttgtcaggtggcgggtatcacgaaagaagagctggcacaggctcgtgaaatcgatcaaaaccggaatgctcctaaagggatgatggcgatgatgatggctgccgcggcaaaacaaccggaagtcatgcctgtgaagaaggaagagggggaacatccgatgtccgggatgatgaagaatatgatgaaacagatgggtgaggggaagactcccgaagagcgtttggagatggcaaaaaagatgggagcacccgaagaggctttggagagaatgaaagcggctatgggaagggaaaatggtgaaaaaggcccggatgcgaagactggaggaatgcaggtgaacaaggggactggaggaaacccggatatgagtgccatgatgaaggcgatgatgggaaagaaggccaaggaatattccaaagaagaggtgaacaaggcgctggctattatggaagtggaacggacgttgaaaaacgtgaataattataagcgggcattacaggaaagtccggatggtgagttacagtcgttgatgaacgcattgaatggcggttacacggctccttctcccgggggtgatcctatcgtgaatccgaatactttgccaacgggacggaatctttttgctataaatgcagaggagacgccgacggaatcagcttgggaaaaagggatacagttggcaaagagtacaatcgagatgtatcagaaacggcataatggggagtttccgaaaaaggtcagttacacgctttggtccggagagtttattgaaacgggcggggccacgattgcccaagtgttgtatatgcttggagtggaacctgtgcgggatgctttcggacgagtgagtgatttgaaattaatcccgtcggctgatttggggcgtccgcgtattgacgtggttgtacagacttccggacagttgcgggatattgctgcatcccgtcttttcttggtgaatcgggccgtggagatggctgctgctgccaagaatgaccaatacgagaatcaagtggcggccggggtactggaggcggaaaagacgttgattgataaaggtatttccccgaaagatgctcgtgagatttcaactttccgggtcttcgggggtgcgaatggtggttacggaactggaatacaggggatggttgatgccggagaccgctgggaagatgagtcggaaattgcagccacctatttgaataacatgggtgcttattacggtagcgagaagaactgggaaaaattccagcagtttgctttcgaggcggctctgacccgcacggacgtggtggttcaaccccgacagagtaacacgtggggggcgttgagtttggatcacgtgtacgagtttatgggaggcttgaacctggcggttcgcaacgtgacagggaaagatccggatgcttatctcagtgattatcggaatcggaataacaacaagatgcaggaggtgaaagaggctatcggcgtggagtcgagaaccacgattttcaacccttcttatatcaaggagaaaatgaagggtgaggcaacttctgcagccggttttgctgaaattgtccgtaatacatacggttggaacgtgatgaaaccttcggtgatcgataacgagatgtgggatgagatttacaatgtgtatgtaaaggataaatttaatctgggggtacaggatttctttgagaaacagagtccggcagccttacaggaaatcacggctgttatgatggagacggcacgtaaggggatgtggaaggcaacggatcagcaattggccgatttatcgaatttacatacggatttgattcagaaatataaaccggcttgttccggatttgtatgcgataatgccaaattacgtgattttatcgcatctaaagcgactcctgaggctgccaagcaatatcagaatagcataaagaatgtgcgggaagttgcggcagatcagtctaaaggtgtcgtgatgaagaaggatgaaattacttccgagacacaaaaacacacgaataaggtgaataccgtttggattgttgtcggtgttgttgtaatcttgggtggtttggcagttttgatgcgtaaaagacgtagaaacagaatgtaacaatggatacaattgtattgatattaatattgttgacagcatttaattttttgttgaaacaaaccttttggaaaccagtagcggtgggagccgctgctggtattgccactatatttgtgatcctgctgtggccttatgctattgaacaatcaaaaacacaaattgctgattggttgtcagacaatcaattgatgttggatacttccgttgtgttgactttggagattgttgtgcagatggcattctgcctgttggcagttcatgtggcaaattattctccggtgaagaatcgtatgatggtggcttatcgcttgttgtattggtttccgggagtgttgattattccggttttattctttggtttgacacaggctatattctcttttccaggggtttcatttaaattgattgctcggttgtttggtttgtttgttttcgtggtcattcctttgggaagatggttgatcaagtggttgttgccggaagaagacttgcgtttggaattgtttttcctgacaaatgctttggttgctatcttaggaattattgctacggtaaacgggaggacggcagtggagggagtaggcgatgtggattggtctgcattgaccggttgtgtcgtgttatttttagtgggagctattgcagggtggatggtatatgtaattaaaagaaaactaacttttaaattgagaagataatgaatactatttctgatatcatgttttggatttcaacgggattgttagtgcctgttatcgtgttgttgattttgttgttttttcgttcccttttgctggtagggagtttctttggtcaatatgtttctattcgcaagacggataagctgatccgggaacagatggagacgttgcacgtgaataacgtggatcattttgcagagaaattaccggaaaagagtaattctttggtagtgatgtttatgaaacggatcttggcggagcagcagaataaagcacaagttcaacgtttgttggctaatttcgagattgcggcggataaggatttggctatatctaaaacgttgaccaagttaggaccgattttaggtttgatgggtaccttgatcccgatgggacctgctttagtcggtttgtccacgggagatattgcttctatggcttataatatgcaggttgcttttgccacgacggtgatcgggttggtggctggtgcgatcggcttcttgacccagcaggtgaaacaacgttggtatttgcaggacatgactaacttggagtgtctcgtggaagtgttgaatgaaaagaatgagaagagatgaaacgtaatctgttaaagaaagaagaggataatgacccgattagtgcggtgtcgaatctttttgatgtggcgatggtgtttgccgtggctctgatggtggcattggtgacaaggtataatatgacagagatgctctcgacagaggatttcacgatggtgaagaatccgggaaaggagaacatggagatcattactaaggaaggcgaaaagatcaaccggtacactccttccgaagatcagaaccagtcggggaaacgagggaagaaggtggggattgcgtatgaacttgaaaatggtgaaattatttatgttccggaatagaaagaattattagttgagaatgtaatttaaattgtgtcagtaagaaaatagaatattagttctattgatatagtttaatttatattctctcctaattcttcattacctcatggaagaaatcagccatttcgctataagtgtgttcacgtccttctttcaatttggataataaagatttctctgaattatcgatcgctttgtcgaaatttcctccgtttgcaagcaaaaaatggtgtaatcctttacattttctgcttaaaaaatcttcagttttctcataattacagattctctccaattcttttgtcaattcattagagttattgaatggttgagttgtatatttgaaatgaaacaaaaaccatatttccaagcaacgttcgttttcaaaaaaacgcactaaactttctgtaccttgtcgctttcttgtaatcgttttttgatgatattttgttttcagccttaaataattctctcgatttcgtccttcttttttgttatccatgtcaatcaaacaaaatatcatattatatccatcatcaatgcattgttctatccgacgttccaattcaagcatgctggttgcatgattcggaatcatcggtttcacttgtgcatgaataattccttctaatgattttaagtaatatttttcagtaggtccttcaccgataacggctattgttgttcttattgctcgtgttctcatatttaactactttaaaagatagaacctaattctggtttagcaccaagttttcctgttttatatgctttgtaaagggataaatttttatgtaacccaaattcagaagcacaataaagttcagtagaagcatcttccttcgatttctcggtaaaccagaccatatctcggcgtataaattcttcatccaacagttgttgatcttgcgtcgtgaacaatatctgcgagttcgttgtgttcatcatgaatgttgttaggaaatgtagtaaaagatcatagtgtagattgctttctatttcatcaaaacagtatatatggtcttctcgtaacatattaaacatacattcttgtaattgaaaatagcgtaaggtccctaatgattggtctatggaagataaggtaaaatcagctccacctatcgtatggtgagtgaaaaatacatctttaccattttgcattctcgcttcattgtcaatacttatattagaaatattgaaatcagctttttgcatggctgatataaaataatcctttttttctttgtcattaattagttgttgtgcgatgtccaaaagagtatttcctttcattccatgcacataacggacaatccaattataagtgtcacggaaaatctttgcgtcttcactcaaggatatttttgcaaaagttgataataccgtgtgattattcagcgtattatctatgattgtttttttactttttaaatgtaaaccgactgttcgaccaaattcaatatctggtacgacatcttcatgaacaaattttcgattatagaatagagacaatactccattgggagcatactccattttttcagaaataatgtgatgattgttatattccaatgaataatcatatcgcacttgctcgatgaaaaaagagacggacaaacgagtatttttatctttatccaatgcaaatggatgaaaaggtattgcttgtaatttatgggtacaaggaagtactaacattcgccatattgtttcataagcatagagaatgttactttttccagaagcattagccccgtagagtataagcatacgatttagccgtaccgtagattttacttcgatagttaacagttcacgagaagtattatctttggtggcttcaaaagataatacttgtttttttcgtattgacatgaaattttctatgctaagttctcgaatcatactttaatctgtttgtttcgtaatatttctacaaatatagcgattcatcagcataaaacgagtttgtttagaatgttatttcacttttttatcttttgataccctattattacgtgattaatcccattgtttcggaataaaaactatatttgtcgtggaattaaaagaaagtgcctgtgtccacgagtttagttttaacggttttgctggcttattttttattgttgatcctggttggctttgtgacaaccaggaaagtcaatagtgagatgttttttacagcgaaccggaattccccttggtatttggtggctttcgggatgatcggtacaacactttccggggtgacttttatctctattcccggggaagtcggtaatacgcattggacttatttgaccttggttttcggtaattgcgtggggtatatcgtgatcgcactcgtgcttttacctttgttttacaggcaaaacctagtttctatttattcctggttgggaactcgtttcggggagaaggcccggttgacgggttctttcttttttatcgtgtcgcaattggtgggcgcttccttccggttattcttggtcgttggcgtgttgcaactggctttctttgatgccataggcgtacctttttggttgaccgtgttaatcacgattgtcttcgtgtggatttataccgtgcggggcgggattaagacgatcgtttggaccgatacgttacaaaccgtgtttattctgatctctgtcgggctgacaatcgtggtggtaaataaggctctggatttcaatttttcttcggctattgcggctataaaagagagtcctctttcgagggtgtttgattttgattggcggtcgggacagaatacggtgaaacagtttttggcaggcgtggcgatcacggtttgcctgaatgggttggatcagaatatgatgcagaaaaatttgacttgtcgttccttgcgggattgtaagacaaatatgttttcattttcttttttattcttggtgacgaacgtgttgttcttgatgctgggggccttgctttatatatatgccgaaagagaaggtatcgtgctgcccggtaagtctgatgacgtgtttcccttcctttccttgaattatttcggggctacggccggtttgttcttcctgttgggaataactgctgcggcctattcttcggttgattcgtcattaactgctttgacgacctctttctgtattgattttctgaaaatagatccgggaaataaggaggagaagaaaaagcggatcggggtgcatatcatgttttcgttactgatgattttcgtggttgtgctcttccgggaactgaataattcgagtgtaatatcgtctctttttaaagcggtaggttatacgtatgggcctctcttggggcttttcacgtttggtttgactacaaagtatcaggtacgggaaaagtatctgccttgggtatgtttgctttcaccggtggtttcttacgtggtcaattgttactcggaacaacttcttttcgggtataaattcggtttcgagatactcctacttaatggattcctttgttatcttgggttgttatttatccgggccaagcgtcataaattagtcccggtgaatactctcaaggtgtaaccgataccgaaactgatagctgccatttcaaggaatcgtcttttaaaattttcgcttttcacgatggcgtcataatggttgaagattgcaatgatgtaggcgattccggtatggatagatgcttttatggcattattttgtacagaaaaacgtgtgtaatatgtttttgtgttcgaaaaatagctatctttacattatgaataatccattacgacgattagggaatatacctgtaacggtttctgcattggaatctcttttccctcatatcaagagaggaaatcaaaaagtcaggttacttgagcgagataagcaaatcattcgtctcaaaagagggctttacgtgtgcaatccggagataacaggtaagattttatcaacagaattgattgccaatcatctttatgcaccttcgtatgtttctatgtcatcggccctgcgttattacggcttgataccggaaacggtgtacacgaagcaatcaatgactctgaaacattctagggattttgatacacctttggggaggtttgaatatacgaatatctcaagagaggcgtttccagtaggcttgactagtatgaaaaaagaagattatgcttttgtaatggcaactcccgaaaaggcattgtgtgatttgatagcaaactcacccaaagtaaatctccgttatctgaaggatgctgaaatttatttggaagaggatattcggatggaactggaggaattcaaacagatgaacgctgaaatatttgaggaatatatgaaggtcggtaaaaaggccgagtcgatacgaacattgctaaaattgatgaggaaatgaaaaatgatatttacgacaatatgctttctgcatacgatttatctaccgaacaacagaaacggaatgccatttttgaggtaaaccagcagatgatacttgctgggctttataatggtggcttttttgatgttgcaactttttacgggggtacttgccttcggatttttcatggtcttcagcgttttagtgaagatatggatttttcccttcttgctcctgatgataagttcgatttcacaaaatactttcaacctataatagatgagttcgctattgtgggaagagacgtggaaattaaaaagaaagacaaaaagaattttggaaaagtagagtctgcctttttgaaagataatacggatgtttatgatatttcttttcagacggataaatctataaaaataaagattgaggttgatacccaacctcctttgaagtttagaactgagcagaaacttcttttgcaacctcattcttttatgacacgttgtttcgttcttcctgatttatttgccggaaaaatgcatgcattggtttaccgggcatggaaaaatcgggtgaaaggtcgtgattggtatgattttgaatggtatgtccgtcacaatatacctctaggctttacgcatcttgccgagcgtactttcttgtttaataatgaaaagatagagcatgatgcttttattactcaattgaaggacaggttggtttcggtaaatatcaatcaggtaaaaagtgatgtgttgcctttcgtcaagaatcccaaagaattggatatttggtcaaatgattattttgtccagttggcggatatggtgaaatttgaataaagacatgttattatttattgatgtggtggaacctcaataagtaatacccgagatttctcggttgccttgaattccacttcttccgtgtcgtacacgccgatcccgtctcgtcgcctgagttcgatgtctttaatcatgatacttccttcaataataaagatatacacgcctaggctctcctttgatttcatcttgtagagttgtaaagaatccttgtccaggtcggcaatcgagaaccaagcttgttgataaatccataatcctttgtcattaccgggataaggagatacgatctcgctgatttcattcttgcggattagatcagaaatcacggcgttctcataccgtggtggtacgttttgcttgttcgggaatacccagatttgcagaaattcggtaggccgatcgtcattccggttgtactcgctgtgcattattccggttccggcactcatgacttgaatctcaccttctttgatcgtgtccttgtgtttcaaactgtcttgatgttccaaatcgcctttcaagggaatggagatcacctccatgtttttgtggggatgaaggtcaaaacccgttcctccttctatccagtcgtcattaagtacgcgcaatgccccgaaatgaattcgttgtggattgtagtaatctgcgaaactaaaggtgtggtgggtttttaaccatccgtggtcgaagaaaccgcgactctcggctttatgtagtattgttttcataaccttatttatttttgtgtactttcctgaaaatggttgactcggattaaacaaaaattttaacaaacaccctaacaatgtatcaaa

SEQ ID NO: 10901 - DNA, 1962 bp, Unknown
  gut microbiota DNA sequence
ctagtgctaactattattatgaccaacgttattttatggatgtatccgtaaactataatggtgcttcttcttttggtgaaaataatcgtttccaatatttttattctttaggtgcgggatgggttgtcagtaatgaaacattcgtgaaagagcatttgccgtttattaacgaaatgcgtttccgttactcttttggcgtgactggtaatatgtttgtttctcctgaaaaatctttagaagtgttcaatcggaattcgtcttatacttatttggggggaattgcttggacgttgagccaatttgcgaattcggatttggagcaacaaaatacttatcaacataatgcaggtttggatttaggtttattcaatagtcgggtaagaatttcattgaattattataatttcctaaccaataatacgttgacggatatgaatttgccaatatctcatggttttgatcgtattgcgggaaatgtcggaaagattcggaatgaaggattagatggaaacgtgagtgtggggttgttgcgaaacacggagaaaaaaattaattggacactaaacgcatctttctccaagcggaagaatgtcgtggtgaaactgtctgaaggttttaaagaacgaattagtatgcataatagaggtatgagtacaaatactgatcttatgaaatatcaggaggggcgttctttggaagctatttatggtttgcgtacagttggggtagatccttcatcagggcaacgtgtatttttaaagaaagatggggttacgaccacattagatcagagtgctgatgatttggtttatttgggagatcgtcaaccgaaattgaatgggactttcagtacttcgtttttttatggtggatttaacatgacaatcgggtttggagtgaaatggggaggaaaagctgtaaatcagacagaaatgacgaaaggagagaatgctagtttaacctataatttggatcgtcggatgacaaagtatagttggaaacaggttggagatcaagcacgttataagaataagtatggtgattatggtaagctgagcacctttatatgtgatgcttttatacataaggataatgtttttagttgtaataacattaatctttcttataccttttctcaagattggtttaaaagagctacaagattacaaagtttatccatttcagcttctttgtcggatattttttatttctctacgattgaacgggaaagaggaactagttatccgttttctattaatcctaatttctcaatttcatgtacattttaaaggtcagtattatgatgaaaaaaattatatatacaatggggctgagtttgataatggcattaagtgcttgtacggattggttaacggtccaaccggaaacaagtatgactgcagaaacattatttcaaacggataacggggtgaaatatggtttgaatggagcgtacctacttgcgagtcaaactgtctatggaccgtccggatattttggaggacatagtgttgtggagagtatggccaatacatacctttatgcaatgaatacagatggttataattgggccaatcatacttatgaacagacagattcccaaaagaatgtgaatggatatacttttcagtatccttatacaattattgccaatttgaattctttgttaaaagagatggagccttatcgggataagattactccggaggtgtatcatatggtacgtggagaggcttttgcattacgagcctgttgccattttgatttattacggacttatggccctgttccttccaaagtggatgcaggtaaaacgtatttgccttatgtacgggtaaatgatgcagggaattatgagtatcatacttttgctcaatttatggaatatgtacaggctgatttggatagtgctgagtttttgttgagtaaatacgatccggtgttaacgactaatatttctta

SEQ ID NO: 10902 - DNA, 1120 bp, Unknown
  gut microbiota DNA sequence
ggggtaaagatcgtgaacgtggaaacaaaagaggaacgatcggggggtatgaattattagttttgttactgcatagcttgtttgctttatggtattgaaatgcgaaatttaaaccttatatttgcatccgtttattgaaaaataagcggatttaaggtagggcttagagtggttacacgagattttatttattgacattgttacataattgttacataagccttctttttgagtgtttttaatattttgataaataattagttatgtcttatttggcaggttctttcgtaatgcgtaggtctggggttcgagtccccaaattggctcaaatagaagcctgtctgatagacaggttttttgtgtttaaacctaaactttatattttatgaaacgagttattgtgatttgttgtgtattgatgtgttttgggggagtagaaatggcacaagcccaatcattgaaggacattttgaattcatcgaaggtaaaggatgtggtgaatcttgtaacaggtaacgtgattaaattttcggatcttcaaggaacttggaactacgtggagcctgcttgcaaaatgacgagtggggatttgttgaaagaagcgagcggttcgttggtgacttcggcattggagaaaaaaatggtgaatatttacacgaagttggggattgttccggggaatttcagctatacgtttagtagtgatagtacgtttacgaatacgataggaaagaaggtattaaagggaacgtattctttggacgagaaaacacgagtattgacattgcgttatatgttggcaaaaacgatcacggtgaaaagcgtggaagtgcagttggtgaaatcaggagaacagatgtcattacttttcaatacagaaaaacttatgaactttgtcagtgtattatcttctgctttgaagaaatcagataaaacgactccttcactaatggatgggtatgatgagattcttttaggatttgagatgaagaaataatttgtagatggcaaaagaagaaacggggactttgttggattggtccccgttcttatttaacgtgagttcgaaataacttaaaacaacacaagttgcctgtccttgacaaaattgacatcaatg

SEQ ID NO: 10903 - DNA, 556 bp, Unknown
  gut microbiota DNA sequence
gtgccttttcaggaaccacaatctcgtttttggtaatggagaagtaggctttgtcctggtgcatcggcttgatgggacaaatccaacggttatcacggatcatcacatccatcggttcaaaagacatcttctcgctctcgtccaattttacggcatccccattcgccagcttgttccaaagttccggacgggcttcctgaagattggtctgggacacgttaaatacccgaaagacctgcatcttcggatatacgttgtacatcttcttctcttcgtcggagagccttttgtaatcgtcatacttgattttctccttggtctccttatggatgcaggtaaaggtggtaagcatgaccgggaacgatttttcaccacggttgacggcaaccctcggcagttccacaccctctttagcctgcttttcagtcggcttgttcaaccgttgcacacagtcaaaggtgcagaaacgaggaatcttatatccgttcttctcgcagtggagaagcaacatcagcgcgttcatcccattgtactcacgcccggataagttcttcgg

SEQ ID NO: 10904 - DNA, 2367 bp, Unknown
  gut microbiota DNA sequence
gattttcttctcgttctatcactccaatcccacccacctatttttatcaaacaatcagatacaatgtataagcaatataaataacgaacaacacgactccttccccccgcccgatcttgaatcccgtgcgcatgaaaggcaacagaagtaaagaagttccgagcatcaccagcatatccgtccagttaatctggttggtctccacgggcgcaatcgtcgccgttaatcctaaaacagccaaaagattgaatatattcgaaccgatcacgttaccgatggcaatatccgtacgttttttcaaggcagccaccacggaagtcgccagttccggcatacttgtccctgcagccacgatcgtcaaaccgattaccgcctcgctccatcccaaggctttcgcgataatcacggcattgtcgacgagcaagcccgacccccataccaacaaagcaagtcccgcaatcaccaacacgacatccagcatccagttcttcgtgggtttgatttcctcgtccccttcaaccacctctccccgcttggccttatacacgcagtaaatcatatagacacatatcccggaaaaaaacaatattccggcccatcttccgaaactcccgttatgaaatatccccaggaacagcaacgtggccaccagcatcacgggcgcatccaaacgaatcaaccggggattcactcgcaacgggtaaatcatagccgaaacaccaagaatagcgcaaacattgaatatattggatcccatcacgttccccacggcaatccccggattaccttccagcgcggactgcacgctgaccaacaactccggcgcacttgtcccgaaagccaccacggtcaaaccgacaactaaaggagatattccaaaacgcacggccaaagacgaactaccttttaccaggaaatcagccccgaaataaagtacaaccaaagaggccaccacgagaagtacaggaatcaccatgaaaatcaaaaatttaaagttaatacataaaagttcacgatcacgagaacaaatattcatcgttattcgtacttttgaagtttcaaaaataacaataaaattacacgatcggtttttaacctttagtttttagcttttaacttgaacaatatgtttaaacaattcaaggaactactaaatacagcaaaacacactcccaagctcgggggattggaaatattcaaatacatcggtcccggtctattagtcaccgtgggcttcattgatccgggaaactgggcctccaacctggctgccggagcagaattcggttattcactattatggatggtcaccctgtccacgatcatgctgatcgtgttgcagcataacgtggctcacttggggattgcctccggtctgtgcctttcggaagccgccagcgagtacctgaaaccccggtatgccaaagggattctctactcggctatgctcgcctccatctccacctctctagccgaaatactaggtggagccattgccctgcaaatgttattcaacatcccgatccgggcaggatcaatactcgtattaattttcgtggttatcatgttgttcaccaatacctaccgggtgatcgagaaatggattatcgccttcgtttccatcatcggcttatcgttcatctacgagctttccctagtggaaatcgattggaacacagccctacccgcatgggtcacccctgctttccccgaaggttccatggttgttatcatgagcgtactcggggccgtggtcatgccccacaatctattccttcactcggaagtcatccaaagccgtcagtggaatatacaagacgataaaattatcaaaaagcaattacgctacgaatatgccgacacgattctctccatggtgatcggttgggccatcaacagcgccatgattctactggcagctgccgcatttttcagaaccggaactcccgtcacggaactggaacaagccaattccctgctggctccgttacttgggaataatgcctccgtgatctttgccgtggccctcctgtttgccggaatttcctctactattacctctggaatagctgccggctccattttcgccgggatatacaaggagccttacgacattaaggatagtcactcccgcatcggtgtgctaacttctctcatcctcgcttttgccctaatcatggtggtatcgaatcctttccaaggattgatttactcacaaatggccctaagcgtacagttaccgatcaccattttcacacaagtttacctcacttcctcgtccaaggtcatgggaaaatacaaaaactcaacttacacgaaatggctcctatacgtgatcgggggcattgtcactttactgaacgtcat

SEQ ID NO: 10905 - DNA, 2145 bp, Unknown
  gut microbiota DNA sequence
gagcgttgcttctttggctgaaggaacacaatacagattacaaggctttgcgtatgaatgccacgcgtattgaagaactgccatttactactgaacgtaaatatatggctaccgtggtgaaatctgcgacaggcaagaacattctttatataaaaggtgcgccggaaattattttcgccatgtgtaagaatacttgcggcgtttccaaacaagagatagacgctcagctgcttgcatatcaaaatcaagcgatgcgtactctcggttttgcatatcaggaacttggagataaggatgctactattgaaaatggcaagatcgtagccgataaactcacattcctcggaattgttgctatctctgaccctgtacgtttagatgtacctgatgccgttaatgaagtgattgcagccggaatcaaagttaaaatcgtaactggtgacacacctggaacggcaaaggaaatcggtagacagatcgggctttggaatgatgcgacggacacagaccgcaacattattactggagttgagttttcagaactgtcagatgcgcagttgcgcgatcgtgtaggcgacttgaaaatcatagcccgtgcccgtcctatggataagaagcgtcttgtagaagcactgcaaacgaacaatgaagttgttgctgttaccggtgatggaacgaatgatgccccggctctgaagacagctcatgtgggcttgtctatgggagatggaacatctgttgctaaagaagcatctgatattacgattatagacaactctttctcgtcaatcggccgtgctgtaatgtggggacgttcactttataagaacattcaacgcttcctattattccagcttacggttaatgtggcagcttgcttccttgtactgtttggctcatttatgggtaccgaatctccattgactgttactcagatgctttgggtaaaccttattatggatacattcggagcaatggcactcgcttcgctacccccttctgcaagtgtgatgaatgataaaccgcgtcgtcgtgaggcttcaatcttgactcgtccaatgatgacagaactacttggtgtgggtttgttcttctttgccttgacattgggcttctactggttgttcaaccatgctgaagtaacctcgattacacagatgttctcagcagttgtaggtggtgaaaatccgatgacagcatacgaagctacacttctcttctccatttttgtatggacacacttctggtatatgtttgatgcccgtgtatttgaaacaggagaaagtattttcaaagtaaaaatgagtcgcggattttggactatagtcggaattatcattattggtcagctatttatcactgagattgcatacgaattctttaatgtagaaccgatgcttcacacccttgattggcacttcaatcccacaggtgccattgacttgttgataattgttagtgcatcttcactcgttctttgggttcgagaaatttgtcgattgtttacaaaaaaataatacgtaattctatgggtgaatgagattcaaattcacccatagaattatctcacttattgtgtatgaaaagaataattatcacattgtttgttgttataggaatgacttgttcgatttccgcccaaaacatcaaacgtccggattcttacaactacaatcgtggcgttgaagctattcaaaacaacaatgcagaagaggctcttgaataccttaacaaggagctggaagataatccaaacaacggatatgctttggcttggattgcgactgtacgaaactatcaagaggagtatggtcgcgcattaaccgctgtagatttggcaataaagcatattcctaaaaaggacaaacaatatagagcctttgcatatattgttcgtgcagaagtttatgtgggacttggtgaaaatgaaaaagcacttgtcgatttcacatccgccataaaagaaactcctgatgctgctgatgtctatgaaaagcgagccaatctatattattatatggataaatatgacttggcagataaggattaccagaaaatcatatcaatagatcctggtagtgtaatgggctacatgggaattggtcgaaatgccaatgcggaaaaaagatataatgacgcaatcga

SEQ ID NO: 10906 - DNA, 217 bp, Unknown
  gut microbiota DNA sequence
gaacttctccaggctcttgccgctgatcgggtaattatccaagtataccttttaaaaaagacgcgaactccctcgagtaacgcgtgccatctgctgccagggaaaacttgttgctaaccacatctcccgatggaagttgccattcacgacgacgaacgtgaaggtaaactgcccgaccacgtaacgggaaatcctggatagaagtcgggaccgtgaa

SEQ ID NO: 10907 - DNA, 1005 bp, Unknown
  gut microbiota DNA sequence
ctgacatgctgcaaggattgtatcggagcagtaagcgttattccattggaagaaaaggagggaagccatgtgtaattgcttatattgttatcgtccgctcttaaagggggaaaaggacatgcacacggcttgcataaaaaagtttttcggaacaacgacattgcctgttcttgattatacgacagaacaacttgatcagcttgctctgcaaatcattcaagaacaaacctctttgaccggtgttcagccgaaattatccttgcatttgaaggaacatgagggctgtaaaagattgactattgtcgggctatggggcggttatatttgtaaaccacagacctcgcaatatgaaatgatgcctgaggttgaggatttaaccatgcaccttgctgaggtggcacgtattgaggttgttcctcatacgctgatgcggatggcagatgatacgctatgctatcttacccgccggatagacaggacttctaccggagagaagattgcgatggaagatatgtgccaactgacggaaaggcaaacagagcacaaatacaagagcagttatgaacgtgtcggcaaggtcgttttgaaatactcgtctttaccaaagatggatgttaccaatttctttgagttggtgcttttctcttggttgacagggaataacgacatgcacttgaaaaacttctctttgtatgaggtggcggataagatacgtttaacccctgcttatgatttgctaaatgcggctatcatcaatcccaaggatgacgaagagttggcattgactttgaatggtcggaagaaaaagcttcaaagagaggattttattcgatcagcttccatgctaggtatagagaatgtgattgtagaacgactgataaataaatatatcaaactattgcccaagtttgagactatcattcaaaactctttcctaagtgctgaattaaaagaaaagtatggcgaattattgaaaggacggcttgcgaggctttaacaaagact

SEQ ID NO: 10908 - DNA, 586 bp, Unknown
  gut microbiota DNA sequence
ttatggatatggtggtcaaagccttttcttcgctgatgatgctggcagtagtcattgacagcaaggatgaagaggaacagataagtgccgtttccaaaatggccgatgaacggaaagtggatttgaccccacttttaccacacatgaaaacctgcgctctcgtggttggagagaacaacaaagccgtattgcaggcagacaacggctccatccaattctcacgggagttgagtgccaatgagctgagccgcctgtctgccacgctgaacagtccgggactctcggaagaaagcaagcgtatgcgtgtggccgggatggtcaatgccctggtgctgtcgcaacaggcttcgcagaacttcgagcagggaatgtcggaacaacagagccgggaggaacaaatcaagagataatgaaacgcgtgatgatggaaataggattgttgtttgtcgggttgtccatggcagcactgcacaccctcgtatgctacaaactgttcggcttggtggcgacactcgtgatcataggggtgcaggtcgtcatcgccatcgggatagtctggattaaaatccgtgcgcccgactaagac

SEQ ID NO: 10909 - DNA, 224 bp, Unknown
  gut microbiota DNA sequence
acaaggcccgggaacgtattcaccgcggcatgctgatccgcgattactagcaattccgacttcatgcaggcgagttgcagcctgcaatctgaactgagatgatttttcgggatttgcttcacatcgctgtgttgcttccctctgtttgatcaccattgtagtacgtgtgtagcccaggtcataaggggcatgatgatttgacgtcatccccaccttcctccgtt

SEQ ID NO: 10910 - DNA, 1128 bp, Unknown
  gut microbiota DNA sequence
atcaaaaacaaagtataaagacagattgtttattgcacattttaccttacagacaccgtcttctttggtaaaaggtatttcaacagtcttttcctcatatagggatgtatcttgtgtcttgccttctatttctgattcaaaccgtttcttatattgcgctatcatttccttgaactctggcaattctcttatcggatttaggtcgtcatccatttcaagatgagcaaaacggcgataacctttttccaatgccgttcgcataaattcaatagccttttctaattcgcccattcttgaatgcaaacaagctgcatcataatagttaccggcattatccgaatcattggcaatcaccttgtccataaattcaatggctttttctttttggcctaatccccaatatgcgtattgagcgcaagaactattacttggaatagtatcgagttctataacttttctatagtctgcttctgcggatttttttatctcctttcaggatgtacatatcacctcgtcccaaatatgcatatgcataatctggctgcaaaactatagccattgtataatcctcaatggctccgtctgtgtcgttgctattgtccttgaaccagccacgacgatagtaccctccaaaataatcaggataatggttgatatatttacccgactcaacgatagcgtctttcgtattcccggattcatacaaaagatctgctttttccatcacataatcaaagtctgtagaatccaaggcaatcgcattatcaatatgatccaaggccaaggaaaagttccccatttcgctatggcattgtgatatgcgataggcgactacatcggaagcatctttattatagcaacttgtataatattcaatggcctttttataagcatcagtacgttcgtgtacaattcccaaacaatagagccaatattcattattgggattttttgcggattgcacctttaattttgctactaacggaatcatagcggaatctgcgacttgctgcattaaatgaaatgctttattgtcaccgtcaatatctaacgctttgataacatcatcaatagctttgtcgtattgttgtagcccaaaataactttcagccctaaaagaataccctg

SEQ ID NO: 10911 - DNA, 4189 bp, Unknown
  gut microbiota DNA sequence
agtctgtttataaaaattattattacatttatcatttgtaataatttaaataatgtatcatatggcagattggcaaaccttgttatcttgttggcataaattggaacattatactccggcagaacttcctaaagataaaagcattaaacaacttcaagaaaaactgccatggaatttgccatttacttccaaagacgagaaaaagacaatcgtgtacacgatatattttgacgtgcatcctctttctacggcgttagaatttgttcgggagtattttcaagatgaatcgttggttgtggaggttaataagtcattgatgtattatgcgtctttaaaattgaacgagcagggaaggtacattcaaaattcattaggcatatctacttttccatgggcgttgcatcagttggaagagggaaagcttcagtctgattcttggagcgaaagttttcaaatgatgtgtacaaatcttttggaacatttagaacagaatcagaatgagttggaagatgattttattagttatctttcagaagtacagactttagataatttgcgggagattcaatctattattagaaagaggctgggatggaagacggatttagtggggaatatttgtatgaaggcgaatgaagtatacaaatctgctgtaaaagaagatgatagttcgaattctgatttgttgaatagttttttatttcagatatagaacgggttatatctgcatttcaaagtaaaaacgtgggaaaatccgtacaagattatattcgagggtgtttgaatgaaagcttcaagcacgaggatttgagagagaacccggaaataataaagtcttgtttggtgcctaataattaccctgaaggatgttggccgtcgaaatataaagctagtttgatgcagcaatttgctgttaacatgatatatgaaaagttggtcgagaaagaggaggagggcgttttttctgtaaatggtcctccgggaacagggaaaacgaccttgctgcgtgatgtcatcgcgtcgattctggtaaaacgggcaaaggttttagtgcaatatgaggaaccggcggatgctttttgtaaaatagggcaagttgctattagcgatgaatatacaccttttatttatgaaccggacaaagcgatttgtggggctggaatggttattgcttcttctaataatggagccgtggagaatatttctaaagagttgccattaaagaaagaagtagaaccgtacgcgaatagtatggattatttccggacggtttcagagacgtgtttggataaagagtactggggcgtaatagcggcgactctcgggaataaagaaaatcgtcgggttttagtgaatcgtatttggtcccgatttgagcaagaagagtccaatgttacgttggcggattacttgggaaacaataagatatcaaacgaggagtggcaagaggctaggcgtgtttttcgtgaaaaattgcaagctgttcaggttgaaaaggagcgtctgaatagatacgtaaaggataacgaggcgtgtgaggaaaaacgggaaaaatacctgtctttagagataaaacttcaggaagcccaaaagcgacgaaatgatctcgtgaatcagaaagaaaagctagaaaaagagaaattgtttctggaagagcgaatgcgggagctcacgtttaggtgggagatcgtaaaacaaaatcgtcccggattttggaaatcgttaagaaagggtgtgaggaaacaatatcgagagacattgaatgagatgttgaaggctttggatgaagtgaccggtggaaaacaaaagtgtgaaaaggaaatattgtcttgcgaagatcagattgcacttttgaaaaaagtcgatgttgagtatgagaattgcaggatggaacttttacagctcgatgaaaagattggtattgccagagaggagttgaatgcagcgtatgctgacagggatttttgggaaaatatagagtctcatgccacgcaagaagcttgtccgtggtactcggatcgattaaaggaattacagtccgaattattcgtggcggccatgcatgtgaacgaaatgtttattctgagggctaatgcgaaatccagtaggatcaaaacaactcttgacggttttttccagtatttgaaaggtggtacgttggtttcctcggaagaaatagaagccatgtggaagactttttggttagtaattccggttgtttccaccacattcgcttccgttagccggatgtttgcagatttcgggcaggggagtattccttggttatttattgacgaagccgggcaggccgtaccacaggctgcgcttggtgctatttggcgggcacgaagagttgtggtggtaggtgatccttttcaaatcgaaccggttgtgaccataccggaagtcattataaatcatatgaatgattattttaatttagatcggagtcaagtgcatccttctttgtctgttcagtctatggcagatagggttaatcagtacgggtgggtttctaatgacacttggattggggttccgcttcgtgtgcatcgtcgttgtcttgacccgatgttttctattgcgaataaaattgcctatcaaggcatgatgtataattccacgataacaaaagaacctgaaatacggttacagacttgttttttacatgttacgggacgggtggatggacggcattatgtgccggagcaaggagagcttgtattaaaattgttgctggatgaaatattagggtcggacaaattacctgatgtatttgtgatttctcctttcgcggaaatacctcacaagttgaaagtaaaattgcaaaaatctttgcaagaggttcttaagccggacaaggagaatagtaatgttttgcatgattggttgaaaagtcatgttggtacagtacatacttttcaggggaaacaggcttctggcgtgattttgtgtttggggcttgatgaccaatccaagggagcagcttcttgggcttcatcgaaaccgaatttgttgaatgtagccttaacccgggctaaacaccgctttgttgctatcggggataaagatatatggctcaagcagccttatttctcggaattacggctgcttggtgtatgcgaagaaatgtagtaggctattttcctgttattgctacctttatgaccccatcgagtttgttttcgaaaatgcgataagcctcttcgatttcatttaggggaaagcgatgggtgatgagtggggtggtatcaattttaccttcttctatcaaacgaaggatttcggtacaatcgcacccgtctactcctccggtcttgaaggtaaggtttttgccatacatatcgggtaacggtaaaagttgcggtttgtcgtagagggcgaccacggttacaacggcattggggcgagcgcattcccatgccatgcggaatgtgtcatcgtttccggcaacttctagcaccacgtcagccccgccatggtcgctatgctcgaggacgaactctttgcattttcccggtgtggtcaccagtacattggggtagtgttcccggacaaactggatcctttccggtgattgttcgcagacaataattcgttttggtttctttagcatcacgcaaagcaaggtacatatcccggttggcccggccccgatgacgagtaccgtgtcgtcttccgtgatctccgaaatacgtgcagcccagaatccggtggcaagtatatcgcccacgaaaagagcctgttcatcgctcaccgtatcgggaatacgattcagtccactgtcggcataggggacacggacatattcagcctgtccgccgtcaatgcggcaacccaaggcccatccgccattgggatcgatacagttgttcacgaatccttttttgcagaaaaagcactctccacaaaaggtttccacgttaacaatgacccggtctccgggtttaacggtcgtgacatcggttcctgtttgttccacgattcccaccatttcgtggcccacggtaatgcctgggacggcacgagggacactcccgtgtttgatatgtaaatcactggtacagatacttccaagcgtaacacggacgatggcatcccgtgaatcttctatctggggaatcggcttctcttggagtctgaaatttcctttgctgatgtaggtgtatgctaacattggggcgtaatt

SEQ ID NO: 10912 - DNA, 148 bp, Unknown
  gut microbiota DNA sequence
gtacgtgttgattcgtgacaccccgcagtcctgcgggttaccgacgatagagaaatggcggaacgattaccccaagaattacagcgagaaacaggaagaggtcctcaccacgagagagattttcttcaagtacgtgctgaataacaag

SEQ ID NO: 10913 - DNA, 895 bp, Unknown
  gut microbiota DNA sequence
cttaaaagggacatggatgccattggcgagcgcacggaggagttgaaaggcgaagcctataagtacatccgtgaaatccattccaacgtggatgtgctgctcaaagatgtaatgttggaaacattggtcagggagcactcggcacgattgggagaaatgggactttccgaacagtcccgatttgacggttcattactgcaaagcctgacggaacaaggatcggaagtgatgcactgcgccacgcttctgtttctcggaatggtcaatgatgccactacttttgccgaaacgcatggcggtggtggaagctccagtgaccttaaatggggacgggacgatgacgaggacaaccgggcctgggcaagacggtgtatgatgatggcaagcaagatgatgtgtccggcttccggcaaaaagcagaaacgataatcggcaggaggtagtttcctgcatcggatgtgaaatctataataacagaaaacgtatgagaaataaaatagtatttgtaatggcaatggcaggaatgtgctgcacactgcaagcgaaggcgaatgtacaacctgtcccacaggatagtgtacactatgaatcctatatggagaaggaactgatgtttcaaaccgcagagccgacttatcacaagggagtgctggtaacttcaccatggaacggcaactggtttgtcagtctgcaaggtggtgcaagtgctttcatcggcagaccgattggctgtgctgatttgtttgaccgggtacaaccatcgttatccgcatcagtcggcaaatggttcactccacagatcggggcaagaatcgggtatggaggttggcggttcaagggctgcaaccttactgccaatgactatcatcatttccacgccgacctgatgtataat

SEQ ID NO: 10914 - DNA, 384 bp, Unknown
  gut microbiota DNA sequence
ttaaaaccatactatgtagagttaatttacaaaactagcatcaaatcaacagacaggataagaataaatgatgcaggtgatgtgtatctgctggcaaaagagattttagaggatagaatggaacatcatgaggaagtttacttgatcttgttaaatcaagcctcaaaaatattgggtgtggctctagtaagtaaaggaagtgtcaacaaaacagttgtggatataaaaattatattccagcatatcatcctctccaactcttctagaatcatattatttcacaatcatccttctggaaattgcaagcctagtaaagctgatgatgaattgaccaaaaacataactcaattatcatctttagcaggagttgattttatagatcac

SEQ ID NO: 10915 - DNA, 759 bp, Unknown
  gut microbiota DNA sequence
aaaagagaatagaaaatgttttttacaatttattgaatgtcaaatctagtaaaccaattttaggaaactacataacgtaagggcggactattgtagaacaatcacgtggtggcttatccctctttgaaatagagggcaaaaaataatacaggataagaaacatcccgacttaattcttcccgtaggaaagcataagctttcttcacatgatcttttacagtgttcaaagaaattcctaatagatctgcaatttccgcgtaggatttagactctatcacacatagttccaaaaccattttacgcttcgccggtaatttatccaataactttcctacatcttctataaattgttcgggatcttcatcatcatcttgtacttcctgcaacaagcaatactgtttatatttatctactacttgctgatgttccagatgatttaaacaacgatttttcacggataacaatagatacccttcaaggttctggacattttttaattctcctcgtttttcccacaaacgaacaaaaacttcttgtacaacatcttctgccacagcaaaatcattagtataaaacgttgcctgctgcaccattccaacatacgacaaatcaaacaaggatttaaattctttttcatccccatttattaaacgatcttgatttattggaattttcgatgtcataaaatgaacgtttaatgatagcccattggggtaacgacgttcaagtataacaaaaattgtgtgatttataaatatc

SEQ ID NO: 10916 - DNA, 3109 bp, Unknown
  gut microbiota DNA sequence
attacattaccatgcgggaagaattattcggtccgatcttaaccgtttacgtttatgatccggaaaaagtagatgaaacattagatattctggataagtcatcagcttatgctcttaccggagctattttctctaaaaatcgtgccaacatcgaggaaatgacagaacgtttaactcacacggccggaaatttctacattaacgataaaccaacaggagctgttgttgaccagcaacctttcggtggtggtcgtgcatccggtactaatgataaagcgggaacgatcttcaatttattgcgttgggtttcaccacaagccattaaagaaacgtttgttccggtaacgaactatatgtatcctaatttcttggaagaatagagcttttaattctccatacaagctgaacgtcatgtacgttcagcttttttcttttttagaaaagctgatacttccggttcacggcataaaaagtttctcgcgatacatgataaattcgacagacagccgacacggacattccctcttcaagcaaatgactaatctcttctcggttatccaacaacacgttttgtttcccttttcctggcgggcgccccaaacgtactccctcggacttccgatgagctaaagcctctttcgttctcatcgagatcagattatgctcgatttccgccaccaaggcaaaagcaaaagccaagactttactattaatactattatcaaaagcataaccgtcttttgtactataaaccgttatattcatttcaagacaacgatgaagtattgacattatgtctagcaaagtccggcttaatcgggataattcagtaacgattaggatgtctcccttcttcaaacttttcaacaatcgacctaatttccggtcatgctctttctttttgccacttacaacctccgtaacccaacggtttatagtcaaattctttcgtgcagcaaacttttcaatctcttctttttgattctcaagatgttgttttcctgtgctcactctcaaatatgctattgtcataattcttccgcattataaaataaattaaaacaaagacattaataatcattttatgaaataatcagaaacacaaatataaataaacaattacacaggtgtcaagtaaaacgttcattaaacttgacactgctttttgcacgaatgataagatttatttatataccttttctttcgtgtaaaggtcttgttagtaatatttttgcaagaattcatcatgtttctcctaaaatttggtatatttgtctagtaaaatgaacgtttagtctgacagattgttttaaataaggcgttaaatcatatgaaaatcgaattcacattcaggatgtagaattatataacaaattgattatgaacaaaagagaactcactaaaaaagtagcagaaagaagtggacacacccaagcaacttcagcattaatcattaacacctttatcagttgtatactggaatctcttgaagcaggtgaaaaagttacgattcaagactttggaactttagccgtaaagcaacaaaaaacaagagaaaggttcaatttgatcaccaaaaaagtggaaaaatattcctcttacgattacatcaagtttataactagtaaatcgttaaagaacaaacaaaaagcaagaagtttagaagcaaaaaaatagagatacacatgtatctctattttttgatagctttatatcattaaatgattacaatgtgttcttgatccgttaatttctcacaatagtgacatttcaacacgataggcgaactcccgacaacatcaaatttcgtacgaacattctggttgttagtaatacatttcgggttcacacatttagcaattccctccactcgttccggcaccataactgcttttttctccgcaacttcgaaatcttttattatattgatttttgctgtcggggcaaccaaagccaacttgttaatctcgtcatcttttaagaatttattccaaatcttgataattcccttcttacctaatttactactaattaggttataaccaaaagtgactgtattttccagattttgaatccctaacacgttaatcacgtcaaacaatttctctgcaggaatatgatctattaccgttccattttccacggcactaacctgtaattctttctttgctgccatatctttttatcctttaattaccattttaaatctaatgctttgaaaataattgcttgacgagtgtataccccgttcaaggcttgctggaagtaatatgctttcttgttatcgtccacatcttcgctgatctcattcacacgaggtagcgggtgaagaatcctcatgttatcttttgttcctgctagcatggaatttttcaagatataaacattcttcactttctcgtactctaatggatctgcaaaacgttcacgttgtacacgtgtcatataaagaatatccgcatcattgatcacatcatccagctcagtatgctcgtaataagggatatgcaagtcatccaagaacaacttataggctttcggcatttccaattctttcggagaaataaagtggaagatcgggttaaaatgactcatggcctgtaataaagaatgaaccgttcttccgtatttcaaatcaccgaccatgaaaatattcaaattttcaagggttccctgcgttttatagatagaatataaatccaacatggtttgagtcggatgttgattagcaccgtcaccagcattaattaccggcacatcagccacctcactggcaaaacgagccgccccctccaaaggatgacgcatcacaatcaagtcgcagtagttatccaccatcttggtcgtatctttcaatgattccccttttgtcgtactagaggatgaagcatcggaaaatccgacaatacgacctcccattctactaatagctgtttcgaaactcaaacgcgtacgagtagatggctcgaaaaacagggaagcaaccaccttaccctctaataaattacgattgggttttttctcaaattcagaagctattttcaatacttccaaaatgtcctctttcgagtagtcggtaatggatactaagctacgtttattcataatt

SEQ ID NO: 10917 - DNA, 160 bp, Unknown
  gut microbiota DNA sequence
gacttaacccaacatctcacgacacgagctgacgacaaccatgcaccacctgtctctgcgtcccgaaggaaacacatatttctatgtgcgtcgcaggatgtcaagacttggtaaggttcttcgcgttgcgtcgaattaaaccacatactccactgcttgt

SEQ ID NO: 10918 - DNA, 3278 bp, Unknown
  gut microbiota DNA sequence
acgcttgtcatcctctttcttgtagagcttcggcgagaacttttgaaggtaaaccgccgggctcaacaacacggtccagcgacgtaattctttcttcccgaaaaaattgttcacgttaaaatcaccgtgcaggcctaacgtgaaatacttgatcttggtataaatatcgttataataggcaaaaccggtctctggttccgtgccataataagattccccgttcgaataaatcttaaacgctttctcccattccttggcacttccctttccttgacccatgtcgaccgtcaaggacaaaccgaaagtcggggtaaactggtaaccgagttgtaaaccaccttgtcctccgatgtaggttttatctgccgagaaggaaaccatgtccccgcggaagacggagattcccccgttcacgccaaggctccagcgggaaaaatcattatacgcctgttttttttgatcctgtgctaccaaaagggaagtaaccatcagaaagcaaaaagagaatactatttttctcatacctgtaaatttaaaataattgattagaaaggggtgcctggaatcagacacccccattctcctggttgcaatcaataatgaacatgaaatttcattatttatttttctttgtcaagatacttttagtttccactatttacctttacagttactgtcacaacttgagattcctgtactccccatgcatttaccatggaagctttcaaggtaaccgtcatcggtttcacgatagcagctccacccacgttattccattctaacttattatcgttcgtgatagataatttggtctcgttctctacttccacaccatcaacctcaactttcacgatagcgaattgaatagcttccaaaccataaatagtagcgtaatcacccttaatagctccggttgcttcaatcaaatcatcaccgaaacgatctttcattaccaatccctccgttaatgctaaagattgtaccgcagcggcattatccgtcaaagttttagctgcgaatgtccaagtcaaagctttcaccggattcacgaatttagcatcgaatgacgtcaattctttttcaataccaccaacaccgtaagtaagcaccggaatcatggatacaatattgtttgttccgtcaaattcttcgccattccaagtcaatttggtagcgttcaatgtaaccgtagccgcttcagtcaccttcttgaaagagagggtaacgccatcaggaagaatgtacgaattataggcatccaacaaattaccttccatcaaatatggattagcaccatcttttgaaccaacaattaacatttggttaccttcccagaatgccggtctcttcacgagcaacccgctaagatctggcatagtcaaatcaatcgttgtagagaatttaataaccgtaccattctgcaacggaatatcgatagtcaaatcgtaggttttccattcagccgtgagcggggcaacgatacgaagtcctttgtattgaactgactcattagctccgtaccacacgaatttaacaccattcgcttgagcggcaagattcgtggcaaattcatcgtcaaccaatgccaagaattcatccaatgtagcacatccagcagccgtgtaaagtttcttttggaaatcctcagaagaagcagtagccgagccgaagtagaaattcacattttcatttgcccactctttcgtggctccgttttgtccgaagatctcgtcattcgcgtatttcaccactatcggttctgcagttacggtaatcgtgtaagtacctgaaacaagctctacctctcctaatttggcaacaacattggcaatacacttattcccaatatagttagtcttagcctccttcattttcacggtgttgtccttgtcttcaaccacgaaacctgcagcgtcagcggtagcaatagtaactccagcgtaattctcatacgtgtatgttaccgtgtaggtcacacctgaaagatcaaaattcatattctccaaaagttcatacccatcacaaagtttgatctcgctattcaaatcaacgatttcatcactattgtaagctagctcacggctttcgtctccttcagcgttatgaagctccaggtcggacgtgtaaatgcccgcattatagatactaatagcagtcgtggtgtaatcaatacccactttgtcgttttggacttgcaggaatgccgtccagcctttacgccagctagaatataattcatcactcattcctttcaaggagacatttaaagagaaaccattgtcaagatttttcattccattctcattgacaatcaattccggggctgtagcccgtcctaaacttacggtttcttttaatatgaaagaaagattttcttccgagatattaggtctggcggcaagcggagtcaagatgaaatcaatattcatattactggtcaacaaaccaactttctctcccggggttgttttatcatcaaacaatctgaacacgggcacgaaattcgctaatcctcccaccgaataggtcgggttaaacactaggctctggatataatctactgatttcgggagatagaatgattcgtatgcttctgtttcattattccaaacgttcaatataaaagcatctgtttcttcaaccacataagcagaatgaatatctacaacattcaacgctttcactccagaatctttccatgctttggtttcatcgtcataaacagcccagttgccgatagccgtaagaccgttcacatctgcctctccaataatatacggcgattttcctgatactccgggggttccaggctctccgggttgtccaggttctccgggagtcggaacaggaactttcccaactttcactccgttctggtctacaaaccaatctacgccatcgatagcctcgatatgcaacaccggagaaactccatcgataccattggtcccatttgttccattagtcccatttttgatcgtgacaacatctccactacccaaggtaattttaatcccttcggccacagtttcgactttctgaacatattgtccatccttaattttctgcagaatatcatcaatctccttcttgttggaagtgatttgttcctgcaaatcttttatatcgtcatcgtaatccttacaaccgacgaaagttggacttgcaagaccacaaagcaaagcacccaaaagtgccaattttgcaaaattccgtttcttgttcatactttaaataaattatattggtaattaaaaaatatcaagtcaccccaaagt

SEQ ID NO: 10919 - DNA, 7536 bp, Unknown
  gut microbiota DNA sequence
aataagttatttttgactgttctattacaaaaataaataaattggaatttacacactttttgaaacactatcgtgtgtctgtccgatatgtgctttaaaaaaatggaaacaaaaaagagtcccgaatatttactcgaaactctttttcttggcggtctggacgggactcgaacccgcgaccccatgcgtgacaggcatgtattctaaccagctgaactaccagaccaaaatgttttcaaaaaaggcggttcggacgggactcgaacccgcgaccccatgcgtgacaggcatgtattctaaccagctgaactaccgaaccttttttgcatcaagtaaccgctgttactctcaaatgcggtgcaaagatagatagtttttcttattatacaatatttcggccctgaaaaaatggaaaaaaatgcatttttattacggaaggaaatattcttgaaggcccgagaataaagggatacggattgtttacgttgaggatgaatgggttattaataaaagtaataaagtataggctaaaatttcaatttacggttttggagtttaattttttccttatatttgtggcacataataattgtcaaatttaatttaacttataagataatgaacgtacctgcagaattaaagtacactaaagaacacgaatggattcgtgttgagggtgaagaagcatatgtcggaattactgattatgcacaaagtcaattaggtgatatcgtgtttgttgaggttgaaactgaaggtgataacctagaggctggagatactttcggtagtattgaagctgtaaagaccgtttctgatttgtatatgccggtttccggagaagtattggaattcaattcagaattggaagatcaacctgacttggtaaacaaagatccttatggaaaaggttggattatcaaggtaaaaattgaagacgaagcacagttagatggattgttgagtgcagacgcttacaaggcttctatctaattttattgataaagaggggactgtatgtgttatctcaaaaggataacgaatacagtccctttatttttgttttgtggttgcaaatttcaatttttaattctatgacattaataaaatctatatccggtatccggggaactgttggtggacgtccgggtgataacctaacccctttggatattgttaagtttgtttcggcttacgctacttggttgaagaccggggctgggaaaacgagagctaaaatcgtgttgggacgagatgctcgtatttccggggagatgtatgctaaattagtagaggctactctgtctggtttgggacatgacgtggtgaatattggtttggcaacgactccaacaacggagatcgctgttactgcagaacaggcagatggaggaattattctcacggcaagtcacaatccgaaacaatggaatgctttgaaattattaaataaccggggagaattcctttcggccgaggatggggctcaagtacttcagatggctgaacaggaatcgtttgaatatgcagaagtggatgaattgggttctattatccataaagattacacggattaccatattcaacacgtgttggatttgaaattggtgaaccgggaggcaattgccaaagccaacttgaaagtcgtcgtggatgcggtaaactctgtgggaggaaccgtgattcccgctttattgaaagctttgggagtgaaagaggtggtcgagttgaattgcgaacccacgggacgttttgcccataatccggaacccattccggagaacttaatccagatttcagagaaaataaaggagtgtggggctgatttaggtatcgtggttgatccggatgttgatcgtttggcattagtctgcgagaacggggagatgttcgtggaagaatacacgttggtggctgttgctgactatgtgttgaaacatactccgggaaatacggtttctaacctttcttcttctcgtgctttacgggatgtaacgttagctcacgggcaacaatataacgctgcggctgtgggagaggtgaacgtggtgactaagatgaaagagacgaatacggtaattggtggtgaaggaaacggtggtgtcatctatccggaaagccattacgggcgtgatgctttagtaggagtaggcttattcctttctcattttgtggcggaaggaaagagcatgacggctttaaaagcaacttacccgcaatattttatttcgaaaaacaagctaacactttctcctgatatggatgtcgacaagatattggagggcttgaaaaagaaatatgcttcagaagagattaccgatattgatggagtgaaaattgacttcaaagatggctgggtacatctacgtaaatccaatacagaaccgattatacgaatttattccgagtcgaaagatgaagcagcagctaatcaattggcagaagaagttataaaggtggcacaaagcctgtattaataaaaaggagcctttttcgaggctcctttttatgtttttattctttccctccaacacaatatagatcaataccatattttgcaaatgcttctactagatagtcgcatttcttttggatctgcgggtaattcgtgtagagaggatttgcctgtaactcgctcttggtttgcgagaagatgaatcccaaaaaagaataaaagtcattatttaagtctggtgcagtccagtaatagggttcccagaaataccagtatgtaccatattctaaaaatcctaatttgtagatatcttcttctgtataccataagttgtcggaagagtagggatttgtggtaccgcttttagcatcttctgaaatgagtgaataggtggaaaaagtatttaaaatattattatagtcaattttggtgataacatcatcatagggttgcattagaaactggatgaatgtacgattgattgctatttttagtcttttcctgtattctggcttgcttattcgttctccaagttctttatccacgtgaggtaacgtgatatgatcaactcctcgtacgagaacccctttgcgaaaactaagattaccataactgattgtatcccataagggaacatagttgccgttttggtaaagcataccagccatgaggattttagaagggaataattctttcttgactttgtctgaatacaagtcaaagaaatcttcttttaagaattttacagcagcacggatacctttttcgtcagcttccacttttacatcataattaacatcgttactgctagatgtgaaatgataattgatatcagcattggagaatttatataatacggcagtttcataatcattataccattccacaatttgctcatcgaaatcatgatttccttgcggaagatcaaatcgttgtgttttcttctctgaaatttttaaatcatcctctttttcacaagaacatagaatgaaaatgaatgatattccaaacagtaaaatgtataaatttatttttttcatgatattctgttttgttagtttaatgcaggattactctctttatggtgttgcataatgggtaacatccatttaggtgttgctgttccaatttcaacggaatgttcatcaccgggattcgtagactcatcaagtctatgcgagaaagattgcatcccgtaacgtcggaggtcaaaccaacgcattccttcgaaacaaaattctctacgacgttcttctctacagttttcgattagattatctgcattgttgttaaaagttgagtttgtccacgcttgggatgcgtagttttttatacgtttttctcttatcgtgtttaaatcggataatgctttcccaaagtattcgtttccacctattttagccaaatttgcataagcttcagccctgtttaaataagcttcacttagacgtaggcaagctccgaattttaattctctagcgaatttagatgatttcttctcgtctcctgcctcaccgtaaggacataaatatccattccagcgttgatcctcattggaataacaattgcgcaattgatcggatgccataaagcatttagcgtaataatccgatgtaacaacttcatgctcttcctcacttgcatagaagaatagtatttccggattatttaaagtgaaaggatgtgggaatcctcccgtgttaattgcgttaggataattaacattagtcatgtcgaatagtgaataggagttaccgggagctgagaatacggctgttgcatgctctacgactttttcccagttttccatgaaaagatagtaacggctagccaataaatgagccgtactgattccaatacggaatttggaacctgttgcattgacttcggttaatagattgattcctttctctacatctgaaataatcgtattgtaaacttcggcaaccgtgctgcgtggtatggaagtttggtcaatcgtgctgtttaactttaatggaactcctgctgattttccttcgggtgcattaggtgcattataaggataggcataaatgttgaccagattaaagtagtagaacgaccgtaaaatgcgggcttccccctcaactcgttttttcgttttttcttccccgtcaacatctcctatcatatctatgactacattacatcctgcaatcattttgtagaatttttcgtatgagtcaacctcgataatagggctattatctgtaggatttgtcaagttcatgtagtcttcgaacatggtttcgttagttgttgcggtgcgacctccccataaatacaggggactgtacttcgttacgattgttttttgactattgttggtaatgtactgggttacatcatcgtcaagcaaatctagaaaaggcattagttgggtttcataacggggatagccttcataagctagtaattggtctagatcttcaatcgttgacggaattacttcgtcttgggatgtttctttcagaaaatcattgcaagaacacaacccgataattgatagaattatgatacttttttttatgatatttttcatactttgtcgtatttgggattaaaaaccaaggcttatacttaatgaaaacttacgttgacgatcgactaccggaataacattggtagcacttgtgctgagtgtttccggatcttgtttaccaagttttttacttttaataatgaaagggtctgttaccgtcaatgcaaatgtcagatttgtaagctttatcttatctaattgatttttaggtagagcgtatgccaagcaaatgctattacatctcaaatggtcggcctttactactcgtaggtctgataaattgtacatttgataacggtatatttctcctgaactacttaacgacaatgaattgtcaggtaaatattggctgagatcttcatcactagctaaaatagcgggtatatccgtgtatttttcatctccagcttgacgccaacgtttatttagttgagtacttgcattcttttcgggatcgggtatacgtaattgcccgacacgaccaccgtttgactggcttttcataaagggatttaagcgcttgtgatggcctaattggaaattgaaagaagcggagagagttaattgtttgtaccggaacgaggttgatagtcctccactaaaaataggatcttttacaccactatacaccatgtagtcaagtagggttccggtttctacttttgttttaaccccgggagtttggtctataatagcaaaattgggtgttcctttgtctgataggccaatgtatgggaaagaccagaagctatttaaggcgaaaccgtcaataataacactcccgtctgtgatttttcccagcgtgatgttgtcttcgttatctttgatttcgttacgattgaatccggaagttgcgttaatactccatctgaaatcttttgtgtttaccgggataacggttaaagatatatcataacctttattgataattgttccattatttacggccatattaggagttccgttttcgatcggaatgttcatataagtgatggcgtctatcgttttcttgtaataataatcaatacttccgtatatccggttatccaaaatggaaagttcaatacctccgttgaaactacgtgttttttcccatttcagatctttgttgggtaaatttttaatagataagtattgttctccagttaatatatccggggctatattgaaattggcaatcaggttggggctaatatccggggctttaccctgtgttccataggaagctttcaaggtaagattagataaccagccgaatcggcgcatgaaattttcctcgctaacattccatcggattccggcagataacacgggattgaaacgattatttgtgttttgtccgaatttattggaagcatcctgtctaaaactgaatgaaagggtgtatttcgttgaatacgtgtaccccaatgtggcataataagagaggtaattctccgtttgatcggttagcttggtagaatgacgttctctataagatgggacatttgccgtttcacgatagttaatatctggataaatatccaaaatgtaatctttattggcttgttgactataatcgtaatcaacactttttcctctatcaggcatatatccatattccgtaccttgttggccgatataactatttcctctgatttcgtgtcctaatgctatattaagagcatgattcccttcttcatctagtatttttccatagttgagttgattacgtaccgtataactctgttgattcgtattattgtagtttagaataccaccatagggtaatacagacgctaaacttaaccatgaatcgttttctccggtaacaagttcaccataattggcgcctctgattttagatacggcataagagtgatcatctgcccagatattggcttcagaactattccgtgtaaatgcagttgttaattcatattttatttcaggtgtaatattccagatcaaattacccgtgatttggaatttggtattcttattttcgttcccggtatgtttcaattcattcaagaagttgtagcgaatttctctttgaatagcggacccgtcatccatttggaaataagcctttgattcattaattacataccattcattgggagcaataattctactggtatttaaagcgtaatcttccgggtttactcctgtatagtaagcatctgtttccgattgactggctgaaaattgaaattttgtccgtagattgtcccgtaatttggcatcaacgctaaaatttatggttttattgctttgatcgtttcctttgtaactacttaatgatttattgaatcccacggaaccgtagaaatttaatttgtcattccctccgcttaaacttaatgaatagttttgactgactgcgttacgggataagagtttaagccaatttgtattctgtttttccatttgagtgactttctggttgaattcattcatggaaatttctttattgattaactgaaggtaagctccttcgtatcccacgtgttggggaaatttagagaaaggaact

SEQ ID NO: 10920 - DNA, 1250 bp, Unknown
  gut microbiota DNA sequence
ttattaaattatgtagcacaaatttatggaaaaaaagcgaaactgcgcttggtcatgctattggatagcattgcgcaaaatgttaatgtttacgaaattattgagaatcttgttgtttgttgtgtatatatttttgtctgctagaggaatagctcaagaaagagtcgtgtcagagaaagaaaaatccaaggtcctacagggatgggtgtatgataaaaaccatcaagtcctgcctggcgtaacggtgaaagttgccgggacgtcaatagggacttccacgaacgtgaaaggttggtttaggataaccttacccatgcaacggggtactttggagttttcttttatcggttttaaaaagcaacttgtaaattttacggataaaacggatacattacgaatcgttttagaggaagatttgatggagttggatgaagtcacggtatccacgggatattataaagtggataaacgtcatttgacaagttccgtgaccacgttgaagatggatgatatcatgcagccgggagttggcacgttggaccagatgttggaaggtcgaatcccgggaatgatttttatgcagaatagcgggcaagtgggggctgtgcccaaaatgaaaatacgaggaacaacaaccttgttggggagtaccgcccctttgtgggtgttggatggtgttattttaaccgatcctgtaaacgtggatccggcgagtattaatgatttggattttgtgaatttgttagggaatgccatttccggtttgaatcccgaggatattgaaaagttggacgtgttaaaggatgcgtctgccacggctatttacgggcctaaagcttctaatggtgttatcgtgatcaccacgaaaaaaggaaaggtcggggcgccctcggtttcttattctttatcgggtacattccggcaacgtcctcggtacacggatcgttctgttgatgtgatgaattctcaagagaggattgatttctcgaaagaagtggtaaggaaaaaacaagttattccggatttatctagttacgtgggatatgaggccgcttataacgattacgtgaatggagtaatgtcttctgatgaatttattcggaaagtaaaatttatggagacggttaatacagattggttgggattattaatgcaagatacatattctcacgcgcacacgttgagtgtttccggtggttcggagaatgtacgatattacacttcgttggggtattcgaacgagaatggta

SEQ ID NO: 10921 - DNA, 458 bp, Unknown
  gut microbiota DNA sequence
aattacagcgagaaacaggaagaggtcctcaccacgagagagattttcttcaagtacgtgctgaataacaagatgttgtggtttatcgccatcgctaacgccttcgtttacatggttcgttacggttgcctggactgggccccgacctacttgaaggaggcgcaagggtacgatattaaagaggccggctgggcttatttcgcctacgagtttgccgccatcccgggcacgcttgtttgcgggtggttgagtgacgtggtgttcaagggacgccgcgctatcacgacgatcatattcatggccctggtggccttgtttatcttcctttactggcagttctcggataactacatgattgtcacgctatccttgatcgccatcggtttcttcatctacggcccggtgatgcttatcggggtgcaggcgcttgacctggctcccaagaacgcggccgggac

SEQ ID NO: 10922 - DNA, 145 bp, Unknown
  gut microbiota DNA sequence
aggagcgtttcggcatcgatataaaaaaaactacgaggagatgttatccggcgggtgcttgaaggaagtgcctggcgtaaagggcaacgacgagtagccttgttgtgcggtcacttcggctacagcaagcaggcctactaccgcg

SEQ ID NO: 10923 - DNA, 1180 bp, Unknown
  gut microbiota DNA sequence
tgaatcaaaatgatatagagaatattactattttaaaggatgcaagtgctacttctttatatggggctcgtggggcaaatggagtaattgttattacaacgactttagcaaatgcgggggcattaacggtatcttatgaaggacggttgaatcttcaaattccggattttagtacttatgataatttaatgactgcatctgaaaaatttgaagctgaaaaattatatggggtgtgggataatttgaattcatatttgcccagtggccaaaaaatagaggatgcttataaggagcttgagacggcaatagcaaacggggtgaattatgactggttaaaagttccgacacgtaccggtgtaggacaaaatcatattttgcgttttatgggaagtcaagaaaattggaattatatgttgagtttggcgtatgatgatactcaaggtgcaatgaaaaagtctgaccgtaaaaactttaatggaacaatgcagttaggatatcataagaataaatggaatgtacggcaaagtttatctgtaggtataaataaaagtcaagattctccttatgggcaattttattattatgtacaaatgaatagatattgggaaccgtatgacgaaaatggaaagccggttgattatttttatcatcctctttcaacttatggacccattgataatccgttatatgattatgccgttgggaaatggaataaaacgaaatacactaatttacgcagtaatacggtaattgattttactatttctaaaagtttgaaggcgtcggcgacattagggttgaatcgtaagagtaaaacagcagatacttttacacctccagagcataagtttttccaaaatgtaacagaaatagagaaaaagggatcttttgctcggagagaaagtgaggaaaacatgtggcaagtacggcttgcattgaattataataatattttttcagaaaaacatatggtaactctcggagttagcgcagagttaagtgagactatttcggatgatgtttattggagtgcgacaggatatatttcttctaatgttagtcatcccggtatgtcaatgtcttatccgagtgtgggaggaactagtggaagtgagagtaccgtgcgtagggcatccttgattgctagtgctaactattattatgaccaacgttattttat

SEQ ID NO: 10924 - DNA, 1016 bp, Unknown
  gut microbiota DNA sequence
tttctcgacgacgatggattcgcatacatagggaaggttattcagatgatcctcgatttcttccgggtagatattttgaccactggggccgagaatcatgtttttactgcgccccttgatgaaaaggttaccttcttcgtcaatcagtccaaggtctcccgtgcggagccagccatcgggagtaaaagcagcatgagtggccgcctcgttcttgtagtacccgatcatgagattatcacctttggctaggatctccccgacgatatgtgccggatcgggcgagtctattttcagttgcatacggggtgcagcccttccgcaggagccttttttgaatgtttcccatccagcatacgagaggatcggtccgcattctgtcataccgtaacccacggtatagggaaagtttatcgagtgtaaaaactcttctacctctttattcagtgctgccccgccgacgatgagttctttgaaattcccgccgaaggcatcaatgactttctgacggatggaattcttcactttcttgtcgagtaacggcaggttaagcatgagtttaatcaatggtttttccagtgccgggaatacctttttccggatgatcttttcgataatcaagggtacggaaataatcaggttgggtcttaccgtggagaatgcgtctgcgatgatcttcggggacggggttctcgttaggaaaaatacgtgagccccgctggcaaactcgtagatgaactcgaaagccagcccgtacatgtgcgccatggggagcatggatataacctgttctccgggtaatttcccgaataccccgaaggcgaacgtgaggttcgaccagaggctgcgataggggagcataacccctttcgagaaactggtggttcccgatgtgtagttaataatggcgagttcttccggtttgtcatacgtgtaggtcacgtcttccgggcggaaacggtcggggtatttcttcccgaacagttcgttcagtcgctcccgtgcgtgtgataatgttt

SEQ ID NO: 10925 - DNA, 13014 bp, Unknown
  gut microbiota DNA sequence
tattttattaaaaatgaatagatttgcaaagatgaaaaaagaaaggatttacacacttttggggacactatcagattatttgggttaaattacttctttatccgggttggattagagtaatatcatggacgtgaaaacacagattttccggttgatcaatttttactgaacattgtaacaatccatatcaacgcaaaaggcgactactttcgtaatcgccttccgtgatccagctgggactcgaacccaggaccccaacattaaaagtgttgtgctctaccggctgagctactgaatccttcaattgtgtttctcaattgcggttgcaaaggtatatctttttgtttctctcacaaatttatttcgaattattttcacgcatttttttcatgaaaagagtaaaaacttcattatgatttaattgagtctcccgtttcctcgccataaattcggacaaaagataggaattgtcggtatattttacttattttaccaaacaatcacaaaaaaatcattcatgaatacatcaaaaattctattttctttattccttgtgctatctcttttagtttcctgtgagaaagataacaatcactcggaagacgatgaattagccacacgaatgaatcaattcattcagagcaatttatctacattctacttgtggtatgacgaaataccggatattaaaccggaatcagaaaaagacccgaaagaatatttcaaggctcttctttcctccaaggacaaatggtccctgatcacagatgacgtggacgaatttttagacgaaatggaaggaacgggagaaacttacggttacggacttgcttacgggcaattttcaaacagcaaagaatgctttgcagtcgtccaatatgtctatcccggttctccggctgctgaaaagctgaaacgaggagacatcattgtaaaactgaactcacaaaacctcacggaagacgatctcaacaagcttaccaaacccggaacgctacgactgggcctaggtaaacgagaggggaacgccattggttccacgggacaaaccgtcaccatcacctctcgaaagatggacatggaccccattcttatcacgaagctcttcgaactgggaaatcacaaaatcggttacctcatgtacaccctcttctcaaaaacattcaactccagcatcgcaaaagcattcaacgaatttaaggaagccggaatcaccgatcttgtactcgacctcagatataatcacgggggagatgatgaagcatccacattcttgtgtagtgcgatcgttcccaaagaaaaagccatagaaggtacacttctttccaaagaaacatggaacactccttgccaaaagatatttgaaagtgatccccaatacgatggtttacttaacagattcttcgtggaaactaattgtaacttggatttaccttccaaaaaaatatatattttgaccactcgtgaaacaatttcagcctccgagtacacgattgcctgtctcaaagcctttatggacgttgaactcgtgggaacccaaacttacggaaaatatgtcaccatgtactcgttctccccgcaatacgaagagaatggaaaaatggttgccgatgaagaattggccaactggttaatattccctgtatgctcccgattctccaatatcaacgggtacccgagctccctggaaggcatgattccccaacacgaagtcaatgaagatcttttcaacggtatccaactgggcgatgcaaacgaacctttactcgcagaggctttagctttaatttccggaacacaaagaaggcaggcaaaaggaagaagcattgagacagctcccgcctttaatatgcttccgaaatcattcaacgacatcaaaagcaatcgaataattcatgtaaaataattaccgctatatagctattatttagaaaaagtttcataacttgtgatggcgtttatatagcttaaatcacaaccacatgtttatcaggaaatcggagaaaaaaggaattatcacactgggcattcttaccatggcattattcgttctgccacaaaccattcacaagagtgaatgcccgattttcttgattccctattcccgactttctgatacgacacaaccagttaccctcaaacatctcgtcattgaactcaattcagcagacagcacgacattgatcggcgtccggggcattggaccatattacgcaaaaaaaattctgcgttaccgggaacaattgggcggtttccactctacacgtcagcttggggaaatcaaattccaatacctgaatatagattcattacttccttgcttctccgtgaatcccgctctaatccggaaaaaagaactggacaccatgagctttaaatccgtcctacatcatccctatctagagtatgaagatgttcaacttatcttcaatgccaaacggaaattcggtaaaatcaactactccatcctagaatcccaaaaagttctaccaccatttaaactcaaaaaaataaaaccttacttcaaataattttgtataactttgtataaacaatatgtggtagcctgtcgtaaataatttacaacactatcatttacaacgcaaacaacacacataacttatagcgtatgaagaaagtatttataacactagcgattattatcgtgctaattattgtcacactgatggttatcccagtcttttttaaaagtgacattctacgactaatcgaggagaaatcctcaaaatacatccaagccgaattggctatcgggaacgtgcatttaagtatgttcaagaatttcccgaacttaagtgtttctctggataacgtggttatttccaaggaggaaacgaacacacgggacaccttaatcaatattcctcttttcgaggcttccgtaaatttacgttccttaatttccggtaaagaaatcataatcaataacattttattaaaagattgtgattttatgcccaaagtcaatgctgagggaaaagccaactgggacatcatggttccttccgacacgacagagatgaaaacagaagaaacacccgtggaaaccaaagaagagcctggttcggaaactgctatcgctttcaacaacattgaagtgcgtaacctgatgttaaactatcaagacgaacaagctcagacatttgcccggatcgacgccgtgaacatggccttacaaggaaatctttccgagaccaacaccatactaaacgtgttattgaaactcaaaaacatatatttgcgtcaaggtaaaagcgtgtgggtaaacaacacggatttcaactggcaagccgaaatcggtgccaacttgaaagaactccaattcgacatcaagaaaaatgatatgtcattgaatgacttgaaactggatttaaccggaaacattgatattgatgacgacaaatacacgatggacttgaatctgaacgcacccgacacgaaatttgaaagtctgctagcattaattcccaaggatttccagaaagaaatcgagggggtcaaaacttccggagaattccaactcagcctatccgcaaaaggggaatattacgagaatcatcttcccacttttgacttgcgtttcaacattctgaacgcaaatctaaagtacccggaccttcccgaatcggttgaaaaaatcaatctgaaactggcagtgaccaaccccggcggaaccatcgcacaaaccaaggcagatttaagtactttgaccttcacggttgccaacaacccgttcagcatgaacctgcttgtagttaacccagacgacccgacattaaagggtggcatgaaaggcgttattaacttcgagagtttgaaaaaagccttaccgttaaaagacatcacgttaaatggtatcttaacaaccgatctctcctttgacgggaagtaccaatatatagagaaagaacaatacgaaaagttcacggcaaacggtaagattgccctacaaaacgtgttgttcaagaatgcggacttccctgccggaatttctgttccgtctggagaggtaaccatcacacccgcccgactgaacttgaaagacttgaaagtaaaaatcaactcttcagacttcgccctagtcggttatcttgccaactacctgccctacgtgttcaaggaccagaccttaaaaggtaactttaccttgaattccaacaaaatcgacttgaatgaattcatggcaaacatgacgacctccgaggccgacacgatgcaggctgcaacaacacaaagttcggccccggcagaagaaacatcaagtgtactggctattccgaaaaacatagaactggccttcggcacgaacatcaaagaaattttgttcgatagcctcgtgataaattctgtcaaaggaaacatcgaaacatccggtggtatcgccacactaaagaacctaagcatggatatgctgaacgggaacctgatcatgaacggggcctacaacacggcaaacccagccaagccttccgcagacttgaatttacgggttaccgacattgacattcactcggcatacaacgctttctctttcatcaaacaaagcttgccaattgccatgaactgcaatggtaaaatatccgctaccatgaaattcagctcggatctggacaaagaaatgagtccgatcatgacaacggccaatggtggcggtagcctctcaaccaagggatttgtcctaaatgataatccggccatgacccaactggccagcctgttgaaaaatgacgagttaagccgtttaagtatttccaacttgaaaatagacttcaagattgaacaaggaaatattatcgtggaaccgtttaccacgaatatcgcaggaaacccgaccaccttctccggcagccaaaccgttgatggcaaaatggattacacgatgtccatgaacattgcccggaaatacttcgggaaagacattgacaacgtattgaaagccatccccggagccaacaacattcaatcattggacgttgatgtcaaacttggtggtactctggataaaccgacaattacccccgatttgtctaaagcattgaagaaaatagaaaaagaagccggtaaagaattaaaaaacaacctcttgaaaggcttggataaactattcaaataaaagaaacggaggagcgtaaaaaacattcaaaaaaagcaattctaaaaagaattaccacgctcctcctatatatttttccatcaatatctcttgatgcaagctatgaatatccccggcataataatcggccaaagcggcatcacacaattttcgggctcccatcatagcctctttgccatagaatccggcaaatgaaagtatattcacctgcacctttccacctttttctttaaaccgctcacaataccggacaatatccttcgcgtaaaacgaataccgttccggatgcgccagcacaggacaaaatcctcgtccctgtaaaccgaataatatatcatccacgtaattggaaggcccgacaaaactatgctcaaccaacacttctccccggttcgatgccatgatttcccccctttccaataactccagcataaactcccccatccggtattccgccccggaatccacctcaacacgcacaccctcctcctgcaagcgcaacttcaacacgaacaacatactctccacatctttcggtgtatttatcatagccgggtaagccacgtggggcgtacacgtcaatcgtttcaatcccatccgttccatccgtttcacgatcatcacggcctcatccatcgtcttcaccccatcatccaaaccgggtaaaacgtgagcatgtatatcatcttcatactcgaaaaaatatcgtttatatctattaaaaaacaacatgatcaagaagttttacgatccgtatttccgttaccgtaactgtattgatagccgtatacataaccgtatccgtacccgcccgattcaacctttaccccgttaagaacaactcctaaatccgatagacgcttatctttttccagctcggataaaagtcttaacgattcctttctcaatacattagcccgcaccacgtaaacacaggcatccgccaacttactcagagtaaaaccttctgccagcacacccagaggcggtgtatccagaataatacaagaatacttccctctcagatattccaacaactcctgcatccgtggactagctatcaattgtaccggattaggcggtataactcccccgaacaaaacgtgtaactcctcgttaacccgccagattaattgctccggagtatcacacaatcccgccaaataggcggacaatccctcctgtcgatcgaaatcaagaaaactatgcaaactgggattccgcaagtcacatccgacaacaatcacccgcttacctgccctagcatacgcattggccagatgagtcgcaaccatagattttccttctccgggaatggtagaggtcaccataatcaccggggacttttgttgtttaaggatataattcaatttctcccggatcaactgcatcgattccgattgaataaaatcctcttctccaacttttacctttccattcccgacctccgggaaggtccccagcaaaggcaaacgaaccactcgttcgagatcctcaacactcctcactttcgaatccaacatatctattcccagaataatccccacgggtatacacacgcccaacatgcaccccaacaacaaaatcaacgatttcttcgggcttacaggcccctcccccgcatccggatcttcgataatcttcgctgtcggcacataaaccaatttcgcaatttccgcctcttcccgcttttgcatcagaaaaagaaacaaattctccttcaactcctgctggcgggctattgcccggtattgtttctcctgcgtgggtaccgaaatcaatcgttcgtccaccgaaagactttcccgttccaaccctttgatctttataatcaatcccttctccacgtttccgatggcctcacggatactactcttcacccctcgcaattgcatatccaaccccgtcacgatcgggttattctcccgagcactcaacaataatttctcgcgccgcaatatcatttcattgtaacgggaaagagcgttgttcaaaccgtcatccgtcaaccccatattctccggcaataacgagaactccccatcctcgttcttttccgtcagcaatcgaatacttcgcaccacgtccaactccgtttgggcctttagtaattccgttccggccagttttttcctttccatggcaaaagccgcatcagatgtcagatccgtcagcttattcgtacgcttaaaatgttcggcatcattctctatcgtccccagttccccgtttatcacctgcaagcgagcattaataaactccaccgtcttggccgaaacctgttgtttatccgtcaccccgttctggttatagcgatccaccaaagcatgtatcaactcaattccccgtcccggaatcggatctttcaacgtaattcgcacggcattcgtatttttttccagcggcataatactcaattttttataaaaagccttcgtggccgtttcgtatgaatccaagttaatccggacttcccgtaattcactccccttgtagtccgcattcttttccacggaaatacaatattcccccatggaaatactctccgaaaaatgtcctcgccggatcacctctcccttcggatcagtcacgacaacctcgtcatttgcagacaaaagaacatacaggcaagtatcctttataccttccgggtgatcaaccaataccttcacgggagaatcattataaagttcatgatcccggaaaaaacattcttgagtataacgtatatttaactccaaatcccgaaccacctcccgcatcaaattcttcgactgcaattccaccatttcgttctccacgtacacatcccccgcccgagacaaccccaactccttcatcatcacgttcgttcccaactctccctttttcgtgtcactaatcatcaccttcccgtgaatatcatacaccggcgtactgattaaacaataaaatagtgccgccgccaaacacagcggcaccgagatgataaaccaacgccaccggactagaatcttataaaacaacttacccaagtcaatgacatcttcctgatcagactgtatttctctactgacattctcgttcataaaattgttactttatagattcataaatagttgcaaccagcttttccggtcatcatcttattattaaagccaacacggctacgaaagtggatacacttgataatatataaggtaagaaagttcctgcgttgccccccacgattcgcccccggctcggttcaacgtacaccacgtcattttgctgcaaatagaaaaacggggaatgtaacaactcactcgaagttagatcgacacgggaaaacaccttttcattcccatcctcccgcatcaccaaaacgttctttctcttggcattaatctgtaaatcacccgccattcccaaggcatcaagaatagagattcgctcgctgttcaccttgtagctcccgggattacgcacctcacccaaaacagtcaccttaaaattcaagaattgaatcgtcacgatcgggttcttcaaatagccggacaacttctcctttaacatatcggccaattcattacgagaaatcccgtccacctgcaacttacctaaaacaggaaaatcaacatatccctctttatcaactaggtatcccaagactgcttgctggttccccgaagtgacctctttccctaaaccgatcatcggggtattgaatggtaaggcagcctcaatgtcatcacacgacacgataatcgacaataaatcatcaacatgaatcacggttcgatactcacatgccgccttaactcgcttatccactttaatatcctgtaaataaacgacctttttactggatgcacatccgaaaatgcacattccacacacccaaacaataaacagcttataaacagacatatacacctctctttttatacattcacgctatcaaaaaaccaacgatttttgatagcgaaaaaagaaaggtaaaaacaaataatcacggaaagtcacctagtcataaaggtatgtgtatgaatgactaagcaaaaaacgtaaataaaaaagaataagaggatttataatattaagaatcgttcgtttatttgattacaaatatagagattttttcatacacctctaatcattttcaatatttttgtcaataacatcaaatttagaaaatttcacttgcacatttcatagccgatcccgatttattcaacatcacatttttaacaaaatagtgaacacttcactcgttcgaaaaacaggttatctcacaactatgttattatttcccctcgaatataccgtttttcaattccaccctgtacacggatgattcgtaaaagaaaaacggtatttaaacatcaaacgccccacctcaatttacatttttatattaacaatcaaaaccgggtctcttaaaataacgagcttttggaaaaaagtgatcaatctccaaccccaattgttccaaaatcacgatcaagtgagatatattcgattcaaaatttgacaaacgctccctcaaaaccatccacgcattttgagaaatctcgacagccaacaaggctaccttcgccgatccattataatcatcctcttcctgcgtggcattaatcttatccgaatagatataatacccgtacaacgccctcctaatcttggagtgaatcaaatccagataccaatttacctccaacaacgcatcaccgacctctttcgttctaggagcatcaccttcttttatcttggcctcgtcaaaccattgataaataccctcttggcatttctcggccagagtcttataaatccggtcacatttcacaagatcttcctgttctatctgcctgaccgcctcttcatcctcatcttccaaatcctcgtaatcctccccccagaatccccggtccaccttctccgaggaataaatatcctctatccccatacctctttcctccgccaactctcgcaacacgtcaaaagtagaatcaaaaatatttttcagacgggctaacgccgactcgtcatcatccggcatctcctctcccaagttcactttcgtccgttccttcaatttcttccccatcatgtaactcatacaacgaagctgcaatggacaacgttcacaccatctgtcgcaataattatagatacccggcacgaaaccggtatctacaatctttttttcttttttcttaggcacgtccttataatcttaaccgattaattttttataacgtatacgtttcggagtaacatctcccaaacgttttctcttactttcctcgtattcggagtaacttccctcgaaatataccactttagaatcaccctcgaaagccaggatatgagttgcaatacgatccagaaaccaacgatcatgcgacacgaccacggcacagcccgcaaaattttccaatccctcttccagggcccgtaacgtgttcacatcaatatcattcgtgggctcgtccagcaacaacacgttagcatcctcctttaatgccaaagccaagtgtaagcgattacgttccccaccggacaacaccccgcatttcttttcctgatccgtcccggagaagttaaatttggaaacataagcccgggcattcacttcccgtcctcccaggtttatcaaatcacttcccccggaaatcacctgataaaccgtcttctccgggtctattgctttatgctgttgatctatatacgcgatcttcacggtcggcccaacttcaaatgtccccttatccggttgctccacgcccataattaaacggaacaaagtagtctttcccgcaccgttagggccgatcaccccaacaattccggccgggggtaacttaaattcaagatcatcgaacaacaccttatccccgaaagccttcgccacatgctcggcctcgatcaccttgtttcccaaacgaggaccgttcggaataaatatttcaagcttttcttctttctccttcacgtcctcatccatcatccggtcataagccttcaaacgggccttactctttgcctgacgagccttaggagccatacgtacccattccagctctcgttccagcgtcttccggcgtttgctggcctgtttttcctcctgttccaatcgttttgccttctgttccaaccaagaagaataatttccttcccatggaattccctcaccccggtctagttccagtatccaaccggccacgttatccaagaagtaacgatcatgcgtcacgcaaatcaccgtaccgggatattgatgcaagtgttgttccaaccattccaccgactcagcatccaaatggttcgtcggctcatccagcaacaaaatatccggttcttgcaacaacaagcgacacaaggccacccgacgacgttctcccccggaaaggaacttcacttccgcatccggttcaggacaacgcaaagcatccatagccctctccaacttctggtcaatctcccatccgccgtgatgctcgatcaattctgtcaactccccctgacgagtcattaacttatccatctcctcatcactcatcggttcggcaaacttcatgttcacctcctcgtactccttcaacaaatccatcacctcctgaacaccctcctgcacgacctctttcacggtcttggaatcatccaactgaggctcctgtggcaaatacccgatagaatgttctttcgaccagatcaccttcccctcgtaattcgggtctaacccggcaataattttcaataacgtcgattttccggaaccgttcaaaccgatcaccccgatttttgccccataaaaaaaggaaagataaatatcctttataatctttctttgaggtggtatcgttttactcacccccatcatggaaaaaataattttcttctcgtctgtcatacccattaacttacacgatattatgtttcacttctagcacacaactaattatccttaaaatggatacaaagatatattatatcttcaaattaaaaaaatatacttaatccgttatacgaaacaagcgtgtattttgtttcaaaattctaaaagaaattcacaattattctttaacaagacacttgccccctcatcaaacataattcattcaaacatataacaaactagctatcatagccattacacaagaatccccgggagccttctctctcccggggataaaaaaacacaaatctctataaattaattaatcgaataaataattcaattttaacactaacaatcgataatgttcacgtgttttatcatttcctgtattcatccgacttttggccgtgttgtatgtttttcgcaaatatttcatcacgatcggacgcttatttgacttgtcaattctcggagataacacaatttcaccaagagcatccacagcatcaaaactatgatgagactcgcaataggcatgacaactacaagtcgtctcgttcaaccattctctcaacgaattactcccggcactcttgaactcacctttatccatgtacccggtcagattttccacgaaagaattctggaaagccatatctgccaactgcagattaccggttttcttggtaaacatctcgtcaaaaataattcccagatattcatccaacgtgaatacattctttccgtccacctcgtttatttgcaagcgccctaacgtctcccgggtcaacatctcgttgaagaattgcgtttgagccacgtagtgcttggctgtcgggccgataatcgcggtaatcttatcattaataatccagtcctgcaactcgttcaaattcttcaacacgaacttcaacgccgcaatctgtttcgccttgggaacatactggtaaagaggttccggatcaccataatatttcggattaatatacattcccccgacactcaccatagcgtgatccat

SEQ ID NO: 10926 - DNA, 199 bp, Unknown
  gut microbiota DNA sequence
ccccgcaccactctccaccgccatgctaagaatcttgaagtgattcttcatcctgaacatcttggcaaaatcacccaggtaagggatcaaccccactccacttaccatcgcgttcacaaggtctccttgttgagcgtaaagagaggcactcaaggcatccgctatacccgtgggatcaacgattcccacgatatcaagg

SEQ ID NO: 10927 - DNA, 946 bp, Unknown
  gut microbiota DNA sequence
aaaagattttctattcttccgttgcctacctgcaatcaaccgatgacacttcccggctggacgaatttcgggacaagggtgattatgaaggattgctccaagctgccaaagagtattatgacggaaacggtatcaatgagcaatatacctttgcctctcctctccagaacaagggtgatgacctgttgattgaagacaaggattttgccgtggtctataacaacagcgtgggtggcacatacgaggtgatgctgaaatattcggaacaggaaatccgtgaccatattaccagatatggaacccgtctggcaagcgatgacatcaaagaggtggcaaaggatatggtggcagaacagttccaggctataacgaaacagcgaatacctgtctttgaaatgccgagcggagatattctctatgccggatataacagggagaccgacacgcttgatgtcggtacggtggtcaatgccggtcttgttcccaaccatcagttcccctacgaccacgacaattctctcgaatccaacctgcaatccgtccattcggaattaagtcatatggaacagtatcaggaggaagaggtggaatatagcggtggtatgcaccgataactataatggggcgtttgcgtattcaatccaaccgttgggagtttgttctccttgcggttggattgttgtagctatacagtcagtcaatatcatagcctatcacataatcgtcattgataagcagatagtagtagccgttgccacaattccgatattccttgctgaagcctgccgccatatcgccattgtctcgtggctcacaccaaagcgttccgtcataaccgcaaaaatcaaagcggcaagtggaaaatttctctttgtttttcagtgcctcacggaagagacgcattgctgtcgttccacagtatttttcaatggtggcaagtccgata

SEQ ID NO: 10928 - DNA, 1049 bp, Unknown
  gut microbiota DNA sequence
ggcgtaaagggcaacgacgagtagccttgttgtgcggtcacttcggctacagcaagcaggcctactaccgcgggcagcgggctggcgacaaactggagagggagtgttaccttctatcgctcgtccgggacatacgcgaggacatgccaaacctcggcggggtgaaactatggaagaagctaaattccagcggtgtccaggtcgggcgtgacgagctttaccgcttgcttcgcgctcacgacttgatggtcaagcacgagaaaaggcgagtggtaacgacggattccagcgggtggttccggcagttcccaaacctggtgaaagggctggagatcaagcgccccaaccaggtttgggtcagtgatatcacttacgtggacacgctctcggggttcgtctttctctccctggtgacggatgcctactcccgccggatcatggggtggttcgtgcacgacaagttaaacacggaaggaccgttgaacgccttgtacagggccttcttgcaggtcagggcaagcgagatcgagggcacgatacatcactcggacaggggcgtgcagtattgtagttaccagtacaacacaacgctggggatgaagcggatgaacacgagcatgacccaggacggatctccgtacgataacgctatcgcggagagggtgaacgggattctcaagagggagtggctggaacaggaggttttcgtgaacatcgaacaggtcagggtgagggtggagaaggtcgtcgcgttgtacaacgggcagagaccgcacttctctatagggctgaacacgcctgattcgatttaccgggacttgaccggaaagttcgccttccacatgtactagtccaggaaggaattcccggtttttcgctacgcgaacggttggctcatgcccgtggaaggcagccaaccgaagatattaggaaaatttagtacccgaatttatagggggttttatttatatgtcgtatctttgatacattgttagggtgtttgttaaaatttttgtttaatccgagtcaaccattttcaggaaagtaca

SEQ ID NO: 10929 - DNA, 511 bp, Unknown
  gut microbiota DNA sequence
atgttctcggctaaaatgtttgccgtatgcatccaatactccaaatcacgcgaagaagcggaagataatttgcaagatggttttatcagagtattggagtctattgaccaatacaagggaaaaggctcttttgaaggctggatgaaacgtattttcatcaacacggcgttagagaaattcagaaaaaatcgatccgtgcaagttgtcgaagaagttccggaagtggtggatgaagatgattttgataatgacgtgagcatacctcccgaggtgctgttcgagtttgtcaatgaattaccggagaaataccggctggtcttcaacttgtacgtcatggaagacatgcaacacaaggagatagcagcattattaggtatatccgacggtacatcgaaatctaacctggcacgggcgaaagaaattttgaaaaggaagataaatgcatatttgagagatgagtgagaagattgaaaaattatttaaaaacgctttggaacaagtttccgttgaa

SEQ ID NO: 10930 - DNA, 1764 bp, Unknown
  gut microbiota DNA sequence
cgtatagtggtattgctgcagcggtaatattattgttcggcgtgggatttttcatgcaaagcaaacataccgatatctataccccgacatctgttgccactctgaattcaagtattaataatcaggataataataagatactagcatttacttctaccccttattcaataccagaaataaagaaaaaaagagaagagtataccgtagagcatcttgctccggttccaatttccatttccgctttaaccggtttggagaacgagcaaccggaaggtgatttaaagaaagcatccgttcgtgcaggttttatccctttggtaaatcaaaatgcgatagaaaaccaacgtaaatatacggaacttttggacgggaaaagtataaccacggtaaagactaccaataaagtaaaatcagaagatgctaaaatgtttactgtaggtggatatgtctctcctggatattcgtccggtagctataaaacaagtggaacaaatgcccgttctgcccagtatgaaagtagccagatgagtggtatttttaatgtaggtggagggttgactttcgccgtaaaaccgactaaacgaatctctatagaaaccggtttaggatattcccgtatgggacaaaagacggatgatgcacaagtgtatgtgcctcgttctgatatggtgtcatataatgctaacactcatgcctataccccacttggcagcgtaaaaaacaaagccaatgcgaccgtttcttctcccgaaacctttgtttcgttaaaaacagaacaggatgaagacggaagtatcgagcagcaattcgatgctattgagattcctttgattttccgttatcatttgaatgataatagagtaaaatttagtgtgttaggtgggtttggtgccagttttatggtacgtaaccatacttacgtgaattacaatgggaagaaagaatttatgggagaagccgaggacatcagaacgtttaatatcagtacgaatatcggtttcggtatcgagtatcccctttcaaaatcaatccacataaaagtggaaccgggattcaaatattatttacaatccttgagtaagagtgcagaaattgattttaaaccttactcgttcacgttctccactggaatcggaattaatttctaattaatatttacgatttaatatctcgctggaaattatcgcttgacgaatatcaaaatcaaaatgttcggtaattgaattatttggttgctcgttagactcttcatcatctttaaagagaaccacctctttcttagtccgtcctcttctggcttgttgcagttgttcaagcatggcataacgttcttcatctgttttaccaaaattattcacgtttatctctctccccgctctttctacaagttcaccgctatttgatatcggagcaaaaacaggttccggagatgggatttccggttcttgtgaaatcacgacaatctcatcatccaaatcatcatgttcttcttccggaagatgaaattcgggaggtgtattttttgcttttttctccttggaagccttaaaccagcctattgcactcgcacctaacgtcaacagtaagtaaacaattaaatcaacacctttatcgctcataatatcaacaaataaattattccgaaacctttaataatatccaattatttatcaaatatactgtttttttgaacacgggaaagcaatcgcaagaaaaatattgcatgaaacgcttttttatataaaaaaataatattcttttttt
